United States Patent Application Publication US 2026/0193644 A1 - sequence listing, part 5

SEQ ID NO: 9800 - protein, 770 aa, Homo sapiens
MRGVWPPPVSALLSALGMSTYKRATLDEEDLVDSLSEGDAYPNGLQVNFHSPRSGQRCWAARTQVEKRLVVLVVLLAAGLVACLAALGIQYQTRSPSVCLSEACVSVTSSILSSMDPTVDPCHDFFSYACGGWIKANPVPDGHSRWGTFSNLWEHNQAIIKHLLENSTASVSEAERKAQVYYRACMNETRIEELRAKPLMELIERLGGWNITGPWAKDNFQDTLQVVTAHYRTSPFFSVYVSADSKNSNSNVIQVDQSGLGLPSRDYYLNKTENEKVLTGYLNYMVQLGKLLGGGDEEAIRPQMQQILDFETALANITIPQEKRRDEELIYHKVTAAELQTLAPAINWLPFLNTIFYPVEINESEPIVVYDKEYLEQISTLINTTDRCLLNNYMIWNLVRKTSSFLDQRFQDADEKFMEVMYGTKKTCLPRWKFCVSDTENNLGFALGPMFVKATFAEDSKSIATEIILEIKKAFEESLSTLKWMDEETRKSAKEKADAIYNMIGYPNFIMDPKELDKVFNDYTAVPDLYFENAMRFFNFSWRVTADQLRKAPNRDQWSMTPPMVNAYYSPTKNEIVFPAGILQAPFYTRSSPKALNFGGIGVVVGHELTHAFDDQGREYDKDGNLRPWWKNSSVEAFKRQTECMVEQYSNYSVNGEPVNGRHTLGENIADNGGLKAAYRAYQNWVKKNGAEHSLPTLGLTNNQLFFLGFAQVWCSVRTPESSHEGLITDPHSPSRFRVIGSLSNSKEFSEHFRCPPGSPMNPPHKCEVW

SEQ ID NO: 9801 - protein, 686 aa, Homo sapiens
MRLPDLRPWTSLLLVDAALLWLLQGPLGTLLPQGLPGLWLEGTLRLGGLWGLLKLRGLLGFVGTLLLPLCLATPLTVSLRALVAGASRAPPARVASAPWSWLLVGYGAAGLSWSLWAVLSPPGAQEKEQDQVNNKVLMWRLLKLSRPDLPLLVAAFFFLVLAVLGETLIPHYSGRVIDILGGDFDPHAFASAIFFMCLFSFGSSLSAGCRGGCFTYTMSRINLRIREQLFSSLLRQDLGFFQETKTGELNSRLSSDTTLMSNWLPLNANVLLRSLVKVVGLYGFMLSISPRLTLLSLLHMPFTIAAEKVYNTRHQEVLREIQDAVARAGQVVREAVGGLQTVRSFGAEEHEVCRYKEALEQCRQLYWRRDLERALYLLVRRVLHLGVQMLMLSCGLQQMQDGELTQGSLLSFMIYQESVGSYVQTLVYIYGDMLSNVGAAEKVFSYMDRQPNLPSPGTLAPTTLQGVVKFQDVSFAYPNRPDRPVLKGLTFTLRPGEVTALVGPNGSGKSTVAALLQNLYQPTGGQVLLDEKPISQYEHCYLHSQVVSVGQEPVLFSGSVRNNIAYGLQSCEDDKVMAAAQAAHADDFIQEMEHGIYTDVGEKGSQLAAGQKQRLAIARALVRDPRVLILDEATSALDVQCEQALQDWNSRGDRTVLVIAHRLQTVQRAHQILVLQEGKLQKLAQL

SEQ ID NO: 9802 - protein, 532 aa, Homo sapiens
MAPSFTARIQLFLLRALGFLIGLVGRAALVLGGPKFASKTPRPVTEPLLLLSGMQLAKLIRQRKVKCIDVVQAYINRIKDVNPMINGIVKYRFEEAMKEAHAVDQKLAEKQEDEATLENKWPFLGVPLTVKEAFQLQGMPNSSGLMNRRDAIAKTDATVVALLKGAGAIPLGITNCSELCMWYESSNKIYGRSNNPYDLQHIVGGSSGGEGCTLAAACSVIGVGSDIGGSIRMPAFFNGIFGHKPSPGVVPNKGQFPLAVGAQELFLCTGPMCRYAEDLAPMLKVMAGPGIKRLKLDTKVHLKDLKFYWMEHDGGSFLMSKVDQDLIMTQKKVVVHLETILGASVQHVKLKKMKYSFQLWIAMMSAKGHDGKEPVKFVDLLGDHGKHVSPLWELIKWCLGLSVYTIPSIGLALLEEKLRYSNEKYQKFKAVEESLRKELVDMLGDDGVFLYPSHPTVAPKHHVPLTRPFNFAYTGVFSALGLPVTQCPLGLNAKGLPLGIQVVAGPFNDHLTLAVAQYLEKTFGGWVCPGKF

SEQ ID NO: 9803 - protein, 929 aa, Homo sapiens
MTKKRKRQHDFQKVKLKVGKKKPKLQNATPTNFKTKTIHLPEQLKEDGTLPTNNRKLNIKDLLSQMHHYNAGVKQSALLGLKDLLSQYPFIIDAHLSNILSEVTAVFTDKDANVRLAAVQLLQFLAPKIRAEQISPFFPLVSAHLSSAMTHITEGIQEDSLKVLDILLEQYPALITGRSSILLKNFVELISHQQLSKGLINRDRSQSWILSVNPNRRLTSQQWRLKVLVRLSKFLQALADGSSRLRESEGLQEQKENPHATSNSIFINWKEHANDQQHIQVYENGGSQPNVSSQFRLRYLVGGLSGVDEGLSSTENLKGFIEIIIPLLIECWVEAVPPQLATPVGNGIEREPLQVMQQVLNIISLLWKLSKQQDETHKLESWLRKNYLIDFKHHFMSRFPYVLKEITKHKRKEPNKSIKHCTVLSNNIDHLLLNLTLSDIMVSLANASTLQKDCSWIEMIRKFVTETLEDGSRLNSKQLNRLLGVSWRLMQIQPNREDTETLIKAVYTLYQQRGLILPVRTLLLKFFSKIYQTEELRSCRFRYRSKVLSRWLAGLPLQLAHLGSRNPELSTQLIDIIHTAAARANKELLKSLQATALRIYDPQEGAVVVLPADSQQRLVQLVYFLPSLPADLLSRLSRCCIMGRLSSSLAAMLIGILHMRSSFSGWKYSAKDWLMSDVDYFSFLFSTLTGFSKEELTWLQSLRGVPHVIQTQLSPVLLYLTDLDQFLHHWDVTEAVFHSLLVIPARSQNFDILQSAISKHLVGLTVIPDSTAGCVFGVICKLLDHTCVVSETLLPFLASCCYSLLYFLLTIEKGEAEHLRKRDKLWGVCVSILALLPRVLRLMLQSLRVNRVGPEELPVVGQLLRLLLQHAPLRTHMLTNAILVQQIIKNITTLKSGSVQEQWLTDLHYCFNVYITGHPQGPSALATVY

SEQ ID NO: 9804 - protein, 1012 aa, Homo sapiens
MAFPPRRRLRLGPRGLPLLLSGLLLPLCRAFNLDVDSPAEYSGPEGSYFGFAVDFFVPSASSRMFLLVGAPKANTTQPGIVEGGQVLKCDWSSTRRCQPIEFDATGNRDYAKDDPLEFKSHQWFGASVRSKQDKILACAPLYHWRTEMKQEREPVGTCFLQDGTKTVEYAPCRSRQLISDQVAEIVSKYDPNVYSIKYNNQLATRTAQAIFDDSYLGYSVAVGDFNGDGIDDFVSGVPRAARTLGMVYIYDGKNMSSLYNFTGEQMAAYFGFSVAATDINGDDYADVFIGAPLFMDRGSDGKLQEVGQVSVSLQRASGDFQTTKLNGFEVFARFGSAIAPLGDLDQDGFNDIAIAAPYGGEDKKGIVYIFNGRSTGLNAVPSQILEGQWAARSMPPSFGYSMKGATDIDKNGYPDLIVGAFGVDRAILYRARPVITVNAGLEVYPSILNQDNKTCSLPGTALKVSCFNVRFCLKADGKGVLPRKLNFQVELLLDKLKQKGAIRRALFLYSRSPSHSKNMTISRGGLMQCEELIAYLRDESEFRDKLTPITIFMEYRLDYRTAADTTGLQPILNQFTPANISRQAHILLDCGEDNVCKPKLEVSVDSDQKKIYIGDDNPLTLIVKAQNQGEGAYEAELIVSIPLQADFIGVVRNNEALARLSCAFKTENQTRQVVCDLGNPMKAGTQLLAGLRFSVHQQSEMDTSVKFDLQIQSSNLFDKVSPVVSHKVDLAVLAAVEIRGVSSPDHVFLPIPNWEHKENPETEEDVGPVVQHIYELRNNGPSSFSKAMLHLQWPYKYNNNTLLYILHYDIDGPMNCTSDMEINPLRIKISSLQTTEKNDTVAGQGERDHLITKRDLALSEGDIHTLGCGVAQCLKIVCQVGRLDRGKSAILYVKSLLWTETFMNKENQNHSYSLKSSASFNVIEFPYKNLPIEDITNSTLVTTNVTWGIQPAPMPVPVWVIILAVLAGLLLLAVLVFVMYRMGFFKRVRPPQEEQEREQLQPHENGEGNSET

SEQ ID NO: 9805 - protein, 1305 aa, Homo sapiens
MNSQPQTRSPFFQRPQIQPPRATIPNSSPSIRPGAQTPTAVYQANQHIMMVNHLPMPYPVPQGPQYCIPQYRHSGPPYVGPPQQYPVQPPGPGPFYPGPGPGDFPNAYGTPFYPSQPVYQSAPIIVPTQQQPPPAKREKKTIRIRDPNQGGKDITEEIMSGGGSRNPTPPIGRPTSTPTPPQQLPSQVPEHSPVVYGTVESAHLAASTPVTAASDQKQAQIAITVPKTWKKPKDRTRTTEEMLEAELELKAEEELSIDKVLESEQDKMSQGFHPERDPSDLKKVKAVEENGEEAEPVRNGAESVSEGEGIDANSGSTDSSGDGVTFPFKPESWKPTDTEGKKQYDREFLLDFQFMPACIQKPEGLPPISDVVLDKINQPKLPMRTLDPRILPRGPDFTPAFADFGRQTPGGRGVPLLNVGSRRSQPGQRREPRKIITVSVKEDVHLKKAENAWKPSQKRDSQADDPENIKTQELFRKVRSILNKLTPQMFNQLMKQVSGLTVDTEERLKGVIDLVFEKAIDEPSFSVAYANMCRCLVTLKVPMADKPGNTVNFRKLLLNRCQKEFEKDKADDDVFEKKQKELEAASAPEERTRLHDELEEAKDKARRRSIGNIKFIGELFKLKMLTEAIMHDCVVKLLKNHDEESLECLCRLLTTIGKDLDFEKAKPRMDQYFNQMEKIVKERKTSSRIRFMLQDVIDLRLCNWVSRRADQGPKTIEQIHKEAKIEEQEEQRKVQQLMTKEKRRPGVQRVDEGGWNTVQGAKNSRVLDPSKFLKITKPTIDEKIQLVPKAQLGSWGKGSSGGAKASETDALRSSASSLNRFSALQPPAPSGSTPSTPVEFDSRRTLTSRGSMGREKNDKPLPSATARPNTFMRGGSSKDLLDNQSQEEQRREMLETVKQLTGGVDVERNSTEAERNKTRESAKPEISAMSAHDKAALSEEELERKSKSIIDEFLHINDFKEAMQCVEELNAQGLLHVFVRVGVESTLERSQITRDHMGQLLYQLVQSEKLSKQDFFKGFSETLELADDMAIDIPHIWLYLAELVTPMLKEGGISMRELTIEFSKPLLPVGRAGVLLSEILHLLCKQMSHKKVGALWREADLSWKDFLPEGEDVHNFLLEQKLDFIESDSPCSSEALSKKELSAEELYKRLEKLIIEDKANDEQIFDWVEANLDEIQMSSPTFLRALMTAVCKAAIIADSSTFRVDTAVIKQRVPILLKYLDSDTEKELQALYALQASIVKLDQPANLLRMFFDCLYDEEVISEDAFYKWESSKDPAEQNGKGVALKSVTAFFTWLREAEEESEDN

SEQ ID NO: 9806 - protein, 269 aa, Homo sapiens
MSWKKALRIPGDLRVATVTLMLAMLSSLLAEGRDSPEDFVFQFKGMCYFTNGTERVRLVTRYIYNREEYARFDSDVGVYRAVTPQGRPDAEYWNSQKEVLEGTRAELDTVCRHNYEVAFRGILQRRVEPTVTISPSRTEALNHHNLLVCSVTDFYPGQIKVRWFRNDQEETAGVVSTPLIRNGDWTFQILVMLEMTPQRGDVYTCHVEHPSLQSPITVEWRAQSESAQSKMLSGVGGFVLGLIFLGLGLIIRQRSQKGPQGPPPAGLLH

SEQ ID NO: 9807 - protein, 419 aa, Homo sapiens
MPWRRRRNRVSALEGGREEEAPPEAAAVPPALLTSPQQTEAAAERILLRGIFEIGRDSCDVVLSERALRWRPIQPERPAGDSKYDLLCKEEFIELKDIFSVKLKRRCSVKQQRSGTLLGITLFICLKKEQNKLKNSTLDLINLSEDHCDIWFRQFKKILAGSTNVLAHSLHGVPHVITATLHIIMGHVQLVDVCTFSTAGKLLRFGFSAMFGFGGRTLALAEKYRWMSPNQRRDFAVVKALAKLKAEDCEISFLPFNSSDDVQERRAQGSPKSDCNDQWQMIQGQFLNVSIMAIPCLCSVAPRGLAPNTRLNNGSMALIIARNTSRPEFIKHLKRYASVKNQFNFPFVETYTVEEVKVHPRNNTGGYNPEEEEDETASENCFPWNVDGDLMEVASEVHIRLHPRLISLYGGSMEEMIPK

SEQ ID NO: 9808 - protein, 463 aa, Homo sapiens
MPWRRRRNRVSALEGGREEEAPPEAAAVPPALLTSPQQTEAAAERILLRGIFEIGRDSCDVVLSERALRWRPIQPERPAGDSKYDLLCKEEFIELKDIFSVKLKRRCSVKQQRSGTLLGITLFICLKKEQNKLKNSTLDLINLSEDHCDIWFRQFKKILAGFPNRPKSLKILLNPQSHKKEATQVYYEKVEPLLKLAGIKTDVTRSTNVLAHSLHGVPHVITATLHIIMGHVQLVDVCTFSTAGKLLRFGFSAMFGFGGRTLALAEKYRWMSPNQRRDFAVVKALAKLKAEDCEISFLPFNSSDDVQERRAQGSPKSDCNDQWQMIQGQFLNVSIMAIPCLCSVAPRGLAPNTRLNNGSMALIIARNTSRPEFIKHLKRYASVKNQFNFPFVETYTVEEVKVHPRNNTGGYNPEEEEDETASENCFPWNVDGDLMEVASEVHIRLHPRLISLYGGSMEEMIPK

SEQ ID NO: 9809 - protein, 266 aa, Homo sapiens
MVCLKLPGGSYMAKLTVTLMVLSSPLALAGDTRPRFLQQDKYECHFFNGTERVRFLHRDIYNQEEDLRFDSDVGEYRAVTELGRPDAEYWNSQKDFLEDRRAAVDTYCRHNYGVGESFTVQRRVEPKVTVYPARTQTLQHHNLLVCSVNGFYPGSIEVRWFRNSQEEKAGVVSTGLIQNGDWTFQTLVMLETVPRSGEVYTCQVEHPSVTSPLTVEWRAQSESAQSKMLSGVGGFVLGLLFLGAGLFIYFKNQKGHSGLHPTGLVS

SEQ ID NO: 9810 - protein, 229 aa, Homo sapiens
MAISGVPVLGFFIIAVLMSAQESWAIKEEHVIIQAEFYLNPDQSGEFMFDFDGDEIFHVDMAKKETVWRLEEFGRFASFEAQGALANIAVDKANLEIMTKRSNYTPITNDKFTPPVVNVTWLRNGKPVTTGVSETVFLPREDHLFRKFHYLPFLPSTEDVYDCRVEHWGLDEPLLKHWEFDAPSPLPETTENVVCALGLTVGLVGIIIGTIFIIKGLRKSNAAERRGPL

SEQ ID NO: 9811 - protein, 518 aa, Homo sapiens
MLRVVSWNINGIRRPLQGVANQEPSNCAAVAVGRILDELDADIVCLQETKVTRDALTEPLAIVEGYNSYFSFSRNRSGYSGVATFCKDNATPVAAEEGLSGLFATQNGDVGCYGNMDEFTQEELRALDSEGRALLTQHKIRTWEGKEKTLTLINVYCPHADPGRPERLVFKMRFYRLLQIRAEALLAAGSHVIILGDLNTAHRPIDHWDAVNLECFEEDPGRKWMDSLLSNLGCQSASHVGPFIDSYRCFQPKQEGAFTCWSAVTGARHLNYGSRLDYVLGDRTLVIDTFQASFLLPEVMGSDHCPVGAVLSVSSVPAKQCPPLCTRFLPEFAGTQLKILRFLVPLEQSPVLEQSTLQHNNQTRVQTCQNKAQVRSTRPQPSQVGSSRGQKNLKSYFQPSPSCPQASPDIELPSLPLMSALMTPKTPEEKAVAKVVKGQAKTSEAKDEKELRTSFWKSVLAGPLRTPLCGGHREPCVMRTVKKPGPNLGRRFYMCARPRGPPTDPSSRCNFFLWSRPS

SEQ ID NO: 9812 - protein, 426 aa, Homo sapiens
MEAAVAAPRPRLLLLVLAAAAAAAAALLPGATALQCFCHLCTKDNFTCVTDGLCFVSVTETTDKVIHNSMCIAEIDLIPRDRPFVCAPSSKTGSVTTTYCCNQDHCNKIELPTTGLPLLVQRTIARTIVLQESIGKGRFGEVWRGKWRGEEVAVKIFSSREERSWFREAEIYQTVMLRHENILGFIAADNKDNGTWTQLWLVSDYHEHGSLFDYLNRYTVTVEGMIKLALSTASGLAHLHMEIVGTQGKPAIAHRDLKSKNILVKKNGTCCIADLGLAVRHDSATDTIDIAPNHRVGTKRYMAPEVLDDSINMKHFESFKRADIYAMGLVFWEIARRCSIGGIHEDYQLPYYDLVPSDPSVEEMRKVVCEQKLRPNIPNRWQSCEALRVMAKIMRECWYANGAARLTALRIKKTLSQLSQQEGIKM

SEQ ID NO: 9813 - protein, 455 aa, Homo sapiens
MVDFPGYNLSGAVASFLFILLTMKQSEDFRVIGPAHPILAGVGEDALLTCQLLPKRTTMHVEVRWYRSEPSTPVFVHRDGVEVTEMQMEEYRGWVEWIENGIAKGNVALKIHNIQPSDNGQYWCHFQDGNYCGETSLLLKVAGLGSAPSIHMEGPGESGVQLVCTARGWFPEPQVYWEDIRGEKLLAVSEHRIQDKDGLFYAEATLVVRNASAESVSCLVHNPVLTEEKGSVISLPEKLQTELASLKVNGPSQPILVRVGEDIQLTCYLSPKANAQSMEVRWDRSHRYPAVHVYMDGDHVAGEQMAEYRGRTVLVSDAIDEGRLTLQILSARPSDDGQYRCLFEKDDVYQEASLDLKVVSLGSSPLITVEGQEDGEMQPMCSSDGWFPQPHVPWRDMEGKTIPSSSQALTQGSHGLFHVQTLLRVTNISAVDVTCSISIPFLGEEKIATFSLSGW

SEQ ID NO: 9814 - protein, 503 aa, Homo sapiens
MEAAVAAPRPRLLLLVLAAAAAAAAALLPGATALQCFCHLCTKDNFTCVTDGLCFVSVTETTDKVIHNSMCIAEIDLIPRDRPFVCAPSSKTGSVTTTYCCNQDHCNKIELPTTVKSSPGLGPVELAAVIAGPVCFVCISLMLMVYICHNRTVIHHRVPNEEDPSLDRPFISEGTTLKDLIYDMTTSGSGSGLPLLVQRTIARTIVLQESIGKGRFGEVWRGKWRGEEVAVKIFSSREERSWFREAEIYQTVMLRHENILGFIAADNKDNGTWTQLWLVSDYHEHGSLFDYLNRYTVTVEGMIKLALSTASGLAHLHMEIVGTQGKPAIAHRDLKSKNILVKKNGTCCIADLGLAVRHDSATDTIDIAPNHRVGTKRYMAPEVLDDSINMKHFESFKRADIYAMGLVFWEIARRCSIGGIHEDYQLPYYDLVPSDPSVEEMRKVVCEQKLRPNIPNRWQSCEALRVMAKIMRECWYANGAARLTALRIKKTLSQLSQQEGIKM

SEQ ID NO: 9815 - protein, 1388 aa, Homo sapiens
MAPRRNNGQCWCLLMLLSVSTPLPAVTQTRGATETASQGHLDLTQLIGVPLPSSVSFVTGYGGFPAYSFGPGANVGRPARTLIPSTFFRDFAISVVVKPSSTRGGVLFAITDAFQKVIYLGLRLSGVEDGHQRIILYYTEPGSHVSQEAAAFSVPVMTHRWNRFAMIVQGEEVTLLVNCEEHSRIPFQRSSQALAFESSAGIFMGNAGATGLERFTGSLQQLTVHPDPRTPEELCDPEESSASGETSGLQEADGVAEILEAVTYTQASPKEAKVEPINTPPTPSSPFEDMELSGEPVPEGTLETTNMSIIQHSSPKQGSGEILNDTLEGVHSVDGDPITDSGSGAGAFLDIAEEKNLAATAAGLAEVPISTAGEAEASSVPTGGPTLSMSTENPEEGVTPGPDNEERLAATAAGEAEALASMPGEVEASGVAPGELDLSMSAQSLGEEATVGPSSEDSLTTAAAATEVSLSTFEDEEASGVPTDGLAPLTATMAPERAVTSGPGDEEDLAAATTEEPLITAGGEESGSPPPDGPPLPLPTVAPERWITPAQREHVGMKGQAGPKGEKGDAGEELPGPPEPSGPVGPTAGAEAEGSGLGWGSDVGSGSGDLVGSEQLLRGPPGPPGPPGLPGIPGKPGTDVFMGPPGSPGEDGPAGEPGPPGPEGQPGVDGATGLPGMKGEKGARGPNGSVGEKGDPGNRGLPGPPGKKGQAGPPGVMGPPGPPGPPGPPGPGCTMGLGFEDTEGSGSTQLLNEPKLSRPTAAIGLKGEKGDRGPKGERGMDGASIVGPPGPRGPPGHIKVLSNSLINITHGFMNFSDIPELVGPPGPDGLPGLPGFPGPRGPKGDTGLPGFPGLKGEQGEKGEPGAILTEDIPLERLMGKKGEPGMHGAPGPMGPKGPPGHKGEFGLPGRPGRPGLNGLKGTKGDPGVIMQGPPGLPGPPGPPGPPGAVINIKGAIFPIPVRPHCKMPVDTAHPGSPELITFHGVKGEKGSWGLPGSKGEKGDQGAQGPPGPPLDLAYLRHFLNNLKGENGDKGFKGEKGEKGDINGSFLMSGPPGLPGNPGPAGQKGETVVGPQGPPGAPGLPGPPGFGRPGDPGPPGPPGPPGPPAILGAAVALPGPPGPPGQPGLPGSRNLVTAFSNMDDMLQKAHLVIEGTFIYLRDSTEFFIRVRDGWKKLQLGELIPIPADSPPPPALSSNPHQLLPPPNPISSANYEKPALHLAALNMPFSGDIRADFQCFKQARAAGLLSTYRAFLSSHLQDLSTIVRKAERYSLPIVNLKGQVLFNNWDSIFSGHGGQFNMHIPIYSFDGRDIMTDPSWPQKVIWHGSSPHGVRLVDNYCEAWRTADTAVTGLASPLSTGKILDQKAYSCANRLIVLCIENSFMTDARK

SEQ ID NO: 9816 - protein, 401 aa, Homo sapiens
MASSPRPKMDAILTEAIKACFQKSGASVVAIRKYIIHKYPSLELERRGYLLKQALKRELNRGVIKQVKGKGASGSFVVVQKSRKTPQKSRNRKNRSSAVDPEPQVKLEDVLPLAFTRLCEPKEASYSLIRKYVSQYYPKLRVDIRPQLLKNALQRAVERGQLEQITGKGASGTFQLKKSGEKPLLGGSLMEYAILSAIAAMNEPKTCSTTALKKYVLENHPGTNSNYQMHLLKKTLQKCEKNGWMEQISGKGFSGTFQLCFPYYPSPGVLFPKKEPDDSRDEDEDEDESSEEDSEDEEPPPKRRLQKKTPAKSPGKAASVKQRGSKPAPKVSAAQRGKARPLPKKAPPKAKTPAKKTRPSSTVIKKPSGGSSKKPATSARKEVKLPGKGKSTMKKSFRVKK

SEQ ID NO: 9817 - protein, 561 aa, Homo sapiens
MTVLEITLAVILTLLGLAILAILLTRWARCKQSEMYISRYSSEQSARLLDYEDGRGSRHAYSTQSGNLCFQRSKRDYTPSTNSLVSMASKFSLGQTELILLLMCFILALSRSSIGSIKCLQTTEEPPSRTAGAMMQFTAPIPGATGPIKLSQKTIVQTPGPIVQYPGSNAGPPSAPRGPPMAPIIISQRTARIPQVHTMDSSGKITLTPVVILTGYMDEELAKKSCSKIQILKCGGTARSQNSREENKEALKNDIIFTNSVESLKSAHIKEPEREGKGTDLEKDKIGMEVKVDSDAGIPKRQETQLKISEMSIPQGQGAQIKKSVSDVPRGQESQVKKSESGVPKGQEAQVTKSGLVVLKGQEAQVEKSEMGVPRRQESQVKKSQSGVSKGQEAQVKKRESVVLKGQEAQVEKSELKVPKGQEGQVEKTEADVPKEQEVQEKKSEAGVLKGPESQVKNTEVSVPETLESQVKKSESGVLKGQEAQEKKESFEDKGNNDKEKERDAEKDPNKKEKGDKNTKGDKGKDKVKGKRESEINGEKSKGSKRAKANTGRKYNKKVEE

SEQ ID NO: 9818 - protein, 562 aa, Homo sapiens
MTVLEITLAVILTLLGLAILAILLTRWARCKQSEMYISRYSSEQSARLLDYEDGRGSRHAYSTQSDTSYDNRERSKRDYTPSTNSLALSRSSIALPQGSMSSIKCLQTTEEPPSRTAGAMMQFTAPIPGATGPIKLSQKTIVQTPGPIVQYPGSNVRSHPHTITGPPSAPRGPPMAPIIISQRTASQLAAPIRIPQVHTMDSSGKITLTPVVILTGYMDEELAKKSCSKIQILKCGGTARSQNSREENKEALKNDIIFTNSVESLKSAHIKEPEREGKGTDLEKDKIGMEVKVDSDAGIPKRQETQLKISEMSIPQGQGAQIKKSVSDVPRGQESQVKKSESGVPKGQEAQVTKSGLVVLKGQEAQVEKSEMGVPRRQESQVKKSQSGVSKGQEAQVKKRESVVLKGQEAQVEKSELKVPKGQEGQVEKTEADVPKEQEVQEKKSEAGVLKGPESQVKNTEVSVPETLESQVKKSESGVLKGQEAQEKKESFEDKGNNDKEKERDAEKDPNKKEKGDKNTKGDKGKDKVKGKRESEINGEKSKGSKRAKANTGRKYNKKVEE

SEQ ID NO: 9819 - protein, 584 aa, Homo sapiens
MGNFQLVKEIADEDPSHVNLVNGDGATPLMLAAVTGQLALVQLLVERHADVDKQDSVHGWTALMQATYHGNKEIVKYLLNQGADVTLRAKNGYTAFDLVMLLNDPDTELVRLLASVCMQVNKDKGRPSHQPPLPHSKVRQPWSIPVLPDDKGGLKSWWNRMSNRFRKLKLMQTLPRGLSSNQPLPFSDEPEPALDSTMRAAPQDKTSRSALPDAAPVTKDNGPGSTRGEKEDTLLTTMLRNGAPLTRLPSDKLKAVIPPFLPPSSFELWSSDRSRTRHNGKADPMKTALPQRASRGHPVGGGGTDTTPVRPVKFPSLPRSPASSANSGNFNHSPHSSGGSSGVGVSRHGGELLNRSGGSIDNVLSQIAAQRKKAAGLLEQKPSHRSSPVGPAPGSSPSELPASPAGGSAPVGKKLETSKRPPSGTSTTSKSTSPTLTPSPSPKGHTAESSVSSSSSHRQSKSSGGSSSGTITDEDELTGILKKLSLEKYQPIFEEQEVDMEAFLTLTDGDLKELGIKTDGSRQQILAAISELNAGKGRERQILQETIHNFHSSFESSASNTRAPGNSPSMVGWVRPEETASGKR

SEQ ID NO: 9820 - protein, 2003 aa, Homo sapiens
MQPPSLLLLLLLLLLLCVSVVRPRGLLCGSFPEPCANGGTCLSLSLGQGTCQCAPGFLGETCQFPDPCQNAQLCQNGGSCQALLPAPLGLPSSPSPLTPSFLCTCLPGFTGERCQAKLEDPCPPSFCSKRGRCHIQASGRPQCSCMPGWTGEQCQLRDFCSANPCVNGGVCLATYPQIQCHCPPGFEGHACERDVNECFQDPGPCPKGTSCHNTLGSFQCLCPVGQEGPRCELRAGPCPPRGCSNGGTCQLMPEKDSTFHLCLCPPGFIGPDCEVNPDNCVSHQCQNGGTCQDGLDTYTCLCPETWTGWDCSEDVDECETQGPPHCRNGGTCQNSAGSFHCVCVSGWGGTSCEENLDDCIAATCAPGSTCIDRVGSFSCLCPPGRTGLLCHLEDMCLSQPCHGDAQCSTNPLTGSTLCLCQPGYSGPTCHQDLDECLMAQQGPSPCEHGGSCLNTPGSFNCLCPPGYTGSRCEADHNECLSQPCHPGSTCLDLLATFHCLCPPGLEGQLCEVETNECASAPCLNHADCHDLLNGFQCICLPGFSGTRCEEDIDECRSSPCANGGQCQDQPGAFHCKCLPGFEGPRCQTEVDECLSDPCPVGASCLDLPGAFFCLCPSGFTGQLCEVPLCAPNLCQPKQICKDQKDKANCLCPDGSPGCAPPEDNCTCHHGHCQRSSCVCDVGWTGPECEAELGGCISAPCAHGGTCYPQPSGYNCTCPTGYTGPTCSEEMTACHSGPCLNGGSCNPSPGGYYCTCPPSHTGPQCQTSTDYCVSAPCFNGGTCVNRPGTFSCLCAMGFQGPRCEGKLRPSCADSPCRNRATCQDSPQGPRCLCPTGYTGGSCQTLMDLCAQKPCPRNSHCLQTGPSFHCLCLQGWTGPLCNLPLSSCQKAALSQGIDVSSLCHNGGLCVDSGPSYFCHCPPGFQGSLCQDHVNPCESRPCQNGATCMAQPSGYLCQCAPGYDGQNCSKELDACQSQPCHNHGTCTPKPGGFHCACPPGFVGLRCEGDVDECLDQPCHPTGTAACHSLANAFYCQCLPGHTGQWCEVEIDPCHSQPCFHGGTCEATAGSPLGFICHCPKGFEGPTCSHRAPSCGFHHCHHGGLCLPSPKPGFPPRCACLSGYGGPDCLTPPAPKGCGPPSPCLYNGSCSETTGLGGPGFRCSCPHSSPGPRCQKPGAKGCEGRSGDGACDAGCSGPGGNWDGGDCSLGVPDPWKGCPSHSRCWLLFRDGQCHPQCDSEECLFDGYDCETPPACTPAYDQYCHDHFHNGHCEKGCNTAECGWDGGDCRPEDGDPEWGPSLALLVVLSPPALDQQLFALARVLSLTLRVGLWVRKDRDGRDMVYPYPGARAEEKLGGTRDPTYQERAAPQTQPLGKETDSLSAGFVVVMGVDLSRCGPDHPASRCPWDPGLLLRFLAAMAAVGALEPLLPGPLLAVHPHAGTAPPANQLPWPVLCSPVAGVILLALGALLVLQLIRRRRREHGALWLPPGFTRRPRTQSAPHRRRPPLGEDSIGLKALKPKAEVDEDGVVMCSGPEEGEEVGQAEETGPPSTCQLWSLSGGCGALPQAAMLTPPQESEMEAPDLDTRGPDGVTPLMSAVCCGEVQSGTFQGAWLGCPEPWEPLLDGGACPQAHTVGTGETPLHLAARFSRPTAARRLLEAGANPNQPDRAGRTPLHAAVAADAREVCQLLLRSRQTAVDARTEDGTTPLMLAARLAVEDLVEELIAAQADVGARDKWGKTALHWAAAVNNARAARSLLQAGADKDAQDNREQTPLFLAAREGAVEVAQLLLGLGAARELRDQAGLAPADVAHQRNHWDLLTLLEGAGPPEARHKATPGREAGPFPRARTVSVSVPPHGGGALPRCRTLSAGAGPRGGGACLQARTWSVDLAARGGGAYSHCRSLSGVGAGGGPTPRGRRFSAGMRGPRPNPAIMRGRYGVAAGRGGRVSTDDWPCDWVALGACGSASNIPIPPPCLTPSPERGSPQLDCGPPALQEMPINQGGEGKK

SEQ ID NO: 9821 - protein, 311 aa, Homo sapiens
MSKTSLVTAFILTGLPHAPGLDAPLFGIFLVVYVLTVLGNLLILLVIRVDSHLHTPMYYFLTNLSFIDMWFSTVTVPKMLMTLVSPSGRAISFHSCVAQLYFFHFLGSTECFLYTVMSYDRYLAISYPLRYTSMMSGSRCALLATSTWLSGSLHSAVQTILTFHLPYCGPNQIQHYLCDAPPILKLACADTSANEMVIFVDIGLVASGCFLLIVLSYVSIVCSILRIHTSEGRHRAFQTCASHCIVVLCFFVPCVFIYLRPGSRDVVDGVVAIFYTVLTPLLNPVVYTLRNKEVKKAVLKLRDKVAHSQGE

SEQ ID NO: 9822 - protein, 225 aa, Homo sapiens
MVHVSNRSIQGMNILFSSWAVVLMVMGITLDKWVELISEDERAKMNHSPWMMCCPALWPEDDLKVVRIMMTSSLGLSFLLNLILGMKFTYLIPQNKYIQLFTTILSFFSGISLLWALILYHNKLKQGQSMHFSSYRITWIMYTAYLNVFFLSVCGVLSLLECKLSTSSCTCLNIHKSDNECKESENSIEDISLPECTAMPRSIVRAHTVNSLNKKVQTRHVTWAL

SEQ ID NO: 9823 - protein, 1034 aa, Homo sapiens
MDRRNDYGYRVPLFQSKHLNGDERSGSNYRRIPWGRRPAPPRDVAILQERANKLVKYLLVKDQTKIPIKRSDMLRDVIQEYDEYFPEIIERASYTLEKMFRVNLKEIDKQSSLYILISTQESSAGILGTTKDTPKLGLLMVILSVIFMNGNKASEAVIWEVLRKLGLRPGVRHSLFGEVRKLITDEFVKQKYLEYKRVPNSRPPEYEFFWGLRSYHETSKMKVLKFACRVQKKDPKDWAVQYREAVEMEVQAAAVAVAEAEARAEARAQMGIGEEAVAGPWNWDDMDIDCLTREELGDDAQAWSRFSFEIEARAQENADASTNVNFSRGASTRAGFSDGASISFNGAPSSSGGFSGGPGITFGVAPSTSASFSNTASISFGGTLSTSSSFSSAASISFGCAHSTSTSFSSEASISFGGMPCTSASFSGGVSSSFSGPLSTSATFSGGASSGFGGTLSTTAGFSGVLSTSTSFGSAPTTSTVFSSALSTSTGFGGILSTSVCFGGSPSSSGSFGGTLSTSICFGGSPCTSTGFGGTLSTSVSFGGSSSTSANFGGTLSTSICFDGSPSTGAGFGGALNTSASFGSVLNTSTGFGGAMSTSADFGGTLSTSVCFGGSPGTSVSFGSALNTNAGYGGAVSTNTDFGGTLSTSVCFGGSPSTSAGFGGALNTNASFGCAVSTSASFSGAVSTSACFSGAPITNPGFGGAFSTSAGFGGALSTAADFGGTPSNSIGFGAAPSTSVSFGGAHGTSLCFGGAPSTSLCFGSASNTNLCFGGPPSTSACFSGATSPSFCDGPSTSTGFSFGNGLSTNAGFGGGLNTSAGFGGGLGTSAGFSGGLSTSSGFDGGLGTSAGFGGGPGTSTGFGGGLGTSAGFSGGLGTSAGFGGGLVTSDGFGGGLGTNASFGSTLGTSAGFSGGLSTSDGFGSRPNASFDRGLSTIIGFGSGSNTSTGFTGEPSTSTGFSSGPSSIVGFSGGPSTGVGFCSGPSTSGFSGGPSTGAGFGGGPNTGAGFGGGPSTSAGFGSGAASLGACGFSYG

SEQ ID NO: 9824 - protein, 929 aa, Homo sapiens
MQGLPDPPSQRGIIPRAFEHVFESVQCAENTKFLVRASYLEIYNEDVRDLLGADTKQKLELKEHPEKGVYVKGLSMHTVHSVAQCEHIMETGWKNRSVGYTLMNKDSSRSHSIFTISIEMSAVDERGKDHLRAGKLNLVDLAGSERQSKTGATGERLKEATKINLSLSALGNVISALVDGRCKHVPYRDSKLTRLLQDSLGGNTKTLMVACLSPADNNYDETLSTLRYANRAKNIRNKPRINEDPKDALLREYQEEIKKLKAILTQQMSPSSLSALLSRQVPPDPVQVEEKLLPQPVIQHDVEAEKQLIREEYEERLARLKADYKAEQESRARLEEDITAMRNSYDVRLSTLEENLRKETEAVLQVGVLYKAEVMSRAEFASSAEYPPAFQYETVVKPKVFSTTDTLPSDDVSKTQVSSRFAELPKVEPSKSEISLGSSESSSLEETSVSEAFPGPEEPSNVEVSMPTEESRSRYFLDECLGQEAAGHLLGEQNYLPQEEPQEVPLQGLLGLQDPFAEVEAKLARLSSTVARTDAPQADVPKVPVQVPAPTDLLEPSDARPEAEAADDFPPRPEVDLASEVALEVVRTAEPGVWLEAQAPVALVAQPEPLPATAGVKRESVGMEVAVLTDDPLPVVDQQQVLARLQLLEQQVVGGEQAKNKDLKEKHKRRKRYADERRKQLVAALQNSDEDSGDWVLLNVYDSIQEEVRAKSKLLEKMQRKLRAAEVEIKDLQSEFQLEKIDYLATIRRQERDSMLLQQLLEQVQPLIRRDCNYSNLEKILRESCWDEDNGFWKIPHPVITKTSLPVAVSTGPQNKPARKTSAADNGEPNMEDDRYRLMLSRSNSENIASNYFRSKRASQILSTDARKSLTHHNSPPGLSCPLSNNSAIPPTQAPEMPQPRPFRLESLDIPFTKAKRKKSKSNFGSEPL

SEQ ID NO: 9825 - protein, 347 aa, Homo sapiens
MAAGTAVGAWVLVLSLWGAVVGAQNITARIGEPLVLKCKGAPKKPPQRLEWKLNTGRTEAWKVLSPQGGGPWDSVARVLPNGSLFLPAVGIQDEGIFRCQAMNRNGKETKSNYRVRVYQIPGKPEIVDSASELTAGVPNKVGTCVSEGSYPAGTLSWHLDGKPLVPNEKGVSVKEQTRRHPETGLFTLQSELMVTPARGGDPRPTFSCSFSPGLPRHRALRTAPIQPRVWEPVPLEEVQLVVEPEGGAVAPGGTVTLTCEVPAQPSPQIHWMKDGVPLPLPPSPVLILPEIGPQDQGTYSCVATHSSHGPQESRAVSISIIEPGEEGPTAGEGFDKVREAEDSPQHM

SEQ ID NO: 9826 - protein, 233 aa, Homo sapiens
MAAGTAVGAWVLVLSLWGAVVGAQNITARIGEPLVLKCKGAPKKPPQRLEWKLNTGRTEAWKVLSPQGGGPWDSVARVLPNGSLFLPAVGIQDEGIFRCQAMNRNGKETKSNYRVRVYQIPGKPEIVDSASELTAGVPNKVVEESRRSRKRPCEQEVGTCVSEGSYPAGTLSWHLDGKPLVPNEKGVSVKEQTRRHPETGLFTLQSELMVTPARGGDPRPTFSCSFSPGLPRH

SEQ ID NO: 9827 - protein, 521 aa, Homo sapiens
MSDTSESGAGLTRFQAEASEKDSSSMMQTLLTVTQNVEVPETPKASSTTQLTDTQVLAAENKSLAADTKKQNADPQAVTMPATETKKVSHVADTKVNTKAQETEAAPSQAPADEPEPESAAAQSQENQDTRPKVKAKKARKVKHLDGEEDGSSDQSQASGTTGGRRVSKARRRAAKLQSSQEPEAPPPRDVALLQGRANDLVKYLLAKDQTKIPIKRSDMLKDIIKEYTDVYPEIIERAGYSLEKVFGIQLKEIDKNDHLYILLSTLEPTDAGILGTTKDSPKLGLLMVLLSIIFMNGNRSSEAVIWEVLRKLGLRPGIHHSLFGDVKKLITDEFVKQKYLDYARVPNSNPPEYEFFWGLRSYYETSKMKVLKFACKVQKKDPKEWAAQYREAMEADLKAAAEAAAEAKARAEIRARMGIGLGSENAAGPCNWDEADIGPWAKARIQAGAEAKAKAQESGSASTGASTSTNNSASASASTSGGFSAGASLTATLTFGLFAGLGGAGASTSGSSGACGFSYK

SEQ ID NO: 9828 - protein, 342 aa, Homo sapiens
MAAGTAVGAWVLVLSLWGAVVGAQNITARIGEPLVLKCKGAPKKPPQRLEWKLGGGPWDSVARVLPNGSLFLPAVGIQDEGIFRCQAMNRNGKETKSNYRVRVYQIPGKPEIVDSASELTAGVPNKVGTCVSEGSYPAGTLSWHLDGKPLVPNEKGVSVKEQTRRHPETGLFTLQSELMVTPARGGDPRPTFSCSFSPGLPRHRALRTAPIQPRVWEPVPLEEVQLVVEPEGGAVAPGGTVTLTCEVPAQPSPQIHWMKDVSDLERGAGRTRRGGANCRLCGRIRAGNSSPGPGDPGRPGDSRPAHWGHLVAKAATPRRGEEGPRKPGGRGGACRTESVGGT

SEQ ID NO: 9829 - protein, 420 aa, Homo sapiens
MAAGTAVGAWVLVLSLWGAVVGAQNITARIGEPLVLKCKGAPKKPPQRLEWKLNTGRTEAWKVLSPQGGGPWDSVARVLPNGSLFLPAVGIQDEGIFRCQAMNRNGKETKSNYRVRVYQIPGKPEIVDSASELTAGVPNKVVEESRRSRKRPCEQEVGTCVSEGSYPAGTLSWHLDGKPLVPNEKGVSVKEQTRRHPETGLFTLQSELMVTPARGGDPRPTFSCSFSPGLPRHRALRTAPIQPRVWEPVPLEEVQLVVEPEGGAVAPGGTVTLTCEVPAQPSPQIHWMKDGVPLPLPPSPVLILPEIGPQDQGTYSCVATHSSHGPQESRAVSISIIEPGEEGPTAGSVGGSGLGTLALALGILGGLGTAALLIGVILWQRRQRRGEERKAPENQEEEEERAELNQSEEPEAGESSTGGP

SEQ ID NO: 9830 - protein, 404 aa, Homo sapiens
MAAGTAVGAWVLVLSLWGAVVGAQNITARIGEPLVLKCKGAPKKPPQRLEWKLNTGRTEAWKVLSPQGGGPWDSVARVLPNGSLFLPAVGIQDEGIFRCQAMNRNGKETKSNYRVRVYQIPGKPEIVDSASELTAGVPNKVGTCVSEGSYPAGTLSWHLDGKPLVPNEKGVSVKEQTRRHPETGLFTLQSELMVTPARGGDPRPTFSCSFSPGLPRHRALRTAPIQPRVWEPVPLEEVQLVVEPEGGAVAPGGTVTLTCEVPAQPSPQIHWMKDGVPLPLPPSPVLILPEIGPQDQGTYSCVATHSSHGPQESRAVSISIIEPGEEGPTAGSVGGSGLGTLALALGILGGLGTAALLIGVILWQRRQRRGEERKAPENQEEEEERAELNQSEEPEAGESSTGGP

SEQ ID NO: 9831 - protein, 1220 aa, Homo sapiens
MPGLLNWITGAALPLTASDVTSCVSGYALGLTASLTYGNLEAQPFQGLFVYPLDECTTVIGFEAVIADRVVTVQIKDKAKLESGHFDASHVRSPTVTGNILQDGVSIAPHSCTPGKVTLDEDLERILFVANLGTIAPMENVTIFISTSSELPTLPSGAVRVLLPAVCAPTVPQFCTKSTGTSNQQAQGKDRHCFGAWAPGSWNKLCLATLLNTEVSNPMEYEFNFQLEIRGPCLLAGVESPTHEIRADAAPSARSAKSIIITLANKHTFDRPVEILIHPSEPHMPHVLIEKGDMTLGEFDQHLKGRTDFIKGMKKKSRAERKTEIIRKRLHKDIPHHSVIMLNFCPDLQSVQPCLRKAHGEFIFLIDRSSSMSGISMHRVKDAMLVALKSLMPACLFNIIGFGSTFKSLFPSSQTYSEDSLAMACDDIQRMKADMGGTNILSPLKWVIRQPVHRGHPRLLFVITDGAVNNTGKVLELVRNHAFSTRCYSFGIGPNVCHRLVKGLASVSEGSAELLMEGERLQPKMVKSLKKAMAPVLSDVTVEWIFPETTEVLVSPVSASSLFPGERLVGYGIVCDASLHISNPRSDKRRRYSMLHSQESGSSVFYHSQDDGPGLEGGDCAKNSGAPFILGQAKNARLASGDSTTKHDLNLSQRRRAYSTNQITNHKPLPRATMASDPMPAAKRYPLRKARLQDLTNQTSLDVQRWQIDLQPLLNSGQDLNQGPKLRGPGARRPSLLPQGCQPFLPWGQETQAWSPVRERTSDSRSPGDLEPSHHPSAFETETSSDWDPPAESQERASPSRPATPAPVLGKALVKGLHDSQRLQWEVSFELGTPGPERGGAQDADLWSETFHHLAARAIIRDFEQLAEREGEIEQGSNRRYQVSALHTSKACNIISKYTAFVPVDVSKSRYLPTVVEYPNSAALRMLGSRALAQQWRGTSSGFGRPQTMLGEDSAPGNGKFQALNMEASPTALFSEARSPGREKHGASEGPQRSLATNTLSSMKASENLFGSWLNLNKSRLLTRAAKGFLSKPLIKAVESTSGNQSFDYIPLVSLQLASGAFLLNEAFCEATHIPMEKLKWTSPFTCHRVSLTTRPSESKTPSPQLCTSSPPRHPSCDSFSLEPLAKGKLGLEPRAVVEHTGKLWATVVGLAWLEHSSASYFTEWELVAAKANSWLEQQEVPEGRTQGTLKAAARQLFVLLRHWDENLEFNMLCYNPNYV

SEQ ID NO: 9832 - protein, 763 aa, Homo sapiens
MEHHLQRAISAQQVYGEKRDNMVIPVPEAESNIAYYESIYPGEFKMPKQLIHIQPFSLDAEQPDYDLDSEDEVFVNKLKKKMDICPLQFEEMIDRLEKGSGQQPVSLQEAKLLLKEDDELIREVYEYWIKKRKNCRGPSLIPSVKQEKRDGSSTNDPYVAFRRRTEKMQTRKNRKNDEASYEKMLKLRRDLSRAVTILEMIKRREKSKRELLHLTLEIMEKRYNLGDYNGEIMSEVMAQRQPMKPTYAIPIIPITNSSQFKHQEAMDVKEFKVNKQDKADLIRPKRKYEKKPKVLPSSAAATPQQTSPAALPVFNAKDLNQYDFPSSDEEPLSQVLSGSSEAEEDNDPDGPFAFRRKAGCQYYAPHLDQTGNWPWTSPKDGGLGDVRYRYCLTTLTVPQRCIGFARRRVGRGGRVLLDRAHSDYDSVFHHLDLEMLSSPQHSPVNQFANTSETNTSDKSFSKDLSQILVNIKSCRWRHFRPRTPSLHDSDNDELSCRKLYRSINRTGTAQPGTQTCSTSTQSKSSSGSAHFAFTAEQYQQHQQQLALMQKQQLAQIQQQQANSNSSTNTSQGFVSKTLDSASAQFAASALVTSEQLMGFKMKDDVVLGIGVNGVLPASGVYKGLHLSSTTPTALVHTSPSTAGSALLQPSNITQTSSSHSALSHQVTAANSATTQVLIGNNIRLTVPSSVATVNSIAPINARHIPRTLSAVPSSALKLAAAANCQVSKVPSSSSVDSVPRENHESEKPALNNIADNTVAMEVT

SEQ ID NO: 9833 - protein, 273 aa, Homo sapiens
MAAADGALPEAAALEQPAELPASVRASIERKRQRALMLRQARLAARPYSATAAAATGGMANVKAAPKIIDTGGGFILEEEEEEEQKIGKVVHQPGPVMEFDYVICEECGKEFMDSYLMNHFDLPTCDNCRDADDKHKLITKTEAKQEYLLKDCDLEKREPPLKFIVKKNPHHSQWGDMKLYLKLQIVKRSLEVWGSQEALEEAKEVRQENREKMKQKKFDKKVKELRRAVRSSVWKRETIVHQHEYGPEENLEDDMYRKTCTMCGHELTYEKM

SEQ ID NO: 9834 - protein, 154 aa, Homo sapiens
LFVWEILHSTIRKMNKHVLKIQKELEEAKEKLARQHKRRSDDDDRSSDRKDGVLEEQIERLQEKVESAQSEQKNLFLVIFQRFIMILTEHLVRCETDGTSVLTPWYKNCIERLQQIFLQVCGELRLGNNTILSHKDFSLKKILVKFVRRLYSTC

SEQ ID NO: 9835 - protein, 961 aa, Homo sapiens
MHGHRAPGGAGPSEPEHPATNPPGAAPPACADSDPGASEPGLLARRGSGSALGGPLDPQFVGPSDTSLGAAPGHRVLPCGPSPQHHRALRFSYHLEGSQPRPGLHQGNRILVKSLSLDPGQSLEPHPEGPQRLRSDPGPPTETPSQRPSPLKRAPGPKPQVPPKPSYLQMPRMPPPLEPIPPPPSRPLPADPRVAKGLAPRAEASPSSAAVSSLIEKFEREPVIVASDRPVPGPSPGPPEPVMLPQPTSQPPVPQLPEGEASRCLFLLAPGPRDGEKVPNRDSGIDSISSPSNSEETCFVSDDGPPSHSLCPGPPALASVPVALADPHRPGSQEVDSDLEEEDDEEEEEEKDREIPVPLMERQESVELTVQQKVFHIANELLQTEKAYVSRLHLLDQVFCARLLEEARNRSSFPADVVHGIFSNICSIYCFHQQFLLPELEKRMEEWDRYPRIGDILQKLAPFLKMYGEYVKNFDRAVELVNTWTERSTQFKVIIHEVQKEEACGNLTLQHHMLEPVQRIPRYELLLKDYLLKLPHGSPDSKDAQKSLELIATAAEHSNAAIRKMERMHKLLKVYELLGGEEDIVSPTKELIKEGHILKLSAKNGTTQDRYLILFNDRLLYCVPRLRLLGQKFSVRARIDVDGMELKESSNLNLPRTFLVSGKQRSLELQARTEEEKKDWVQAINSTLLKHEQTLETFKLLNSTNREDEDTPPNSPNVDLGKRAPTPIREKEVTMCMRCQEPFNSITKRRHHCKACGHVVCGKCSEFRARLVYDNNRSNRVCTDCYVALHGVPGSSPACSQHTPQRRRSILEKQASVAAENSVICSFLHYMEKGGKGWHKAWFVVPENEPLVLYIYGAPQDVKAQRSLPLIGFEVGPPEAGERPDRRHVFKITQSHLSWYFSPETEELQRRWMAVLGRAGRGDTFCPGPTLSEDREMEEAPVAALGATAEPPESPQTRDKT

SEQ ID NO: 9836 - protein, 790 aa, Homo sapiens
MSRRRHSDENDGGQPHKRRKTSDANETEDHLESLICKVGEKSACSLESNLEGLAGVLEADLPNYKSKILRLLCTVARLLPEKLTIYTTLVGLLNARNYNFGGEFVEAMIRQLKESLKANNYNEAVYLVRFLSDLVNCHVIAAPSMVAMFENFVSVTQEEDVPQVRRDWYVYAFLSSLPWVGKELYEKKDAEMDRIFANTESYLKRRQKTHVPMLQVWTADKPHPQEEYLDCLWAQIQKLKKDRWQERHILRPYLAFDSILCEALQHNLPPFTPPPHTEDSVYPMPRVIFRMFDYTDDPEGPVMPGSHSVERFVIEENLHCIIKSHWKERKTCAAQLVSYPGKNKIPLNYHIVEVIFAELFQLPAPPHIDVMYTTLLIELCKLQPGSLPQVLAQATEMLYMRLDTMNTTCVDRFINWFSHHLSNFQFRWSWEDWSDCLSQDPESPKPKFVREVLEKCMRLSYHQRILDIVPPTFSALCPANPTCIYKYGDESSNSLPGHSVALCLAVAFKSKATNDEIFSILKDVPNPNQDDDDDEGFSFNPLKIEVFVQTLLHLAAKSFSHSFSALAKFHEVFKTLAESDEGKLHVLRVMFEVWRNHPQMIAVLVDKMIRTQIVDCAAVANWIFSSELSRDFTRLFVWEILHSTIRKMNKHVLKIQKELEEAKEKLARQHKRRSDDDDRSSDRKDGVLEEQIERLQEKVESAQSEQKNLFLVIFQRFIMILTEHLVRCETDGTSVLTPWYKNCIERLQQIFLQHHQIIQQYMVTLENLLFTAELDPHILAVFQQFCALQA

SEQ ID NO: 9837 - protein, 225 aa, Homo sapiens
MPGTQTPAPAEDPHSGCRDPVPARPQACHPKSQETRFEGPLPPPPPAAAAPPPPAPAQTAQAPGFVVPTHAGTVGTLPLGGYVAPGYPLQLQPCTAYVPVYPVGTPYAGGTPGGTGVTSTLPPPPQGPGLALLEPRRPPHDYMPIAVLTTICCFWPTGIIAIFKAVQVRTALARGDMVSAEIASREARNFSFISLAVGIAAMVLCTILTVVIIIAAQHHENYWDP

SEQ ID NO: 9838 - protein, 1743 aa, Homo sapiens
MATDSGDPASTEDSEKPDGISFENRVPQVAATLTVEARLKEKNSTFSASGETVERKRFFRKSVEMTEDDKVAESSPKDERIKAAMNIPRVDKLPSNVLRGGQEVKYEQCSKSTSEISKDCFKEKNEKEMEEEAEMKAVATSPSGRFLKFDIELGRGAFKTVYKGLDTETWVEVAWCELQDRKLTKAEQQRFKEEAEMLKGLQHPNIVRFYDSWESILKGKKCIVLVTELMTSGTLKTYLKRFKVMKPKVLRSWCRQILKGLQFLHTRTPPIIHRDLKCDNIFITGPTGSVKIGDLGLATLMRTSFAKSVIGTPEFMAPEMYEEHYDESVDVYAFGMCMLEMATSEYPYSECQNAAQIYRKVTSGIKPASFNKVTDPEVKEIIEGCIRQNKSERLSIRDLLNHAFFAEDTGLRVELAEEDDCSNSSLALRLWVEDPKKLKGKHKDNEAIEFSFNLETDTPEEVAYEMVKSGFFHESDSKAVAKSIRDRVTPIKKTREKKPAGCLEERRDSQCKSMGNVFPQPQNTTLPLAPAQQTGAECEETEVDQHVRQQLLQRKPQQHCSSVTGDNLSEAGAASVIHSDTSSQPSVAYSSNQTMGSQMVSNIPQAEVNVPGQIYSSQQLVGHYQQVSGLQKHSKLTQPQILPLVQGQSTVLPVHVLGPTVVSQPQVSPLTVQKVPQIKPVSQPVGAEQQAALLKPDLVRSLNQDVATTKENVSSPDNPSGNGKQDRIKQRRASCPRPEKGTKFQLTVLQVSTSGDNMVECQLETHNNKMVTFKFDVDGDAPEDIADYMVEDNFVLESEKEKFVEELRAIVGQAQEILHVHFATERATGVDSITVDSNSSQTGSSEQVQINSTSTQTSNESAPQSSPVGRWRFCINQTIRNRETQSPPSLQHSMSAVPGRHPLPSPKNTSNKEISRDTLLTIENNPCHRALFTSKSEHKDVVDGKISECASVETKQPAILYQVEDNRQIMAPVTNSSSYSTTSVRAVPAECEGLTKQASIFIPVYPCHQTASQADALMSHPGESTQTSGNSLTTLAFDQKPQTLSVQQPAMDAEFISQEGETTVNTEASSPKTVIPTQTPGLEPTTLQPTTVLESDGERPPKLEFADNRIKTLDEKLRNLLYQEHSISSIYPESQKDTQSIDSPFSSSAEDTLSCPVTEVIAISHCGIKDSPVQSPNFQQTGSKLLSNVAASQPANISVFKRDLNVITSVPSELCLHEMSSDASLPGDPEAYPAAVSSGGAIHLQTGVETEEMRSAIAPDPIPLTRESTADTRALNRCKAMSGSFQRGRFQVITIPQQQSAKMTSFGIEHISVFSETNHSSEEAFIKTAKSQLVEIEPATQNPKTSFSYEKLQALQETCKENKGVPKQGDNFLSFSAACETDVSSVTPEKEFEETSATGSSMQSGSELLLKEREILTAGKQPSSDSEFSASLAGSGKSVAKTGPESNQCLPHHEEQAYAQTQSSLFYSPSSPMSSDDESEIEDEDLKVELQRLREKHIQEVVNLQTQQNKELQELYERLRSIKDSKTQSTEIPLPPASPRRPRSFKSKLRSRPQSLTHVDNGIVATDPLCVESNAASCQQSPASKKGMFTDDLHKLVDDWTKEAVGNSLIKPSLNQLKQSQHKLETENWNKVSENTPSTMGYTSTWISSLSQIRGAVPTSLPQGLSLPSFPGPLSSYGMPHVCQYNAVAGAGYPVQWVGISGTTQQSVVIPAQSGGPFQPGMNMQAFPTSSVQNPATIPPGPK

SEQ ID NO: 9839 - protein, 1096 aa, Homo sapiens
MGVQGFQEFLEKRCPGAVVPVDLLKLARTVSRQQQQQHLHRQLPPTAALAPGAPRAARGSVPLQPPLPPAALGAYSGGAGPTRHHHPAHHFHHHGQAQPGLHPPLPPPPPPQLPGARVLVDAGSALPRLYGGYQTDWVCGGQWNAMLGYLSALCQACAYPGGDGLELVVMFPGGLGKDRLAEWGRRCQAERQTAQLIVGHVGNKGTPPPRAWFLPPACLSHCVRLALIRFRVKVFQSLEDHHLEVVAFFRENGFHGLLAHDSEYALYNIPSYYSSHALKLSWNGKNLTTNQFLMQEVAKQLGLKRMNFPIFAALLGNHILPDEDLAAFHWSLLGPEHPLASLKVRAHQLVLPPCDVVIKAVSEYVSSIKDPSNLDVVGKDVFKQSQSRTEDKIERFKKAVEYYSVTTKLSSLPVGPSFLGFRNNRLGNPPLPRNQVGTISAGKPMFSHQVPQKVKYPPPFPVGPNSSLLFSSHALGESHAFSEDPMLQNSPFANWAVSYDSSASQFPNYLPSKASPPLGPDSSHSSSSDGDEPNGASSDHITEAFHHQPEWGNPNRDRGSWAQPVDTGVSEASLGDGEPHIPSLLSMSTRNHMDITIPPLPPVAPEVLRVAEHRHRRGLMYPYIYHVLTKGEIKIPVCIEDECNMELPPAALLFRSARQYVYGVLFSLAETQRKMERLAMRRRLPVEVPSVILKEWSAYKGKSPQTPELVSALTFREWTCPNLKKLWLGKAVEDKNRRMRAFLACMKSDTPSMLNPANVPTHLLLMCCVLRYMVQWPGGRILHRHELDTFLAQAVSTQLYEPDRLQELKIEKLDARGIQLAALFMSGVDTALFANDACGQPVPWEHCCPWIYFDGKLFQSKLIKAGRERVSLVELCDGQADLATKVEKMRQSILEGVNMNHPPPSALLPSPTFVPPMVPSLYPVSLYSRAMGSMPLPPQGRSRGFAGLHPIPPQGGKLEIAGMVVGQWAGSRSSRGRGSFGMQVVSVGGPGKGHGKEQTGRGSKGHKKGNKQGSSDGVSKSLELHQGRSRSQVNGNSGALIKEEKSDHRLPAPSQCALSRDSNECNNGNRYLPMNNREKNHLQEQKLETVAQRKED

SEQ ID NO: 9840 - protein, 343 aa, Homo sapiens
MWPNGSSLGPCFRPTNITLEERRLIASPWFAASFCVVGLASNLLALSVLAGARQGGSHTRSSFLTFLCGLVLTDFLGLLVTGTIVVSQHAALFEWHAVDPGCRLCRFMGVVMIFFGLSPLLLGAAMASERYLGITRPFSRPAVASQRRAWATVGLVWAAALALGLLPLLGVGRYTVQYPGSWCFLTLGAESGDVAFGLLFSMLGGLSVGLSFLLNTVSVATLCHVYHGQEAAQQRPRDSEVEMMAQLLGIMVVASVCWLPLLVFIAQTVLRNPPAMSPAGQLSRTTEKELLIYLRVATWNQILDPWVYILFRRAVLRRLQPRLSTRPRSLSLQPQLTQRSGLQ

SEQ ID NO: 9841 - protein, 992 aa, Homo sapiens
MAAEWASRFWLWATLLIPAAAVYEDQVGKFDWRQQYVGKVKFASLEFSPGSKKLVVATEKNVIAALNSRTGEILWRHVDKGTAEGAVDAMLLHGQDVITVSNGGRIMRSWETNIGGLNWEITLDSGSFQALGLVGLQESVRYIAVLKKTTLALHHLSSGHLKWVEHLPESDSIHYQMVYSYGSGVVWALGVVPFSHVNIVKFNVEDGEIVQQVRVSTPWLQHLSGACGVVDEAVLVCPDPSSRSLQTLALETEWELRQIPLQSLDLEFGSGFQPRVLPTQPNPVDASRAQFFLHLSPSHYALLQYHYGTLSLLKNFPQTALVSFATTGEKTVAAVMACRNEVKSSSSEDGSMGSFSEKSSSKDSLACFNQTYTINLYLVETGRRLLDTTITFSLEQSGTRPERLYIQVFLKKDDSVGYRALVQTEDHLLLFLQQLAGKVVLWSREESLAEVVCLEMVDLPLTGAQAELEGEFGKKADGLLGMFLKRLSSQLILLQAWTSHLWKMFYDARKPRSQIKNEINIDTLARDEFNLQKMMVMVTASGKLFGIESSSGTILWKQYLPNVKPDSSFKLMVQRTTAHFPHPPQCTLLVKDKESGMSSLYVFNPIFGKWSQVAPPVLKRPILQSLLLPVMDQDYAKVLLLIDDEYKVTAFPATRNVLRQLHELAPSIFFYLVDAEQGRLCGYRLRKDLTTELSWELTIPPEVQRIVKVKGKRSSEHVHSQGRVMGDRSVLYKSLNPNLLAVVTESTDAHHERTFIGIFLIDGVTGRIIHSSVQKKAKGPVHIVHSENWVVYQYWNTKARRNEFTVLELYEGTEQYNATAFSSLDRPQLPQVLQQSYIFPSSISAMEATITERGITSRHLLIGLPSGAILSLPKALLDPRRPEIPTEQSREENLIPYSPDVQIHAERFINYNQTVSRMRGIYTAPSGLESTCLVVAYGLDIYQTRVYPSKQFDVLKDDYDYVLISSVLFGLVFATMITKRLAQVKLLNRAWR

SEQ ID NO: 9842 - protein, 854 aa, Homo sapiens
MAQAIFEALEGMDNQTVLAVQSLLDGQGAVPDPTGQSVNAPPAIQPLDDEDVFLCGKCKKQFNSLPAFMTHKREQCQGNAPALATVSLATNSIYPPSAAPTAVQQAPTPANRQISTYITVPPSPLIQTLVQGNILVSDDVLMSAMSAFTSLDQPMPQGPPPVQSSLNMHSVPSYLTQPPPPPPPPPPLPPPPPPQPPPPPPQSLGPPGRPNPGGNGVVEVYSAAAPLAGSGTVEIQALGMQPYPPLEVPNQCVEPPVYPTPTVYSPGKQGFKPKGPNPAAPMTSATGGTVATFDSPATLKTRRAKGARGLPEAAGKPKAQKLKCSYCDKSFTKNFDLQQHIRSHTGEKPFQCIACGRAFAQKSNVKKHMQTHKVWPPGHSGGTVSRNSVTVQVMALNPSRQEDEESTGLGQPLPGAPQPQALSTAGEEEGDKPESKQVVLIDSSYLCQFCPSKFSTYFQLKSHMTQHKNEQVYKCVVKSCAQTFPKLDTFLEHIKSHQEELSYRCHLCGKDFPSLYDLGVHQYSHSLLPQHSPKKDNAVYKCVKCVNKYSTPEALEHHLQTATHNFPCPHCQKVFPCERYLRRHLPTHGSGGRFKCQVCKKFFRREHYLKLHAHIHSGEKPYKCSVCESAFNRKDKLKRHMLIHEPFKKYKCPFSTHTGCSKEFNRPDKLKAHILSHSGMKLHKCALCSKSFSRRAHLAEHQRAHTGNYKFRCAGCAKGFSRHKYLKDHRCRLGPQKDKDLQTRRPPQRRAAPRSCGSGGRKVLTPLPDPLGLEELKDTGAGLVPEAVPGKPPFAEPDAVLSIVVGGAVGAETELVVPGHAEGLGSNLALAELQAGAEGPCAMLAVPVYIQASE

SEQ ID NO: 9843 - protein, 971 aa, Homo sapiens
MAAEWASRFWLWATLLIPAAAVYEDQVGKFDWRQQYVGKVKFASLEFSPGSKKLVVATEKNVIAALNSRTGEIYVITVSNGGRIMRSWETNIGGLNWEITLDSGSFQALGLVGLQESVRYIAVLKKTTLALHHLSSGHLKWVEHLPESDSIHYQMVYSYGSGVVWALGVVPFSHVNIVKFNVEDGEIVQQVRVSTPWLQHLSGACGVVDEAVLVCPDPSSRSLQTLALETEWELRQIPLQSLDLEFGSGFQPRVLPTQPNPVDASRAQFFLHLSPSHYALLQYHYGTLSLLKNFPQTALVSFATTGEKTVAAVMACRNEVQKSSSSEDGSMGSFSEKSSSKDSLACFNQTYTINLYLVETGRRLLDTTITFSLEQSGTRPERLYIQVFLKKDDSVGYRALVQTEDHLLLFLQQLAGKVVLWSREESLAEVVCLEMVDLPLTGAQAELEGEFGKKADGLLGMFLKRLSSQLILLQAWTSHLWKMFYDARKPRSQIKNEINIDTLARDEFNLQKMMVMVTASGKLFGIESSSGTILWKQYLPNVKPDSSFKLMVQRTTAHFPHPPQCTLLVKDKESGMSSLYVFNPIFGKWSQVAPPVLKRPILQSLLLPVMDQDYAKVLLLIDDEYKVTAFPATRNVLRQLHELAPSIFFYLVDAEQGRLCGYRLRKDLTTELSWELTIPPEVQRIVKVKGKRSSEHVHSQGRVMGDRSVLYKSLNPNLLAVVTESTDAHHERTFIGIFLIDGVTGRIIHSSVQKKAKGPVHIVHSENWVVYQYWNTKARRNEFTVLELYEGTEQYNATAFSSLDRPQLPQVLQQSYIFPSSISAMEATITERGITSRHLLIGLPSGAILSLPKALLDPRRPEIPTEQSREENLIPYSPDVQIHAERFINYNQTVSRMRGIYTAPSGLESTCLVVAYGLDIYQTRVYPSKQFDVLKDDYDYVLISSVLFGLVFATMITKRLAQVKLLNRAWR

SEQ ID NO: 9844 - protein, 800 aa, Homo sapiens
MSSLGASFVQIKFDDLQFFENCGGGSFGSVYRAKWISQDKEVAVKKLLKIEKEAEILSVLSHRNIIQFYGVILEPPNYGIVTEYASLGSLYDYINSNRSEEMDMDHIMTWATDVAKGMHYLHMEAPVKVIHRDLKSRNVVIAADGVLKICDFGASRFHNHTTHMSLVGTFPWMAPEVIQSLPVSETCDTYSYGVVLWEMLTREVPFKGLEGLQVAWLVVEKNERLTIPSSCPRSFAELLHQCWEADAKKRPSFKQIISILESMSNDTSLPDKCNSFLHNKAEWRCEIEATLERLKKLERDLSFKEQELKERERRLKMWEQKLTEQSNTPLLPSFEIGAWTEDDVYCWVQQLVRKGDSSAEMSVYASLFKENNITGKRLLLLEEEDLKDMGIVSKGHIIHFKSAIEKLTHDYINLFHFPPLIKDSGGEPEENEEKIVNLELVFGFHLKPGTGPQDCKWKMYMEMDGDEIAITYIKDVTFNTNLPDAEILKMTKPPFVMEKWIVGIAKSQTVECTVTYESDVRTPKSTKHVHSIQWSRTKPQDEVKAVQLAIQTLFTNSDGNPGSRSDSSADCQWLDTLRMRQIASNTSLQRSQSNPILGSPFFSHFDGQDSYAAAVRRPQVPIKYQQITPVNQSRSSSPTQYGLTKNFSSLHLNSRDSGFSSGNTDTSSERGRYSDRSRNKYGRGSISLNSSPRGRYSGKSQHSTPSRGRYPGKFYRVSQSALNPHQSPDFKRSPRDLHQPNTIPGMPLHPETDSRASEEDSKVSEGGWTKVEYRKKPHRPSPAKTNKERARGDHRGWRNF

SEQ ID NO: 9845 - protein, 461 aa, Homo sapiens
MSREGAGAALVAEVIKDRLCFAILYSRPKSASNVHYFSIDNELEYENFYADFGPLNLAMVYRYCCKINKKLKSITMLRKKIVHFTGSDQRKQANAAFLVGCYMVIYLGRTPEEAYRILIFGETSYIPFRDAAYGSCNFYITLLDCFHAVKKAMQYGFLNFNSFNLDEYEHYEKAENGDLNWIIPDRFIAFCGPHSRARLESGYHQHSPETYIQYFKNHNVTTIIRLNKRMYDAKRFTDAGFDHHDLFFADGSTPTDAIVKEFLDICENAEGAIAVHCKAGLGRTGTLIACYIMKHYRMTAAETIAWVRICRPGSVIGPQQQFLVMKQTNLWLEGDYFRQKLKGQENGQHRAAFSKLLSGVDDISINGVENQDQQEPEPYSDDDEINGVTQGDRLRALKSRRQSKTNAIPLTVILQSSVQSCKTSEPNISGSAGITKRTTRSASRKSSVKSLSISRTKTVLR

SEQ ID NO: 9846 - protein, 4244 aa, Homo sapiens
MMPAQYALTSSLVLLVLLSTARAGPFSSRSNVTLPAPRPPPQPGGHTVGAGVGSPSSQLYEHTVEGGEKQVVFTHRINLPPSTGCGCPPGTEPPVLASEVQALRVRLEILEELVKGLKEQCTGGCCPASAQAGTGQTDVRTLCSLHGVFDLSRCTCSCEPGWGGPTCSDPTDAEIPPSSPPSASGSCPDDCNDQGRCVRGRCVCFPGYTGPSCGWPSCPGDCQGRGRCVQGVCVCRAGFSGPDCSQRSCPRGCSQRGRCEGGRCVCDPGYTGDDCGMRSCPRGCSQRGRCENGRCVCNPGYTGEDCGVRSCPRGCSQRGRCKDGRCVCDPGYTGEDCGTRSCPWDCGEGGRCVDGRCVCWPGYTGEDCSTRTCPRDCRGRGRCEDGECICDTGYSGDDCGVRSCPGDCNQRGRCEDGRCVCWPGYTGTDCGSRACPRDCRGRGRCENGVCVCNAGYSGEDCGVRSCPGDCRGRGRCESGRCMCWPGYTGRDCGTRACPGDCRGRGRCVDGRCVCNPGFTGEDCGSRRCPGDCRGHGLCEDGVCVCDAGYSGEDCSTRSCPGGCRGRGQCLDGRCVCEDGYSGEDCGVRQCPNDCSQHGVCQDGVCICWEGYVSEDCSIRTCPSNCHGRGRCEEGRCLCDPGYTGPTCATRMCPADCRGRGRCVQGVCLCHVGYGGEDCGQEEPPASACPGGCGPRELCRAGQCVCVEGFRGPDCAIQTCPGDCRGRGECHDGSCVCKDGYAGEDCGEEVPTIEGMRMHLLEETTVRTEWTPAPGPVDAYEIQFIPTTEGASPPFTARVPSSASAYDQRGLAPGQEYQVTVRALRGTSWGLPASKTITTMIDGPQDLRVVAVTPTTLELGWLRPQAEVDRFVVSYVSAGNQRVRLEVPPEADGTLLTDLMPGVEYVVTVTAERGRAVSYPASVRANTGSSPLGLLGTTDEPPPSGPSTTQGAQAPLLQQRPQELGELRVLGRDETGRLRVVWTAQPDTFAYFQLRMRVPEGPGAHEEVLPGDVRQALVPPPPPGTPYELSLHGVPPGGKPSDPIIYQGIMDKDEEKPGKSSGPPRLGELTVTDRTSDSLLLRWTVPEGEFDSFVIQYKDRDGQPQVVPVEGPQRSAVITSLDPGRKYKFVLYGFVGKKRHGPLVAEAKILPQSDPSPGTPPHLGNLWVTDPTPDSLHLSWTVPEGQFDTFMVQYRDRDGRPQVVPVEGPERSFVVSSLDPDHKYRFTLFGIANKKRYGPLTADGTTAPERKEEPPRPEFLEQPLLGELTVTGVTPDSLRLSWTVAQGPFDSFMVQYKDAQGQPQAVPVAGDENEVTVPGLDPDRKYKMNLYGLRGRQRVGPESVVAKTAPQEDVDETPSPTELGTEAPESPEEPLLGELTVTGSSPDSLSLFWTVPQGSFDSFTVQYKDRDGRPRAVRVGGKESEVTVGGLEPGHKYKMHLYGLHEGQRVGPVSAVGVTAPQQEETPPATESPLEPRLGELTVTDVTPNSVGLSWTVPEGQFDSFIVQYKDKDGQPQVVPVAADQREVTVYNLEPERKYKMNMYGLHDGQRMGPLSVVIVTAPLPPAPATEASKPPLEPRLGELTVTDITPDSVGLSWTVPEGEFDSFVVQYKDRDGQPQVVPVAADQREVTIPDLEPSRKYKFLLFGIQDGKRRSPVSVEAKTVARGDASPGAPPRLGELWVTDPTPDSLRLSWTVPEGQFDSFVVQFKDKDGPQVVPVEGHERSVTVTPLDAGRKYRFLLYGLLGKKRHGPLTADGTTEARSAMDDTGTKRPPKPRLGEELQVTTVTQNSVGLSWTVPEGQFDSFVVQYKDRDGQPQVVPVEGSLREVSVPGLDPAHRYKLLLYGLHHGKRVGPISAVAITAGREETETETTAPTPPAPEPHLGELTVEEATSHTLHLSWMVTEGEFDSFEIQYTDRDGQLQMVRIGGDRNDITLSGLESDHRYLVTLYGFSDGKHVGPVHVEALTVPEEEKPSEPPTATPEPPIKPRLGELTVTDATPDSLSLSWTVPEGQFDHFLVQYRNGDGQPKAVRVPGHEEGVTISGLEPDHKYKMNLYGFHGGQRMGPVSVVGVTAAEEETPSPTEPSMEAPEPAEEPLLGELTVTGSSPDSLSLSWTVPQGRFDSFTVQYKDRDGRPQVVRVGGEESEVTVGGLEPGRKYKMHLYGLHEGRRVGPVSAVGVTAPEEESPDAPLAKLRLGQMTVRDITSDSLSLSWTVPEGQFDHFLVQFKNGDGQPKAVRVPGHEDGVTISGLEPDHKYKMNLYGFHGGQRVGPVSAVGLTAPGKDEEMAPASTEPPTPEPPIKPRLEELTVTDATPDSLSLSWTVPEGQFDHFLVQYKNGDGQPKATRVPGHEDRVTISGLEPDNKYKMNLYGFHGGQRVGPVSAIGVTAAEEETPSPTEPSMEAPEPPEEPLLGELTVTGSSPDSLSLSWTVPQGRFDSFTVQYKDRDGRPQVVRVGGEESEVTVGGLEPGRKYKMHLYGLHEGRRVGPVSTVGVTAPQEDVDETPSPTEPGTEAPGPPEEPLLGELTVTGSSPDSLSLSWTVPQGRFDSFTVQYKDRDGRPQAVRVGGQESKVTVRGLEPGRKYKMHLYGLHEGRRLGPVSAVGVTEDEAETTQAVPTMTPEPPIKPRLGELTMTDATPDSLSLSWTVPEGQFDHFLVQYRNGDGQPKAVRVPGHEDGVTISGLEPDHKYKMNLYGFHGGQRVGPISVIGVTAAEEETPSPTELSTEAPEPPEEPLLGELTVTGSSPDSLSLSWTIPQGHFDSFTVQYKDRDGRPQVMRVRGEESEVTVGGLEPGRKYKMHLYGLHEGRRVGPVSTVGVTAPEDEAETTQAVPTTTPEPPNKPRLGELTVTDATPDSLSLSWMVPEGQFDHFLVQYRNGDGQPKVVRVPGHEDGVTISGLEPDHKYKMNLYGFHGGQRVGPISVIGVTAAEEETPAPTEPSTEAPEPPEEPLLGELTVTGSSPDSLSLSWTIPQGRFDSFTVQYKDRDGRPQVVRVRGEESEVTVGGLEPGCKYKMHLYGLHEGQRVGPVSAVGVTAPKDEAETTQAVPTMTPEPPIKPRLGELTVTDATPDSLSLSWMVPEGQFDHFLVQYRNGDGQPKAVRVPGHEDGVTISGLEPDHKYKMNLYGFHGGQRVGPVSAIGVTEEETPSPTEPSTEAPEAPEEPLLGELTVTGSSPDSLSLSWTVPQGRFDSFTVQYKDRDGQPQVVRVRGEESEVTVGGLEPGRKYKMHLYGLHEGQRVGPVSTVGITAPLPTPLPVEPRLGELAVAAVTSDSVGLSWTVAQGPFDSFLVQYRDAQGQPQAVPVSGDLRAVAVSGLDPARKYKFLLFGLQNGKRHGPVPVEARTAPDTKPSPRLGELTVTDATPDSVGLSWTVPEGEFDSFVVQYKDKDGRLQVVPVAANQREVTVQGLEPSRKYRFLLYGLSGRKRLGPISADSTTAPLEKELPPHLGELTVAEETSSSLRLSWTVAQGPFDSFVVQYRDTDGQPRAVPVAADQRTVTVEDLEPGKKYKFLLYGLLGGKRLGPVSALGMTAPEEDTPAPELAPEAPEPPEEPRLGVLTVTDTTPDSMRLSWSVAQGPFDSFVVQYEDTNGQPQALLVDGDQSKILISGLEPSTPYRFLLYGLHEGKRLGPLSAEGTTGLAPAGQTSEESRPRLSQLSVTDVTTSSLRLNWEAPPGAFDSFLLRFGVPSPSTLEPHPRPLLQRELMVPGTRHSAVLRDLRSGTLYSLTLYGLRGPHKADSIQGTARTLSPVLESPRDLQFSEIRETSAKVNWMPPPSRADSFKVSYQLADGGEPQSVQVDGQARTQKLQGLIPGARYEVTVVSVRGFEESEPLTGFLTTVPDGPTQLRALNLTEGFAVLHWKPPQNPVDTYDVQVTAPGAPPLQAETPGSAVDYPLHDLVLHTNYTATVRGLRGPNLTSPASITFTTGLEAPRDLEAKEVTPRTALLTWTEPPVRPAGYLLSFHTPGGQNQEILLPGGITSHQLLGLFPSTSYNARLQAMWGQSLLPPVSTSFTTGGLRIPFPRDCGEEMQNGAGASRTSTIFLNGNRERPLNVFCDMETDGGGWLVFQRRMDGQTDFWRDWEDYAHGFGNISGEFWLGNEALHSLTQAGDYSMRVDLRAGDEAVFAQYDSFHVDSAAEYYRLHLEGYHGTAGDSMSYHSGSVFSARDRDPNSLLISCAVSYRGAWWYRNCHYANLNGLYGSTVDHQGVSWYHWKGFEFSVPFTEMKLRPRNFRSPAGGG

SEQ ID NO: 9847 - protein, 799 aa, Homo sapiens
MKMADRSGKIIPGQVYIEVEYDYEYEAKDRKIVIKQGERYILVKKTNDDWWQVKPDENSKAFYVPAQYVKEVTRKALMPPVKQVAGLPNNSTKIMQSLHLQRSTENVNKLPELSSFGKPSSSVQGTGLIRDANQNFGPSYNQGQTVNLSLDLTHNNGKFNNDSHSPKVSSQNRTRSFGHFPGPEFLDVEKTSFSQEQSCDSAGEGSERIHQDSESGDELSSSSTEQIRATTPPNQGRPDSPVYANLQELKISQSALPPLPGSPAIQINGEWETHKDSSGRCYYYNRGTQERTWKPPRWTRDASISKGDFQNPGDQEWLKHVDDQGRQYYYSADGSRSEWELPKYNASSQQQREIIKSRSLDRRLQEPIVLTKWRHSTIVLDTNDKESPTASKPCFPENESSPSSPKHQDTASSPKDQEKYGLLNVTKIAENGKKVRKNWLSSWAVLQGSSLLFTKTQGSSTSWFGSNQSKPEFTVDLKGATIEMASKDKSSKKNVFELKTRQGTELLIQSDNDTVINDWFKVLSSTINNQAVETDEGIEEEIPDSPGIEKHDKEKEQKDPKKLRSFKVSSIDSSEQKKTKKNLKKFLTRRPTLQAVREKGYIKDQVFGSNLANLCQRENGTVPKFVKLCIEHVEEHGLDIDGIYRVSGNLAVIQKLRFAVNHDEKLDLNDSKWEDIHVITGALKMFFRELPEPLFTFNHFNDFVNAIKQEPRQRVAAVKDLIRQLPKPNQDTMQILFRHLRRVIENGEKNRMTYQSIAIVFGPTLLKPEKETGNIAVHTVYQNQIVELILLELSSIFGR

SEQ ID NO: 9848 - protein, 1366 aa, Homo sapiens
MLFKQAELWMPHQGKGNKGEPPSALGLSTRKALSVLKEQLEAVLEGHLRERKKCLTWKEVWRSSFLHHSNRCSCFHWPGASLMLLAVLLLLGCCGGQPAGSRGVGLVNASALFLLLLLNLVLIGRQDRLKRREVERRLRGIIDQIQDALRDGREIQWPSAMYPDLHMPFAPSWSLHWAYRDGHLVNLPVSLLVEGDIIALRPGQESFASLRGIKDDEHIVLEPGDLFPPFSPPPSPRGEVERGPQSPQQHRLFRVLETPVIDNIRWCLDMALSRPVTALDNERFTVQSVMLHYAVPVVLAGFLITNALRFIFSAPGVTSWQYTLLQLQVNGVLPILPLLFPVLWVLATACGEARVLAQMSKASPSSLLAKFSEDTLSSYTEAVSSQEMLRCIWGHFLRVLGGTSPTLSHSSSLLHSLGSVTVLCCVDKQGILSWPNPSPETVLFFSGKVEPPHSSHEDLTDGLSTRSFCHPEPHERDALLAGSLNNTLHLSNEQERGDWPGEAPKPPEPYSHHKAHGRSKHPSGSNVSFSRDTEGGEEEPSKTQPGMESDPYEAEDFVCDYHLEMLSLSQDQQNPSCIQFDDSNWQLHLTSLKPLGLNVLLNLCDASVTERLCRFSDHLCNIALQESHSAVLPVHVPWGLCELARLIGFTPGAKELFKQENHLALYRLPSAETMKETSLGRLSCVTKRRPPLSHMISLFIKDTTTSTEQMLSHGTADVVLEACTDFWDGADIYPLSGSDRKKVLDFYQRACLSGYCSAFAYKPMNCALSSQLNGKCIELVQVPGQSSIFTMCELPSTIPIKQNARRSSWSSDEGIGEVLEKEDCMQALSGQIFMGMVSSQYQARLDIVRLIDGLVNACIRFVYFSLEDELKSKVFAEKMGLETGWNCHISLTPNGDMPGSEIPPSSPSHAGSLHDDLNQVSRDDAEGLLLMEEEGHSDLISFQPTDSDIPSFLEDSNRAKLPRGIHQVRPHLQNIDNVPLLVPLFTDCTPETMCEMIKIMQEYGEVTCCLGSSANLRNSCLFLQSDISIALDPLYPSRCSWETFGYATSISMAQASDGLSPLQLSGQLNSLPCSLTFRQEETISIIRLIEQARHATYGIRKCFLFLLQCQLTLVVIQFLSCLVQLPPLLSTTDILWLSCFCYPLLSISLLGKPPHSSIMSMATGKNLQSIPKKTQHYFLLCFLLKFSLTISSCLICFGFTLQSFCDSSRDRNLTNCSSVMLPSNDDRAPAWFEDFANGLLSAQKLTAALIVLHTVFISITHVHRTKPLWRKSPLTNLWWAVTVPVVLLGQVVQTAVDLQLWTHRDSHVHFGLEDVPLLTWLLGCLSLVLVVVTNEIVKLHEIRVRVRYQKRQKLQFETKLGMNSPF

SEQ ID NO: 9849 - protein, 816 aa, Homo sapiens
MKMADRSGKIIPGQVYIEVEYDYEYEAKDRKIVIKQGERYILVKKTNDDWWQVKPDENSKAFYVPAQYVKEVTRKALMPPVKQVAGLPNNSTKIMQSLHLQRSTENVNKLPELSSFGKPSSSVQGTGLIRDANQNFGPSYNQGQTVNLSLDLTHNNGKFNNDSHSPKVSSQNRTRSFGHFPGPEFLDVEKTSFSQEQSCDSAGEGSERIHQDSESGDELSSSSTEQIRATTPPNQGRPDSPVYANLQELKISQSALPPLPGSPAIQINGEWETHKDSSGRCYYYNRGTQERTWKPPRWTRDASISKGDFQNPGDQELLSSEENYYSTSYSQSDSQCGSPPRGWSEELDERGHTLYTSDYTNEKWLKHVDDQGRQYYYSADGSRSEWELPKYNASSQQQREIIKSRSLDRRLQEPIVLTKWRHSTIVLDTNDKDQEKYGLLNVTKIAENGKKVRKNWLSSWAVLQGSSLLFTKTQGSSTSWFGSNQSKPEFTVDLKGATIEMASKDKSSKKNVFELKTRQGTELLIQSDNDTVINDWFKVLSSTINNQAVETDEGIEEEIPDSPGIEKHDKEKEQKDPKKLRSFKVSSIDSSEQKKTKKNLKKFLTRRPTLQAVREKGYIKDQVFGSNLANLCQRENGTVPKFVKLCIEHVEEHGLDIDGIYRVSGNLAVIQKLRFAVNHDEKLDLNDSKWEDIHVITGALKMFFRELPEPLFTFNHFNDFVNAIKQEPRQRVAAVKDLIRQLPKPNQDTMQILFRHLRRVIENGEKNRMTYQSIAIVFGPTLLKPEKETGNIAVHTVYQNQIVELILLELSSIFGR

SEQ ID NO: 9850 - protein, 5183 aa, Homo sapiens
MATSGGEEAAAAAPAPGTPATGADTTPGWEVAVRPLLSASYSAFEMKELPQLVASVIESESEILHHEKQYEPFYSSFVALSTHYITTVCSLIPRNQLQSVAAACKVLIEFSLLRLENPDEACAVSQKHLILLIKGLCTGCSRLDRTEIITFTAMMKSAKLPQTVKTLSDVEDQKELASPVSPELRQKEVQMNFLNQLTSVFNPRTVASQPISTQTLVEGENDEQSSTDQASAIKTKNVFIAQNVASLQELGGSEKLLRVCLNLPYFLRYINRFQDAVLANSFFIMPATVADATAVRNGFHSLVIDVTMALDTLSLPVLEPLNPSRLQDVTVLSLSCLYAGVSVATCMAILHVGSAQQVRTGSTSSKEDDYESDAATIVQKCLEIYDMIGQAISSSRRAGGEHYQNFQLLGAWCLLNSLFLILNLSPTALADKGKEKDPLAALRVRDILSRTKEGVGSPKLGPGKGHQGFGVLSVILANHAIKLLTSLFQDLQVEALHKGWETDGPPAALSIMAQSTSIQRIQRLIDSVPLMNLLLTLLSTSYRKACVLQRQRKGSMSSDASASTDSNTYYEDDFSSTEEDSSQDDDSEPILGQWFEETISPSKEKAAPPPPPPPPPLESSPRVKSPSKQAPGEKGNILASRKDPELFLGLASNILNFITSSMLNSRNNFIRNYLSVSLSEHHMATLASIIKEVDKDGLKGSSDEEFAAALYHFNHSLVTSDLQSPNLQNTLLQQLGVAPFSEGPWPLYIHPQSLSVLSRLLLIWQHKASAQGDPDVPECLKVWDRFLSTMKQNALQGVVPSETEDLNVEHLQMLLLIFHNFTETGRRAILSLFVQIIQELSVNMDAQMRFVPLILARLLLIFDYLLHQYSKAPVYLFEQVQHNLLSPPFGWASGSQDSNSRRATTPLYHGFKEVEENWSKHFSSDAVPHPRFYCVLSPEASEDDLNRLDSVACDVLFSKLVKYDELYAALTALLAAGSQLDTVRRKENKNVTALEACALQYYFLILWRILGILPPSKTYINQLSMNSPEMSECDILHTLRWSSRLRISSYVNWIKDHLIKQGMKAEHASSLLELASTTKCSSVKYDVEIVEEYFARQISSFCSIDCTTILQLHEIPSLQSIYTLDAAISKVQVSLDEHFSKMAAETDPHKSSEITKNLLPATLQLIDTYASFTRAYLLQNFNEEGTTEKPSKEKLQGFAAVLAIGSSRCKANTLGPTLVQNLPSSVQTVCESWNNINTNEFPNIGSWRNAFANDTIPSESYISAVQAAHLGTLCSQSLPLAASLKHTLLSLVRLTGDLIVWSDEMNPPQVIRTLLPLLLESSTESVAEISSNSLERILGPAESDEFLARVYEKLITGCYNILANHADPNSGLDESILEECLQYLEKQLESSQARKAMEEFFSDSGELVQIMMATANENLSAKFCNRVLKFFTKLFQLTEKSPNPSLLHLCGSLAQLACVEPVRLQAWLTRMTTSPPKDSDQLDVIQENRQLLQLLTTYIVRENSQVGEGVCAVLLGTLTPMATEMLANGDGTGFPELMVVMATLASAGQGAGHLQLHNAAVDWLSRCKKYLSQKNVVEKLNANVMHGKHVMILECTCHIMSYLADVTNALSQSNGQGPSHLSVDGEERAIEVDSDWVEELAVEEEDSQAEDSDEDSLCNKLCTFTITQKEFMNQHWYHCHTCKMVDGVGVCTVCAKVCHKDHEISYAKYGSFFCDCGAKEDGSCLALVKRTPSSGMSSTMKESAFQSEPRISESLVRHASTSSPADKAKVTISDGKVADEEKPKKSSLCRTVEGCREELQNQANFSFAPLVLDMLNFLMDAIQTNFQQASAVGSSSRAQQALSELHTVEKAVEMTDQLMVPTLGSQEGAFENVRMNYSGDQGQTIRQLISAHVLRRVAMCVLSSPHGRRQHLAVSHEKGKITVLQLSALLKQADSSKRKLTLTRLASAPVPFTVLSLTGNPCKEDYLAVCGLKDCHVLTFSSSGSVSDHLVLHPQLATGNFIIKAVWLPGSQTELAIVTADFVKIYDLCVDALSPTFYFLLPSSKIRDVTFLFNEEGKNIIVIMSSAGYIYTQLMEEASSAQQGPFYVTNVLEINHEDLKDSNSQVAGGGVSVYYSHVLQMLFFSYCQGKSFAATISRTTLEVLQLFPINIKSSNGGSKTSPALCQWSEVMNHPGLVCCVQQTTGVPLVVMVKPDTFLIQEIKTLPAKAKIQDMVAIRHTACNEQQRTTMILLCEDGSLRIYMANVENTSYWLQPSLQPSSVISIMKPVRKRKTATITTRTSSQVTFPIDFFEHNQQLTDVEFGGNDLLQVYNAQQIKHRLNSTGMYVANTKPGGFTIEISNNNSTMVMTGMRIQIGTQAIERAPSYIEIFGRTMQLNLSRSRWFDFPFTREEALQADKKLNLFIGASVDPAGVTMIDAVKIYGKTKEQFGWPDEPPEEFPSASVSNICPSNLNQSNGTGDSDSAAPTTTSGTVLERLVVSSLEALESCFAVGPIIEKERNKNAAQELATLLLSLPAPASVQQQSKSLLASLHTSRSAYHSHKDQALLSKAVQCLNTSSKEGKDLDPEVFQRLVITARSIAIMRPNNLVHFTESKLPQMETEGMDEGKEPQKQLEGDCCSFITQLVNHFWKLHASKPKNAFLAPACLPGLTHIEATVNALVDIIHGYCTCELDCINTASKIYMQMLLCPDPAVSFSCKQALIRVLRPRNKRRHVTLPSSPRSNTPMGDKDDDDDDDADEKMQSSGIPNGGHIRQESQEQSEVDHGDFEMVSESMVLETAENVNNGNPSPLEALLAGAEGFPPMLDIPPDADDETMVELAIALSLQQDQQGSSSSALGLQSLGLSGQAPSSSSLDAGTLSDTTASAPASDDEGSTAATDGSTLRTSPADHGGSVGSESGGSAVDSVAGEHSVSGRSSAYGDATAEGHPAGPGSVSSSTGAISTTTGHQEGDGSEGEGEGETEGDVHTSNRLHMVRLMLLERLLQTLPQLRNVGGVRAIPYMQVILMLTTDLDGEDEKDKGALDNLLSQLIAELGMDKKDVSKKNERSALNEVHLVVMRLLSVFMSRTKSGSKSSICESSSLISSATAAALLSSGAVDYCLHVLKSLLEYWKSQQNDEEPVATSQLLKPHTTSSPPDMSPFFLRQYVKGHAADVFEAYTQLLTEMVLRLPYQIKKITDTNSRIPPPVFDHSWFYFLSEYLMIQQTPFVRRQVRKLLLFICGSKEKYRQLRDLHTLDSHVRGIKKLLEEQGIFLRASVVTASSGSALQYDTLISLMEHLKACAEIAAQRTINWQKFCIKDDSVLYFLLQVSFLVDEGVSPVLLQLLSCALCGSKVLAALAASSGSSSASSSSAPVAASSGQATTQSKSSTKKSKKEEKEKEKDGETSGSQEDQLCTALVNQLNKFADKETLIQFLRCFLLESNSSSVRWQAHCLTLHIYRNSSKSQQELLLDLMWSIWPELPAYGRKAAQFVDLLGYFSLKTPQTEKKLKEYSQKAVEILRTQNHILTNHPNSNIYNTLSGLVEFDGYYLESDPCLVCNNPEVPFCYIKLSSIKVDTRYTTTQQVVKLIGSHTISKVTVKIGDLKRTKMVRTINLYYNNRTVQAIVELKNKPARWHKAKKVQLTPGQTEVKIDLPLPIVASNLMIEFADFYENYQASTETLQCPRCSASVPANPGVCGNCGENVYQCHKCRSINYDEKDPFLCNACGFCKYARFDFMLYAKPCCAVDPIENEEDRKKAVSNINTLLDKADRVYHQLMGHRPQLENLLCKVNEAAPEKPQDDSGTAGGISSTSASVNRYILQLAQEYCGDCKNSFDELSKIIQKVFASRKELLEYDLQQREAATKSSRTSVQPTFTASQYRALSVLGCGHTSSTKCYGCASAVTEHCITLLRALATNPALRHILVSQGLIRELFDYNLRRGAAAMREEVRQLMCLLTRDNPEATQQMNDLIIGKVSTALKGHWANPDLASSLQYEMLLLTDSISKEDSCWELRLRCALSLFLMAVNIKTPVVVENITLMCLRILQKLIKPPAPTSKKNKDVPVEALTTVKPYCNEIHAQAQLWLKRDPKASYDAWKKCLPIRGIDGNGKAPSKSELRHLYLTEKYVWRWKQFLSRRGKRTSPLDLKLGHNNWLRQVLFTPATQAARQAACTIVEALATIPSRKQQVLDLLTSYLDELSIAGECAAEYLALYQKLITSAHWKVYLAARGVLPYVGNLITKEIARLLALEEATLSTDLQQGYALKSLTGLLSSFVEVESIKRHFKSRLVGTVLNGYLCLRKLVVQRTKLIDETQDMLLEMLEDMTTGTESETKAFMAVCIETAKRYNLDDYRTPVFIFERLCSIIYPEENEVTEFFVTLEKDPQQEDFLQGRMPGNPYSSNEPGIGPLMRDIKNKICQDCDLVALLEDDSGMELLVNNKIISLDLPVAEVYKKVWCTTNEGEPMRIVYRMRGLLGDATEEFIESLDSTTDEEEDEEEVYKMAGVMAQCGGLECMLNRLAGIRDFKQGRHLLTVLLKLFSYCVKVKVNRQQLVKLEMNTLNVMLGTLNLALVAEQESKDSGGAAVAEQVLSIMEIILDESNAEPLSEDKGNLLLTGDKDQLVMLLDQINSTFVRSNPSVLQGLLRIIPYLSFGEVEKMQILVERFKPYCNFDKYDEDHSGDDKVFLDCFCKIAAGIKNNSNGHQLKDLILQKGITQNALDYMKKHIPSAKNLDADIWKKFLSRPALPFILRLLRGLAIQHPGTQVLIGTDSIPNLHKLEQVSSDEGIGTLAENLLEALREHPDVNKKIDAARRETRAEKKRMAMAMRQKALGTLGMTTNEKGQVVTKTALLKQMEELIEEPGLTCCICREGYKFQPTKVLGIYTFTKRVALEEMENKPRKQQGYSTVSHFNIVHYDCHLAAVRLARGREEWESAALQNANTKCNGLLPVWGPHVPESAFATCLARHNTYLQECTGQREPTYQLNIHDIKLLFLRFAMEQSFSADTGGGGRESNIHLIPYIIHTVLYVLNTTRATSREEKNLQGFLEQPKEKWVESAFEVDGPYYFTVLALHILPPEQWRATRVEILRRLLVTSQARAVAPGGATRLTDKAVKDYSAYRSSLLFWALVDLIYNMFKKVPTSNTEGGWSCSLAEYIRHNDMPIYEAADKALKTFQEEFMPVETFSEFLDVAGLLSEITDPESFLKDLLNSVP

SEQ ID NO: 9851 - protein, 520 aa, Homo sapiens
MGPTRKPNVCSRLSRRALGCFSRDAGVVQRTNLGILRALVCQESTKFKNVWTTHSRSPIAYERGRIYFDNYRRCVSSVASEPRKLYEMPKCSKSEKIEDALLWECPVGDILPNSSDYKSSLIALTAHNWLLRISATTGKILEKIYLAPYCKFRYLSWDTPQEVIAVKSAQNRGSAVARQAGIQQHVLLYLAVFRVLPFSLVGILEINKKIFGNVTDATLSHGILIVMYSSGLVRLYSFQTIAEQFMQQKLDLGCACRWGGTTGTVGEAPFGIPCNIKITDMPPLLFEVSSLENAFQIGGHPWHYIVTPNKKKQKGVFHICALKDNSLAKNGIQEMDCCSLESDWIYFHPDASGRIIHVGPNQVKVLKLTEIENNSSQHQISEDFVILANRENHKNENVLTVTASGRVVKKSFNLLDDDPEQETFKIVDYEDELDLLSVVAVTQIDAEGKAHLDFHCNEYGTLLKSIPLVESWDVTYSHEVYFDRDLVLHIEQKPNRVFSCYVYQMICDTGEEEETINRSC

SEQ ID NO: 9852 - protein, 350 aa, Homo sapiens
MIRGFEAPMAENPPPPPPPVIFCHDSPKRVLVSVIRTTPIKPTCGGGGEPEPPPPLIPTSPGFSDFMVYPWRWGENAHNVTLSPGAAGAAASAALPAAAAAEHSGLRGRGAPPPAASASAAASGGEDEEEASSPDSGHLKDGIRRGRPRADTVRDLINEGEHSSSRIRCNICNRVFPREKSLQAHKRTHTGERPYLCDYPDCGKAFVQSGQLKTHQRLHTGEKPFVCSENGCLSRFTHANRHCPKHPYARLKREEPTDTLSKHQAADNKAAAEWLARYWEMREQRTPTLKGKLVQKADQEQQDPLEYLQSDEEDDEKRGAQRRLQEQRERLHGALALIELANLTGAPLRQ

SEQ ID NO: 9853 - protein, 249 aa, Homo sapiens
MTAGGQAEAEGAGGEPGAARLPSRVARLLSALFYGTCSFLIVLVNKALLTTYGFPSPIFLGIGQMAATIMILYVSKLNKIIHFPDFDKKIPVKLFPLPLLYVGNHISGLSSTSKLSLPMFTVLRKFTIPLTLLLETIILGKQYSLNIILSVFAIILGAFIAAGFLLMYSTVLCSYYNSALTTAVVGAIKNVSVAYIGILIGGDYIFSLLNFVGLNICMAGGLRYSFLTLSSQLKPKPVGEENICLDLKS

SEQ ID NO: 9854 - protein, 352 aa, Homo sapiens
KAEVGHGYMDRPCLNPADPDCPATAPNKNSTKPLDMALVLNGGCHGLSRKYMHWQEELIVGGTVKNSTGKLVSAHALQTMFQLMTPKQMYEHFKGYEYVSHINWNEDKAAAILEAWQRTYVEVVHQSVAQNSTQKVLSFTTTTLDDILKSFSDVSVIRVASGYLLMVLPFLALGVGVDDVFLLAHAFSETGQNKRIPFEDRTGECLKRTGASVALTSISNVTAFFMAALIPIPALRAFSLQAAVVVVFNFAMVLLIFPAILSMDLYRREDRRLDIFCCFTSPCVSRVIQVEPQAYTDTHDNTRYSPPPPYSSHSFAHETQITMQSTVQLRTEYDPHTHVYYTTAEPRSEISV

SEQ ID NO: 9855 - protein, 1446 aa, Homo sapiens
MELLNRNRLVIVSPRCTPPKASGGPARRGFYTFRSFCKDGGGGEEEEENGGEEKDDRGDKETRSDKGKATGRKAPLWLRAKFQRLLFKLGCYIQKNCGKFLVVGLLIFGAFAVGLKAANLETNVEELWVEVGGRVSRELNYTRQKIGEEAMFNPQLMIQTPKEEGANVLTTEALLQHLDSALQASRVHVYMYNRQWKLEHLCYKSGELITETGYMDQIIEYLYPCLIITPLDCFWEGAKLQSGTAYLLGKPPLRWTNFDPLEFLEELKKINYQVDSWEEMLNKAEVGHGYMDRPCLNPADPDCPATAPNKNSTKPLDMALVLNGGCHGLSRKYMHWQEELIVGGTVKNSTGKLVSAHALQTMFQLMTPKQMYEHFKGYEYVSHINWNEDKAAAILEAWQRTYVEVVHQSVAQNSTQKVLSFTTTTLDDILKSFSDVSVIRVASGYLLMLAYACLTMLRWDCSKSQGAVGLAGVLLVALSVAAGLGLCSLIGISFNAATTQVLPFLALGVGVDDVFLLAHAFSETGQNKRIPFEDRTGECLKRTGASVALTSISNVTAFFMAALIPIPALRAFSLQAAVVVVFNFAMVLLIFPAILSMDLYRREDRRLDIFCCFTSPCVSRVIQVEPQAYTDTHDNTRYSPPPPYSSHSFAHETQITMQSTVQLRTEYDPHTHVYYTTAEPRSEISVQPVTVTQDTLSCQSPESTSSTRDLLSQFSDSSLHCLEPPCTKWTLSSFAEKHYAPFLLKPKAKVVVIFLFLGLLGVSLYGTTRVRDGLDLTDIVPRETREYDFIAAQFKYFSFYNMYIVTQKADYPNIQHLLYDLHRSFSNVKYVMLEENKQLPKMWLHYFRDWLQGLQDAFDSDWETGKIMPNNYKNGSDDGVLAYKLLVQTGSRDKPIDISQLTKQRLVDADGIINPSAFYIYLTAWVSNDPVAYAASQANIRPHRPEWVHDKADYMPETRLRIPAAEPIEYAQFPFYLNGLRDTSDFVEAIEKVRTICSNYTSLGLSSYPNGYPFLFWEQYIGLRHWLLLFISVVLACTFLVCAVFLLNPWTAGIIVMVLALMTVELFGMMGLIGIKLSAVPVVILIASVGIGVEFTVHVALAFLTAIGDKNRRAVLALEHMFAPVLDGAVSTLLGVLMLAGSEFDFIVRYFFAVLAILTILGVLNGLVLLPVLLSFFGPYPEVSPANGLNRLPTPSPEPPPSVVRFAMPPGHTHSGSDSSDSEYSSQTTVSGLSEELRHYEAQQGAGGPAHQVIVEATENPVFAHSTVVHPESRHHPPSNPRQQPHLDSGSLPPGRQGQQPRRDPPREGLWPPPYRPRRDAFEISTEGHSGPSNRARWGPRGARSHNPRNPASTAMGSSVPGYCQPITTVTASASVTVAVHPPPVPGPGRNPRGGLCPGYPETDHGLFEDPHVPFHVRCERRDSKVEVIELQDVECEERPRGSSSN

SEQ ID NO: 9856 - protein, 486 aa, Homo sapiens
GKATGRKAPLWLRAKFQRLLFKLGCYIQKNCGKFLVVGLLIFGAFAVGLKAANLETNVEELWVEVGGRVSRELNYTRQKIGEEAMFNPQLMIQTPKEEGANVLTTEALLQHLDSALQASRVHVYMYNRGKPPLRWTNFDPLEFLEELKKINYQVDSWEEMLNKAEVGHGYMDRPCLNPADPDCPATAPNKNSTKPLDMALVLNGGCHGLSRKYMHWQEELIVGGTVKNSTGKLVSAHALQTMFQLMTPKQMYEHFKGYEYVSHINWNEDKAAAILEAWQRTYVEVVHQSVAQNSTQKVLSFTTTTLDDILKSFSDVSVIRVASGYLLMLAYACLTMLRWDCSKSQGAVGLAGVLLVALSVAAGLGLCSLIGISFNAATTQVLPFLALGVGVDDVFLLAHAFSETGQNKRIPFEDRTGECLKRTGASVALTSISNVTAFFMAALIPIPALRAFSLQYILMAHRGRLSFNDTLWCGGLKSYMRFPYEE

SEQ ID NO: 9857 - protein, 476 aa, Homo sapiens
MRSEKEGAGGLRAAVAARGPSGREKLSALEVQFHRDSQQQEAETPPTSSSGCGGGAGKPREEKRTALSKVVIRRLPPGLTKEQLEEQLRPLPAHDYFEFFAADLSLYPHLYSRAYINFRNPDDILLFRDRFDGYIFLDSKGLEYPAVVEFAPFQKIAKKKLRKKDAKTGSIEDDPEYKKFLETYCVEEEKTSANPETLLGEMEAKTRELIARRTTPLLEYIKNRKLEKQRIREEKREERRRRELEKKRLREEEKRRRREEERCKKKETDKQKKIAEKEVRIKLLKKPEKGEEPTTEKPKERGEEIDTGGGKQESCAPGAVVKARPMEGSLEEPQETSHSGSDKEHRDVERSQEQESEAQRYHVDDGRRHRAHHEPERLSRRSEDEQRWGKGPGQDRGKKGSQDSGAPGEAMERLGRAQRCDDSPAPRKERLANKDRPALQLYDPGARFRARECGGNRRICKAEGSGTGPEKREEAE

SEQ ID NO: 9858 - protein, 1321 aa, Homo sapiens
MAAAAASGAGGAAGAGTGGAGPAGRLLPPPAPGSPAAPAAVSPAAGQPRPPAPASRGPMPARIGYYEIDRTIGKGNFAVVKRATHLVTKAKVAIKIIDKTQLDEENLKKIFREVQIMKMLCHPHIIRLYQVMETERMIYLVTEYASGGEIFDHLVAHGRMAEKEARRKFKQIVTAVYFCHCRNIVHRDLKAENLLLDANLNIKIADFGFSNLFTPGQLLKTWCGSPPYAAPELFEGKEYDGPKVDIWSLGVVLYVLVCGALPFDGSTLQNLRARVLSGKFRIPFFMSTECEHLIRHMLVLDPNKRLSMEQICKHKWMKLGDADPNFDRLIAECQQLKEERQVDPLNEDVLLAMEDMGLDKEQTLQSLRSDAYDHYSAIYSLLCDRHKRHKTLRLGALPSMPRALAFQAPVNIQAEQAGTAMNISVPQVQLINPENQIVEPDGTLNLDSDEGEEPSPEALVRYLSMRRHTVGVADPRTEVMEDLQKLLPGFPGVNPQAPFLQVAPNVNFMHNLLPMQNLQPTGQLEYKEQSLLQPPTLQLLNGMGPLGRRASDGGANIQLHAQQLLKRPRGPSPLVTMTPAVPAVTPVDEESSDGEPDQEAVQSSTYKDSNTLHLPTERFSPVRRFSDGAASIQAFKAHLEKMGNNSSIKQLQQECEQLQKMYGGQIDERTLEKTQQQHMLYQQEQHHQILQQQIQDSICPPQPSPPLQAACENQPALLTHQLQRLRIQPSSPPPNHPNNHLFRQPSNSPPPMSSAMIQPHGAASSSQFQGLPSRSAIFQQQPENCSSPPNVALTCLGMQQPAQSQQVTIQVQEPVDMLSNMPGTAAGSSGRGISISPSAGQMQMQHRTNLMATLSYGHRPLSKQLSADSAEAHSLNVNRFSPANYDQAHLHPHLFSDQSRGSPSSYSPSTGVGFSPTQALKVPPLDQFPTFPPSAHQQPPHYTTSALQQALLSPTPPDYTRHQQVPHILQGLLSPRHSLTGHSDIRLPPTEFAQLIKRQQQQRQQQQQQQQQQEYQELFRHMNQGDAGSLAPSLGGQSMTERQALSYQNADSYHHHTSPQHLLQIRAQECVSQASSPTPPHGYAHQPALMHSESMEEDCSCEGAKDGFQDSKSSSTLTKGCHDSPLLLSTGGPGDPESLLGTVSHAQELGIHPYGHQPTAAFSKNKVPSREPVIGNCMDRSSPGQAVELPDHNGLGYPARPSVHEHHRPRALQRHHTIQNSDDAYVQLDNLPGMSLVAGKALSSARMSDAVLSQSSLMGSQQFQDGENEECGASLGGHEHPDLSDGSQHLNSSCYPSTCITDILLSYKHPEVSFSMEQAGV

SEQ ID NO: 9859 - protein, 392 aa, Homo sapiens
MPKPIMVIPTLASLASPTTLQSQMLGGLGQDVLLNNSLTPKYLGCKQDNSSSPKPSSVFRNGFSGIKKPWHRCHVCNHHFQFKQHLRDHMNTHTNRRPYSCRICRKSYVRPGSLSTHMKLHHGENRLKKLMCCEFCAKVFGHIRVYFGHLKEVHRVVISTEPAPSELQPGDIPKNRDMSVRGMEGSLERENKSNLEEDFLLNQADEVKLQIKCGRCQITAQSFAEIKFHLLDVHGEEIEGRLQEGTFPGSKGTQEELVQHASPDWKRHPERGKPEKVHSSSEESHACPRLKRQLHLHQNGVEMLMENEGPQSGTNKPRETCQGPECPGLHTFLLWSHSGFNCLLCAEMLGRKEDLLHHWKHQHNCEDPSKLWAILNTVSNQGVIELSSEAEK

SEQ ID NO: 9860 - protein, 819 aa, Homo sapiens
MDIQLDPARDDLPLMANTSHILVKHYVLDLDVDFESQVIEGTIVLFLEDGNRFKKQNSSIEEACQSESNKACKFGMPEPCHIPVTNARTFSSEMEYNDFAICSKGEKDTSDKDGNHDNQEHASGISSSKYCCDTGNHGSEDFLLVLDCCDLSVLKVEEVDVAAVPGLEKFTRSPELTVVSEEFRNQIVRELVTLPANRWREQLDYYARCSQAPGCGELLFDTDTWSLQIRKTGAQTATDFPHAIRIWYKTKPEGRSVTWTSDQSGRPCVYTVGSPINNRALFPCQEPPVAMSTWQATVRAAASFVVLMSGENSAKPTQLWEECSSWYYYVTMPMPASTFTIAVGCWTEMKMETWSSNDLATERPFSPSEANFRHVGVCSHMEYPCRFQNASATTQEIIPHRVFAPVCLTGACQETLLRLIPPCLSAAHSVLGAHPFSRLDVLIVPANFPSLGMASPHIMFLSQSILTGGNHLCGTRLCHEIAHAWFGLAIGARDWTEEWLSEGFATHLEDVFWATAQQLAPYEAREQQELRACLRWRRLQDEMQCSPEEMQVLRPSKDKTGHTSDSGASVIKHGLNPEKIFMQVHYLKGYFLLRFLAKRLGDETYFSFLRKFVHTFHGQLILSQDFLQMLLENIPEEKRLELSVENIYQDWLESSGIPKPLQRERRAGAECGLARQVRAEVTKWIGVNRRPRKRKRREKEEVFEKLLPDQLVLLLEHLLEQKTLSPRTLQSLQRTYHLQDQDAEVRHRWCELIVKHKFTKAYKSVERFLQEDQAMGVYLYGELMVSEDARQQQLARRCFERTKEQMDRSSAQVVAEMLF

SEQ ID NO: 9861 - protein, 338 aa, Homo sapiens [sequence omitted]

SEQ ID NO: 9862 - protein, 379 aa, Homo sapiens
MYNIKQSTDTKEAAAIEARRNREKERQNRFFNVRNRVMGVDVQALNNQVGDRKRREAAERSKEAAYGTSQVQYDVVVQMLEKEEADRTRQLAKKVQEFREQKQQLKNGREFSLWDPGQVWKGLPTYLSYSNTYPGPASLQYFSGEDLDRDTRLRMQQGQFRYNLERQQQEQQQAKVDENYTDALSNQLRLAMDAQATHLARLEESCRAAMMCAMANANKAQAAVQAGRQRCERQREQKANLAEIQHQSTSDLLTENPQVAQHPMAPYRVLPYCWKGMTPEQQAAIRKEQEVQRSKKQAHRQAEKTLDTEWKSQTMSSAQAVLELEEQERELCAVFQRGLGSFNQQLANEQKAQQDYLNSVIYTNQPTAQYHQQFNTSSR

SEQ ID NO: 9863 - protein, 364 aa, Homo sapiens
MQKWFSAFDDAIIQRQWRANPSRGGGGVSFTKEVDTNVATGAPPRRQRVPGRACPWREPIRGRRGARPGGGDAGGTPGETVRHCSAPEDPIFRFSSLHSYPFPGTIKSRDMSWKRHHLIPETFGVKRRRKRGPVESDPLRGEPGSARAAVSELMQLFPRGLFEDALPPIVLRSQVYSLVPDRTVADRQLKELQEQGEIRIVQLGFDLDAHGIIFTEDYRTRVLKACDGRPYAGAVQKFLASVLPACGDLSFQQDQMTQTFGFRDSEITHLVNAGVLTVRDAGSWWLAVPGAGRFIKYFVKGRQAVLSMVRKAKYRELLLSELLGRRAPVVVRLGLTYHVHDLIGAQLVDCISTTSGTLLRLPET

SEQ ID NO: 9864 - protein, 368 aa, Homo sapiens
MQKWFSAFDDAIIQRQWRANPSRGGGGVSFTKEVDTNVATGAPPRRQRVPGRACPWREPIRGRRGARPGGGDAGGTPGETVRHCSAPEDPIFRFSSLHSYPFPGTIKSRDMSWKRHHLIPETFGVKRRRKRGPVESDPLRGEPGSARAAVSELMQLFPRGLFEDALPPIVLRSQVYSLVPDRTVADRQLKELQEQGEIRIVQLGFDLDAHGIIFTEDYRTRVCDCVLKACDGRPYAGAVQKFLASVLPACGDLSFQQDQMTQTFGFRDSEITHLVNAGVLTVRDAGSWWLAVPGAGRFIKYFVKGRQAVLSMVRKAKYRELLLSELLGRRAPVVVRLGLTYHVHDLIGAQLVDCISTTSGTLLRLPET

SEQ ID NO: 9865 - protein, 1211 aa, Homo sapiens
MLEVSIPTPHRYVRGKSNLMDAISFVLGEKTSNLRVKTLRDLIHGAPVGKPAANRAFVSMVYSEEGAEDRTFARVIVGGSSEYKINNKVVQLHEYSEELEKLGILIKARNFLVFQGAVESIAMKNPKERTALFEEISRSGELAQEYDKRKKEMVKAEEDTQFNYHRKKNIAAERKEAKQEKEEADRYQRLKDEVVRAQVQLQLFKLYHNEVEIEKLNKELASKNKEIEKDKKRMDKVEDELKEKKKELGKMMREQQQIEKEIKEKDSELNQKRPQYIKAKENTSHKIKKLEAAKKSLQNAQKHYKKRKGDMDELEKEMLSVEKARQEFEERMEEESQSQGRDLTLEENQVKKYHRLKEEASKRAATLAQELEKFNRDQKADQDRLDLEERKKVETEAKIKQKLREIEENQKRIEKLEEYITTSKQSLEEQKKLEGELTEEVEMAKRRIDEINKELNQVMEQLGDARIDRQESSRQQRKAEIMESIKRLYPGSVYGRLIDLCQPTQKKYQIAVTKVLGKNMDAIIVDSEKTGRDCIQYIKEQRGEPETFLPLDYLEVKPTDEKLRELKGAKLVIDVIRYEPPHIKKALQYACGNALVCDNVEDARRIAFGGHQRHKTVALDGTLFQKSGVISGGASDLKAKARRWDEKAVDKLKEKKERLTEELKEQMKAKRKEAELRQVQSQAHGLQMRLKYSQSDLEQTKTRHLALNLQEKSKLESELANFGPRINDIKRIIQSREREMKDLKEKMNQVEDEVFEEFCREIGVRNIREFEEEKVKRQNEIAKKRLEFENQKTRLGIQLDFEKNQLKEDQDKVHMWEQTVKKDENEIEKLKKEEQRHMKIIDETMAQLQDLKNQHLAKKSEVNDKNHEMEEIRKKLGGANKEMTHLQKEVTAIETKLEQKRSDRHNLLQACKMQDIKLPLSKGTMDDISQEEGSSQGEDSVSGSQRISSIYAREALIEIDYGDLCEDLKDAQAEEEIKQEMNTLQQKLNEQQSVLQRIAAPNMKAMEKLESVRDKFQETSDEFEAARKRAKKAKQAFEQIKKERFDRFNACFESVATNIDEIYKALSRNSSAQAFLGPENPEEPYLDGINYNCVAPGKRFRPMDNLSGGEKTVAALALLFAIHSYKPAPFFVLDEIDAALDNTNIGKVANYIKEQSTCNFQAIVISLKEEFYTKAESLIGVYPEQGDCVISKVLTFDLTKYPDANPNPNEQ

SEQ ID NO: 9866 - protein, 117 aa, Homo sapiens
MGTWGAPHRTLPCRNRGAMQPRVLLVVALLALLASARASEAEDASLLSFMQGYMKHATKTAKDALSSVQESQVAQQARGWVTDGFSSLKDYWSTVKDKFSEFWDLDPEVRPTSAVAA

SEQ ID NO: 9867 - protein, 194 aa, Homo sapiens
MWLSPSLLLLILPGYSIAAKITGPTTVNGSEQGSLTVQCAYGSGWETYLKWRCQGADWNYCNILVKTNGSEQEVKKNRVSIRDNQKNHVFTVTMENLKRDDADSYWCGTERPGIDLGVKVQVTINPGTQTAVSEWTTTTASLAFTAAATQKTSSPLTRSPLKSTHFLFLFLLELPLLLSMLGTVLWVNRPQRRS

SEQ ID NO: 9868 - protein, 326 aa, Homo sapiens
MQPPVPGPLGLLDPAEGLSRRKKTSLWFVGSLLLVSVLIVTVGLAATTRTENVTVGGYYPGIILGFGSFLGIIGINLVENRRQMLVAAIVFISFGVVAAFCCAIVDGVFAAQHIEPRPLTTGRCQFYSSGVGYLYDVYQTEVTCHSLDGKCQLKVRSNTCYCCDLYACGSAEPSPAYYEFIGVSGCQDVLHLYRLLWASAVLNVLGLFLGIITAAVLGAFKDMVPLSQLAYGPAVPPQTLYNPAQQILAYAGFRLTPEPVPTCSSYPLPLQPCSRFPVAPSSALASSEDLQPPSPSSSGSGLPGQAPPCYAPTYFPPGEKPPPYAP

SEQ ID NO: 9869 - protein, 754 aa, Homo sapiens
MAAGVLPQNEQPYSTLVNNSECVANMKGNLERPTPKYTKVGERLRHVIPGHMACSMACGGRACKYENPARWSEQEQAIKGVYSSWVTDNILAMARPSSELLEKYHIIDQFLSHGIKTIINLQRPGEHASCGNPLEQESGFTYLPEAFMEAGIYFYNFGWKDYGVASLTTILDMVKVMTFALQEGKVAIHCHAGLGRTGVLIACYLVFATRMTADQAIIFVRAKRPNSIQTRGQLLCVREFTQFLTPLRNIFSCCDPKAHAVTLPQYLIRQRHLLHGYEARLLKHVPKIIHLVCKLLLDLAENRPVMMKDVSEGPGLSAEIEKTMSEMVTMQLDKELLRHDSDVSNPPNPTAVAADFDNRGMIFSNEQQFDPLWKRRNVECLQPLTHLKRRLSYSDSDLKRAENLLEQGETPQTVPAQILVGHKPRQQKLISHCYIPQSPEPDLHKEALVRSTLSFWSQSKFGGLEGLKDNGSPIFHGRIIPKEAQQSGAFSADVSGSHSPGEPVSPSFANVHKDPNPAHQQVSHCQCKTHGVGSPGSVRQNSRTPRSPLDCGSSPKAQFLVEHETQDSKDLSEAASHSALQSELSAEARRILAAKALANLNESVEKEELKRKVEMWQKELNSRDGAWERICGERDPFILCSLMWSWVEQLKEPVITKEDVDMLVDRRADAAEALFLLEKGQHQTILCVLHCIVNLQTIPVDVEEAFLAHAIKAFTKVNFDSENGPTVYNTLKKIFKHTLEEKRKMTKDGPKPGL

SEQ ID NO: 9870 - protein, 355 aa, Homo sapiens
MDFLHRNGVLIIQHLQKDYRAYYTFLNFMSNVGDPRNIFFIYFPLCFQFNQTVGTKMIWVAVIGDWLNLIFKWILFGHRPYWWVQETQIYPNHSSPCLEQFPTTCETGPGSPSGHAMGASCVWYVMVTAALSHTVCGMDKFSITLHRLTWSFLWSVFWLIQISVCISRVFIATHFPHQVILGVIGGMLVAEAFEHTPGIQTASLGTYLKTNLFLFLFAVGFYLLLRVLNIDLLWSVPIAKKWCANPDWIHIDTTPFAGLVRNLGVLFGLGFAINSEMFLLSCRGGNNYTLSFRLLCALTSLTILQLYHFLQIPTHEEHLFYVLSFCKSASIPLTVVAFIPYSVHMLMKQSGKKSQ

SEQ ID NO: 9871 - protein, 949 aa, Homo sapiens
MEPPGRSSRSTASHTLHQYCCPTQVLDSMKLTPSGRLAESSVEGDAPGSDLSTAVDSPGSQPPYRLSQLPPSSSHMGGPPAGVGLPWAQRARLQPASVALRKQEEEEIKRSKALSDSYELSTDLQDKKVEMLERKYGGSFLSRRAARTIQTAFRQYRMNKNFERLRSSASESRMSRRIILSNMRMQFSFEEYEKAQNPAYFEGKPASLDEGAMAGARSHRLERGLPYGGSCGGGIDGGGSSVTTSGEFSNDITELEDSFSKQVKSLAESIDEALNCHPSGPMSEEPGSAQLEKRESKEQQEDSSATSFSDLPLYLDDTVPQQSPERLPSTEPPPQGRPEFWAPAPLPPVPPPVPSGTREDGSREEGTRRGPGCLECRDFRLRAAHLPLLTIEPPSDSSVDLSDRSDRGSVHRQLVYEADGCSPHGTLKHKGPPGRAPIPHRHYPAPEGPAPAPPGPLPPAPNSGTGPSGVAGGRRLGKCEAAGENSDGGDNESLESSSNSNETINCSSGSSSRDSLREPPATGLCKQTYQRETRHSWDSPAFNNDVVQRRHYRIGLNLFNKKPEKGIQYLIERGFLSDTPVGVAHFILERKGLSRQMIGEFLGNRQKQFNRDVLDCVVDEMDFSSMDLDDALRKFQSHIRVQGEAQKVERLIEAFSQRYCVCNPALVRQFRNPDTIFILAFAIILLNTDMYSPSVKAERKMKLDDFIKNLRGVDNGEDIPRDLLVGIYQRIQGRELRTNDDHVSQVQAVERMIVGKKPVLSLPHRRLVCCCQLYEVPDPNRPQRLGLHQREVFLFNDLLVVTKIFQKKKILVTYSFRQSFPLVEMHMQLFQNSYYQFGIKLLSAVPGGERKVLIIFNAPSLQDRLRFTSDLRESIAEVQEMEKYRVESELEKQKGMMRPNASQPGGAKDSVNGTMARSSLEDTYGAGDGLKRGALSSSLRDLSDAGVCY

SEQ ID NO: 9872 - protein, 839 aa, Homo sapiens
MGPRAKTISSLFFLLWVLAEPAENSDFYLPGDYLLGGLFSLHANMKGIVHLNFLQVPMCKEYEVKVIGYNLMQAMRFAVEEINNDSSLLPGVLLGYEIVDVCYISNNVQPVLYFLAHEDNLLPIQEDYSNYISRVVAVIGPDNSESVMTVANFLSLFLLPQITYSAISDELRDKVRFPALLRTTPSADHHIEAMVQLMLHFRWNWIIVLVSSDTYGRDNGQLLGERVARRDICIAFQETLPTLQPNQNMTSEERQRLVTIVDKLQQSTARVVVVFSPDLTLYHFFNEVLRQNFTGAVWIASESWAIDPVLHNLTELRHLGTFLGITIQSVPIPGFSEFREWGPQAGPPPLSRTSQSYTCNQECDNCLNATLSFNTILRLSGERVVYSVYSAVYAVAHALHSLLGCDKSTCTKRVVYPWQLLEEIWKVNFTLLDHQIFFDPQGDVALHLEIVQWQWDRSQNPFQSVASYYPLQRQLKNIQDISWHTINNTIPMSMCSKRCQSGQKKKPVGIHVCCFECIDCLPGTFLNHTEDEYECQACPNNEWSYQSETSCFKRQLVFLEWHEAPTIAVALLAALGFLSTLAILVIFWRHFQTPIVRSAGGPMCFLMLTLLLVAYMVVPVYVGPPKVSTCLCRQALFPLCFTICISCIAVRSFQIVCAFKMASRFPRAYSYWVRYQGPYVSMAFITVLKMVIVVIGMLATGLSPTTRTDPDDPKITIVSCNPNYRNSLLFNTSLDLLLSVVGFSFAYMGKELPTNYNEAKFITLSMTFYFTSSVSLCTFMSAYSGVLVTIVDLLVTVLNLLAISLGYFGPKCYMILFYPERNTPAYFNSMIQGYTMRRD

SEQ ID NO: 9873 - protein, 520 aa, Homo sapiens
MAALPGTVPRMMRPAPGQNYPRTGFPLEVSTPLGQGRVNQLGGVFINGRPLPNHIRHKIVEMAHHGIRPCVISRQLRVSHGCVSKILCRYQETGSIRPGAIGGSKPRQVATPDVEKKIEEYKRENPGMFSWEIRDRLLKDGHCDRSTVPSGLVSSISRVLRIKFGKKEEEDEADKKEDDGEKKAKHSIDGILGDKGNRLDEGSDVESEPDLPLKRKQRRSRTTFTAEQLEELEKAFERTHYPDIYTREELAQRTKLTEARVQVWFSNRRARWRKQAGANQLAAFNHLLPGGFPPTGMPTLPPYQLPDSTYPTTTISQDGGSTVHRPQPLPPSTMHQGGLAAAAAAADTSSAYGARHSFSSYSDSFMNPAAPSNHMNPVSNGLSPQVMSILGNPSAVPPQPQADFSISPLHGGLDSATSISASCSQRADSIKPGDSLPTSQAYCPPTYSTTGYSVDPVAGYQYGQYGQSECLVPWASPVPIPSPTPRASCLFMESYKVVSGWGMSISQMEKLKSSQMEQFT

SEQ ID NO: 9874 - protein, 1359 aa, Homo sapiens
MYSVEDLLISHGYKLSRDPPASREDNPKGRQAARTGTRAGQGLQNGHEDGPAALAHRKTSAGKGHVSDSESRRSTPRGHGEPQSTSASRTSEAGFCNQPPSAWSSHPPTGNDQAYRRRGRQEARSQKPREHENLEARGMAQAHSLPVHVREGPWEVGGRSEHVMKKPVWEEELRMSGPAKWQNVSLESWNQPRKLGRQMSDGDGERLFQDLYPFIQGEHVLNSQNKGKSRSLPRVLSPESLSCTEIPIPLNERHSPKMPPYPPTCAPNLDSTRNSEKSGCSAPFPRPKFGRPLKPPSYSSHQQSRGGADSSDSQDSQQMDAYVPRHELCLSDPGLEPPVYVPPPSYRSPPQNIPNPYLEDTVPINVCGGHSQQQSPTEKAGASGQPPSGPPGTGNEYGVSPRLPQGLPAHPRPVTAYDGFVQYIPFDDPRLRHFKLAQPQGFCEDIKLDDKSYNSSPVTAQEPAHGGMQPDGAIWNPQSLIPPSGDERGLVLADSSPRWLWGQPPGDGENSGLPNQRDRCVARGQWPDVRGSQHGHTGRQVSSPYSQGESTCETQTKLKKFQTGTRTKKSSKKKMNETIFCLVSIPVKSESHLPDRDMDNNDLKPSADQKNGSDKSPALQEQSLLSMSSTDLELQALTGSMGGRTEFQKQDLGEPEEDRQTNDLSFIHLTKHRELKHSGSWPGHRYRDQQTQTSFSEEPQSSQLLPGAKLGGPSRAALSPKCSDPAASEAQTHTAFPTGDHKQRPSARNLKGHRSLSPSSNSAFSRTSLSVDQAPTPKAGRSQPCVDVHGLGAHPGPKREVVKGEPTGPCNSKQLFGQFLLKPVSRRPWDLISQLESFNKELQEEEESSSSSSSSSSSSEESEAEPQQENRAHCRQEDVGFRGNSPEMRVEPQPRMWVPESPVCRSGRGESKSESWSEELQPGHPRAWPPSPGRFRVEEGGGAPFCSADGSTSAEKRHLEVSNGMDELAGSPFPVTRMSSRSSDAKPLPASYPAEPREPQESPKITSAFSSVKPSEAVPRKFDSGGERGAGLPLSLSNKNRGLSAPDLRSVGLTPGQEQGASELEGSLGEASTIEIPPGESLQARAARILGIEVAVESLLPGIRRAGQNQPAEPDASACTPESPQEELLSRPAPADVPRVSTDAFYGRRKCGWTKSPLFVGDRDSARRAPQAFEHSDVDGVVTSTDPVPEPEPSPLESKFFEQKDVETKPPFRSTLFHFVERTPSVAGSEKRLRSPSKVIESLQEKLASPPRRADPDRLMRMKEVSSVSRMRVLSFRNADSQEDAEELKATTRGQAGLPGGLVSPGSGDRAQRLGHSLSVSKDSISREEKEHPAAQKEKSMDQDFWCPDSYDPSRVERV

SEQ ID NO: 9875 - protein, 1557 aa, Homo sapiens
MEPGSDDFLPPPECPVFEPSWAEFRDPLGYIAKIRPIAEKSGICKIRPPADWQPPFAVEVDNFRFTPRIQRLNELEAQTRVKLNYLDQIAKFWEIQGSSLKIPNVERRILDLYSLSKIVVEEGGYEAICKDRRWARVAQRLNYPPGKNIGSLLRSHYERIVYPYEMYQSGANLVQCNTRPFDNEEKDKEYKPHSIPLRQSVQPSKFNSYGRRAKRLQPDPEPTEEDIEKNPELKKLQIYGAGPKMMGLGLMAKDKTLRKKDKEGPECPPTVVVKEELGGDVKVESTSPKTFLESKEELSHSPEPCTKMTMRLRRNHSNAQFIESYVCRMCSRGDEDDKLLLCDGCDDNYHIFCLLPPLPEIPKGVWRCPKCVMAECKRPPEAFGFEQATREYTLQSFGEMADSFKADYFNMPVHMVPTELVEKEFWRLVNSIEEDVTVEYGADIHSKEFGSGFPVSDSKRHLTPEEEEYATSGWNLNVMPVLEQSVLCHINADISGMKVPWLYVGMVFSAFCWHIEDHWSYSINYLHWGEPKTWYGVPSLAAEHLEEVMKKLTPELFDSQPDLLHQLVTLMNPNTLMSHGVPVVRTNQCAGEFVITFPRAYHSGFNQGYNFAEAVNFCTADWLPAGRQCIEHYRRLRRYCVFSHEELICKMAACPEKLDLNLAAAVHKEMFIMVQEERRLRKALLEKGITEAEREAFELLPDDERQCIKCKTTCFLSALACYDCPDGLVCLSHINDLCKCSSSRQYLRYRYTLDELPAMLHKLKVRAESFDTWANKVRVALEVEDGRKRSLEELRALESEARERRFPNSELLQQLKNCLSEAEACVSRALGLVSGQEAGPHRVAGLQMTLTELRAFLDQMNNLPCAMHQIGDVKGVLEQVEAYQAEAREALASLPSSPGLLQSLLERGRQLGVEVPEAQQLQRQVEQARWLDEVKRTLAPSARRGTLAVMRGLLVAGASVAPSPAVDKAQAELQELLTIAERWEEKAHLCLEARQKHPPATLEAIIREAENIPVHLPNIQALKEALAKARAWIADVDEIQNGDHYPCLDDLEGLVAVGRDLPVGLEELRQLELQVLTAHSWREKASKTFLKKNSCYTLLEVLCPCADAGSDSTKRSRWMEKELGLYKSDTELLGLSAQDLRDPGSVIVAFKEGEQKEKEGILQLRRTNSAKPSPLASSSTASSTTSICVCGQVLAGAGALQCDLCQDWFHGRCVSVPRLLSSPRPNPTSSPLLAWWEWDTKFLCPLCMRSRRPRLETILALLVALQRLPVRLPEGEALQCLTERAISWQGRARQALASEDVTALLGRLAELRQRLQAEPRPEEPPNYPAAPASDPLREGSGKDMPKVQGLLENGDSVTSPEKVAPEEGSDLELLSSLLPQLTGPVLELPEATRAPLEELMMEGDLLEVTLDENHSIWQLLQAGQPPDLERIRTLLELEKAERHGSRARGRALERRRRRKVDRGGEGDDPAREELEPKRVRSSGPEAEEVQEEEELEEETGGEGPPAPIPTTGSPSTQENQNGLEPAEGTTSGPSAPFSTLTPRLHLPCPQQPPQQQL

SEQ ID NO: 9876 - protein, 1516 aa, Homo sapiens
MEPGSDDFLPPPECPVFEPSWAEFRDPLGYIAKIRPIAEKSGICKIRPPADWQPPFAVEVDNFRFTPRIQRLNELEIVVEEGGYEAICKDRRWARVAQRLNYPPGKNIGSLLRSHYERIVYPYEMYQSGANLVQCNTRPFDNEEKDKEYKPHSIPLRQSVQPSKFNSYGRRAKRLQPDPEPTEEDIEKNPELKKLQIYGAGPKMMGLGLMAKDKTLRKKDKEGPECPPTVVVKEELGGDVKVESTSPKTFLESKEELSHSPEPCTKMTMRLRRNHSNAQFIESYVCRMCSRGDEDDKLLLCDGCDDNYHIFCLLPPLPEIPKGVWRCPKCVMAECKRPPEAFGFEQATREYTLQSFGEMADSFKADYFNMPVHMVPTELVEKEFWRLVNSIEEDVTVEYGADIHSKEFGSGFPVSDSKRHLTPEEEEYATSGWNLNVMPVLEQSVLCHINADISGMKVPWLYVGMVFSAFCWHIEDHWSYSINYLHWGEPKTWYGVPSLAAEHLEEVMKKLTPELFDSQPDLLHQLVTLMNPNTLMSHGVPVVRTNQCAGEFVITFPRAYHSGFNQGYNFAEAVNFCTADWLPAGRQCIEHYRRLRRYCVFSHEELICKMAACPEKLDLNLAAAVHKEMFIMVQEERRLRKALLEKGITEAEREAFELLPDDERQCIKCKTTCFLSALACYDCPDGLVCLSHINDLCKCSSSRQYLRYRYTLDELPAMLHKLKVRAESFDTWANKVRVALEVEDGRKRSLEELRALESEARERRFPNSELLQQLKNCLSEAEACVSRALGLVSGQEAGPHRVAGLQMTLTELRAFLDQMNNLPCAMHQIGDVKGVLEQVEAYQAEAREALASLPSSPGLLQSLLERGRQLGVEVPEAQQLQRQVEQARWLDEVKRTLAPSARRGTLAVMRGLLVAGASVAPSPAVDKAQAELQELLTIAERWEEKAHLCLEARQKHPPATLEAIIREAENIPVHLPNIQALKEALAKARAWIADVDEIQNGDHYPCLDDLEGLVAVGRDLPVGLEELRQLELQVLTAHSWREKASKTFLKKNSCYTLLEVLCPCADAGSDSTKRSRWMEKELGLYKSDTELLGLSAQDLRDPGSVIVAFKEGEQKEKEGILQLRRTNSAKPSPLASSSTASSTTSICVCGQVLAGAGALQCDLCQDWFHGRCVSVPRLLSSPRPNPTSSPLLAWWEWDTKFLCPLCMRSRRPRLETILALLVALQRLPVRLPEGEALQCLTERAISWQGRARQALASEDVTALLGRLAELRQRLQAEPRPEEPPNYPAAPASDPLREGSGKDMPKVQGLLENGDSVTSPEKVAPEEGSDLELLSSLLPQLTGPVLELPEATRAPLEELMMEGDLLEVTLDENHSIWQLLQAGQPPDLERIRTLLELEKAERHGSRARGRALERRRRRKVDRGGEGDDPAREELEPKRVRSSGPEAEEVQEEEELEEETGGEGPPAPIPTTGSPSTQENQNGLEPAEGTTSGPSAPFSTLTPRLHLPCPQQPPQQQL

SEQ ID NO: 9877 - protein, 1246 aa, Homo sapiens
MMETERLVLPPPDPLDLPLRAVELGCTGHWELLNLPGAPESSLPHGLPPCAPDLQQEAEQLFLSSPAWLPLHGVEHSARKWQRKTDPWSLLAVLGAPVPSDLQAQRHPTTGQILGYKEVLLENTNLSATTSLSLRRPPGPASQSLWGNPTQYPFWPGGMDEPTITDLNTREEAEEEIDFEKDLLTIPPGFKKGMDFAPKDCPTPAPGLLSLSCMLEPLDLGGGDEDENEAVGQPGGPRGDTVSASPCSAPLARASSLEDLVLKEASTAVSTPEAPEPPSQEQWAIPVDATSPVGDFYRLIPQPAFQWAFEPDVFQKQAILHLERHDSVFVAAHTSAGKTVVAEYAIALAQKHMTRTIYTSPIKALSNQKFRDFRNTFGDVGLLTGDVQLHPEASCLIMTTEILRSMLYSGSDVIRDLEWVIFDEVHYINDVERGVVWEEVLIMLPDHVSIILLSATVPNALEFADWIGRLKRRQIYVISTVTRPVPLEHYLFTGNSSKTQGELFLLLDSRGAFHTKGYYAAVEAKKERMSKHAQTFGAKQPTHQGGPAQDRGVYLSLLASLRTRAQLPVVVFTFSRGRCDEQASGLTSLDLTTSSEKSEIHLFLQRCLARLRGSDRQLPQVLHMSELLNRGLGVHHSGILPILKEIVEMLFSRGLVKVLFATETFAMGVNMPARTVVFDSMRKHDGSTFRDLLPGEYVQMAGRAGRRGLDPTGTVILLCKGRVPEMADLHRMMMGKPSQLQSQFRLTYTMILNLLRVDALRVEDMMKRSFSEFPSRKDSKAHEQALAELTKRLGALEEPDMTGQLVDLPEYYSWGEELTETQHMIQRRIMESVNGLKSLSAGRVVVVKNQEHHNALGVILQVSSNSTSRVFTTLVLCDKPLSQDPQDRGPATAEVPYPDDLVGFKLFLPEGPCDHTVVKLQPGDMAAITTKVLRVNGEKILEDFSKRQQPKFKKDPPLAAVTTAVQELLRLAQAHPAGPPTLDPVNDLQLKDMSVVEGGLRARKLEELIQGAQCVHSPRFPAQYLKLRERMQIQKEMERLRFLLSDQSLLLLPEYHQRVEVLRTLGYVDEAGTVKLAGRVACAMSSHELLLTELMFDNALSTLRPEEIAALLSGLVCQSPGDAGDQLPNTLKQGIERVRAVAKRIGEVQVACGLNQTVEEFVGELNFGLVEVVYEWARGMPFSELAGLSGTPEGLVVRCIQRLAEMCRSLRGAARLVGEPVLGAKMETAATLLRRDIVFAASLYTQ

SEQ ID NO: 9878 - protein, 2182 aa, Homo sapiens
MKRKERIARRLEGIENDTQPILLQSCTGLVTHRLLEEDTPRYMRASDPASPHIGRSNEEEETSDSSLEKQTRSKYCTETSGVHGDSPYGSGTMDTHSLESKAERIARYKAERRRQLAEKYGLTLDPEADSEYLSRYTKSRKEPDAVEKRGGKSDKQEESSRDASSLYPGTETMGLRTCAGESKDYALHVGDGSSDPEVLLNIENQRRGQELSATRQAHDLSPAAESSSTFSFSGRDSSFTEVPRSPKHAHSSSLQQAASRSPSFGDPQLSPEARPSTGKPKHEWFLQKDSEGDTPSLINWPSRVKVREKLVKEESARNSPELASESVTQRRHQPAPVHYVSFQSEHSAFDRVPSKAAGSTRQPIRGYVQPADTGHTAKLVTPETPENASECSWVASATQNVPKPPSLTVLEGDGRDSPVLHVCESKAEEEEGEGEGEEKEEDVCFTEALEQSKKTLLALEGDGLVRSPEDPSRNEDFGKPAVSTVTLEHQKELENVAQPPQAPHQPTERTGRSEMVLYIQSEPVSQDAKPTGHNREASKKRKVRTRSLSDFTGPPQLQALKYKDPASRRELELPSSKTEGPYGEISMLDTKVSVAQLRSAFLASANACRRPELKSRVERSAEGPGLPTGVERERGSRKPRRYFSPGESRKTSERFRTQPITSAERKESDRCTSHSETPTVDDEEKVDERAKLSVAAKRLLFREMEKSFDEQNVPKRRSRNTAVEQRLRRLQDRSLTQPITTEEVVIAATLQASAHQKALAKDQTNEGKELAEQGEPDSSTLSLAEKLALFNKLSQPVSKAISTRNRIDTRQRRMNARYQTQPVTLGEVEQVQSGKLIPFSPAVNTSVSTVASTVAPMYAGDLRTKPPLDHNASATDYKFSSSIENSDSPVRSILKSQAWQPLVEGSENKGMLREYGETESKRALTGRDSGMEKYGSFEEAEASYPILNRAREGDSHKESKYAVPRRGSLERANPPITHLGDEPKEFSMAKMNAQGNLDLRDRLPFEEKVEVENVMKRKFSLRAAEFGEPTSEQTGTAAGKTIAQTTAPVSWKPQDSSEQPQEKLCKNPCAMFAAGEIKTPTGEGLLDSPSKTMSIKERLALLKKSGEEDWRNRLSRRQEGGKAPASSLHTQEAGRSLIKKRVTESRESQMTIEERKQLITVREEAWKTRGRGAANDSTQFTVAGRMVKKGLASPTAITPVASPICGKTRGTTPVSKPLEDIEARPDMQLESDLKLDRLETFLRRLNNKVGGMHETVLTVTGKSVKEVMKPDDDETFAKFYRSVDYNMPRSPVEMDEDFDVIFDPYAPKLTSSVAEHKRAVRPKRRVQASKNPLKMLAAREDLLQEYTEQRLNVAFMESKRMKVEKMSSNSNFSEVTLAGLASKENFSNVSLRSVNLTEQNSNNSAVPYKRLMLLQIKGRRHVQTRLVEPRASALNSGDCFLLLSPHCCFLWVGEFANVIEKAKASELATLIQTKRELGCRATYIQTIEEGINTHTHAAKDFWKLLGGQTSYQSAGDPKEDELYEAAIIETNCIYRLMDDKLVPDDDYWGKIPKCSLLQPKEVLVFDFGSEVYVWHGKEVTLAQRKIAFQLAKHLWNGTFDYENCDINPLDPGECNPLIPRKGQGRPDWAIFGRLTEHNETILFKEKFLDWTELKRSNEKNPGELAQHKEDPRTDVKAYDVTRMVSMPQTTAGTILDGVNVGRGYGLVEGHDRRQFEITSVSVDVWHILEFDYSRLPKQSIGQFHEGDAYVVKWKFMVSTAVGSRQKGEHSVRAAGKEKCVYFFWQGRHSTVSEKGTSALMTVELDEERGAQVQVLQGKEPPCFLQCFQGGMVVHSGRREEEEENVQSEWRLYCVRGEVPVEGNLLEVACHCSSLRSRTSMVVLNVNKALIYLWHGCKAQAHTKEVGRTAANKIKEQCPLEAGLHSSSKVTIHECDEGSEPLGFWDALGRRDRKAYDCMLQDPGSFNFAPRLFILSSSSGDFAATEFVYPARAPSVVSSMPFLQEDLYSAPQPALFLVDNHHEVYLWQGWWPIENKITGSARIRWASDRKSAMETVLQYCKGKNLKKPAPKSYLIHAGLEPLTFTNMFPSWEHREDIAEITEMDTEVSNQITLVEDVLAKLCKTIYPLADLLARPLPEGVDPLKLEIYLTDEDFEFALDMTRDEYNALPAWKQVNLKKAKGLF

SEQ ID NO: 9879 - protein, 1788 aa, Homo sapiens
MKRKERIARRLEGIENDTQPILLQSCTGLVTHRLLEEDTPRYMRASDPASPHIGRSNEEEETSDSSLEKQTRSKYCTETSGVHGDSPYGSGTMDTHSLESKAERIARYKAERRRQLAEKYGLTLDPEADSEYLSRYTKSRKEPDAVEKRGGKSDKQEESSRDASSLYPGTETMGLRTCAGESKDYALHVGDGSSDPEVLLNIENQRRGQELSATRQAHDLSPAAESSSTFSFSGRDSSFTEVPRSPKHAHSSSLQQAASRSPSFGDPQLSPEARPRCTSHSETPTVDDEEKVDERAKLSVAAKRLLFREMEKSFDEQNVPKRRSRNTAVEQRLRRLQDRSLTQPITTEEVVIAATLQASAHQKALAKDQTNEGKELAEQGEPDSSTLSLAEKLALFNKLSQPVSKAISTRNRIDTRQRRMNARYQTQPVTLGEVEQVQSGKLIPFSPAVNTSVSTVASTVAPMYAGDLRTKPPLDHNASATDYKFSSSIENSDSPVRSILKSQAWQPLVEGSENKGMLREYGETESKRALTGRDSGMEKYGSFEEAEASYPILNRAREGDSHKESKYAVPRRGSLERANPPITHLGDEPKEFSMAKMNAQGNLDLRDRLPFEEKVEVENVMKRKFSLRAAEFGEPTSEQTGTAAGKTIAQTTAPVSWKPQDSSEQPQEKLCKNPCAMFAAGEIKTPTGEGLLDSPSKTMSIKERLALLKKSGEEDWRNRLSRRQEGGKAPASSLHTQEAGRSLIKKRVTESRESQMTIEERKQLITVREEAWKTRGRGAANDSTQFTVAGRMVKKGLASPTAITPVASPICGKTRGTTPVSKPLEDIEARPDMQLESDLKLDRLETFLRRLNNKVGGMHETVLTVTGKSVKEVMKPDDDETFAKFYRSVDYNMPRSPVEMDEDFDVIFDPYAPKLTSSVAEHKRAVRPKRRVQASKNPLKMLAAREDLLQEYTEQRLNVAFMESKRMKVEKMSSNSNFSEVTLAGLASKENFSNVSLRSVNLTEQNSNNSAVPYKRLMLLQIKGRRHVQTRLVEPRASALNSGDCFLLLSPHCCFLWVGEFANVIEKAKASELATLIQTKRELGCRATYIQTIEEGINTHTHAAKDFWKLLGGQTSYQSAGDPKEDELYEAAIIETNCIYRLMDDKLVPDDDYWGKIPKCSLLQPKEVLVFDFGSEVYVWHGKEVTLAQRKIAFQLAKHLWNGTFDYENCDINPLDPGECNPLIPRKGQGRPDWAIFGRLTEHNETILFKEKFLDWTELKRSNEKNPGELAQHKEDPRTDVKAYDVTRMVSMPQTTAGTILDGVNVGRGYGLVEGHDRRQFEITSVSVDVWHILEFDYSRLPKQSIGQFHEGDAYVVKWKFMVSTAVGSRQKGEHSVRAAGKEKCVYFFWQGRHSTVSEKGTSALMTVELDEERGAQVQVLQGKEPPCFLQCFQGGMVVHSGRREEEEENVQSEWRLYCVRGEVPVEGNLLEVACHCSSLRSRTSMVVLNVNKALIYLWHGCKAQAHTKEVGRTAANKIKEQCPLEAGLHSSSKVTIHECDEGSEPLGFWDALGRRDRKAYDCMLQDPGSFNFAPRLFILSSSSGDFAATEFVYPARAPSVVSSMPFLQEDLYSAPQPALFLVDNHHEVYLWQGWWPIENKITGSARIRWASDRKSAMETVLQYCKGKNLKKPAPKSYLIHAGLEPLTFTNMFPSWEHREDIAEITEMDTEVSNQITLVEDVLAKLCKTIYPLADLLARPLPEGVDPLKLEIYLTDEDFEFALDMTRDEYNALPAWKQVNLKKAKGLF

SEQ ID NO: 9880 - protein, 1560 aa, Homo sapiens
MEPGSDDFLPPPECPVFEPSWAEFRDPLGYIAKIRPIAEKSGICKIRPPADWQPPFAVEVDNFRFTPRIQRLNELEAQTRVKLNYLDQIAKFWEIQGSSLKIPNVERRILDLYSLSKIVVEEGGYEAICKDRRWARVAQRLNYPPGKNIGSLLRSHYERIVYPYEMYQSGANLVQCNTRPFDNEEKDKEYKPHSIPLRQSVQPSKFNSYGRRAKRLQPDPEPTEEDIEKNPELKKLQIYGAGPKMMGLGLMAKDKTLRKKDKEGPECPPTVVVKEELGGDVKVESTSPKTFLESKEELSHSPEPCTKMTMRLRRNHSNAQFIESYVCRMCSRGDEDDKLLLCDGCDDNYHIFCLLPPLPEIPKGVWRCPKCVMAECKRPPEAFGFEQATREYTLQSFGEMADSFKADYFNMPVHMVPTELVEKEFWRLVNSIEEDVTVEYGADIHSKEFGSGFPVSDSKRHLTPEEEEYATSGWNLNVMPVLEQSVLCHINADISGMKVPWLYVGMVFSAFCWHIEDHWSYSINYLHWGEPKTWYGVPSLAAEHLEEVMKKLTPELFDSQPDLLHQLVTLMNPNTLMSHGVPVVRTNQCAGEFVITFPRAYHSGFNQGYNFAEAVNFCTADWLPAGRQCIEHYRRLRRYCVFSHEELICKMAACPEKLDLNLAAAVHKEMFIMVQEERRLRKALLEKGITEAEREAFELLPDDERQCIKCKTTCFLSALACYDCPDGLVCLSHINDLCKCSSSRQYLRYRYTLDELPAMLHKLKVRAESFDTWANKVRVALEVEDGRKRSLEELRALESEARERRFPNSELLQQLKNCLSEAEACVSRALGLVSGQEAGPHRVAGLQMTLTELRAFLDQMNNLPCAMHQIGDVKGVLEQVEAYQAEAREALASLPSSPGLLQSLLERGRQLGVEVPEAQQLQRQVEQARWLDEVKRTLAPSARRGTLAVMRGLLVAGASVAPSPAVDKAQAELQELLTIAERWEEKAHLCLEARQKHPPATLEAIIREAENIPVHLPNIQALKEALAKARAWIADVDEIQNGDHYPCLDDLEGLVAVGRDLPVGLEELRQLELQVLTAHSWREKASKTFLKKNSCYTLLEVLCPCADAGSDSTKRSRWMEKELGLYKSDTELLGLSAQDLRDPGSVIVAFKEGEQKEKEGILQLRRTNSAKPSPLASSSTASSTTSICVCGQVLAGAGALQCDLCQDWFHGRCVSVPRLLSSPRPNPTSSPLLAWWEWDTKFLCPLCMRSRRPRLETILALLVALQRLPVRLPEGEALQCLTERAISWQGRARQALASEDVTALLGRLAELRQRLQAEPRPEEPPNYPAAPASDPLREGSGKDMPKVQGLLENGDSVTSPEKVAPEEGSGKRDLELLSSLLPQLTGPVLELPEATRAPLEELMMEGDLLEVTLDENHSIWQLLQAGQPPDLERIRTLLELEKAERHGSRARGRALERRRRRKVDRGGEGDDPAREELEPKRVRSSGPEAEEVQEEEELEEETGGEGPPAPIPTTGSPSTQENQNGLEPAEGTTSGPSAPFSTLTPRLHLPCPQQPPQQQL

SEQ ID NO: 9881 - protein, 1998 aa, Homo sapiens
MEQTVLVPPGPDSFNFFTRESLAAIERRIAEEKAKNPKPDKKDDDENGPKPNSDLEAGKNLPFIYGDIPPEMVSEPLEDLDPYYINKKTFIVLNKGKAIFRFSATSALYILTPFNPLRKIAIKILVHSLFSMLIMCTILTNCVFMTMSNPPDWTKNVEYTFTGIYTFESLIKIIARGFCLEDFTFLRDPWNWLDFTVITFAYVTEFVDLGNVSALRTFRVLRALKTISVIPGLKTIVGALIQSVKKLSDVMILTVFCLSVFALIGLQLFMGNLRNKCIQWPPTNASLEEHSIEKNITVNYNGTLINETVFEFDWKSYIQDSRYHYFLEGFLDALLCGNSSDAGQCPEGYMCVKAGRNPNYGYTSFDTFSWAFLSLFRLMTQDFWENLYQLTLRAAGKTYMIFFVLVIFLGSFYLINLILAVVAMAYEEQNQATLEEAEQKEAEFQQMIEQLKKQQEAAQQAATATASEHSREPSAAGRLSDSSSEASKLSSKSAKERRNRRKKRKQKEQSGGEEKDEDEFQKSESEDSIRRKGFRFSIEGNRLTYEKRYSSPHQSLLSIRGSLFSPRRNSRTSLFSFRGRAKDVGSENDFADDEHSTFEDNESRRDSLFVPRRHGERRNSNLSQTSRSSRMLAVFPANGKMHSTVDCNGVVSLVGGPSVPTSPVGQLLPEGTTTETEMRKRRSSSFHVSMDFLEDPSQRQRAMSIASILTNTVEELEESRQKCPPCWYKFSNIFLIWDCSPYWLKVKHVVNLVVMDPFVDLAITICIVLNTLFMAMEHYPMTDHFNNVLTVGNLVFTGIFTAEMFLKIIAMDPYYYFQEGWNIFDGFIVTLSLVELGLANVEGLSVLRSFRLLRVFKLAKSWPTLNMLIKIIGNSVGALGNLTLVLAIIVFIFAVVGMQLFGKSYKDCVCKIASDCQLPRWHMNDFFHSFLIVFRVLCGEWIETMWDCMEVAGQAMCLTVFMMVMVIGNLVVLNLFLALLLSSFSADNLAATDDDNEMNNLQIAVDRMHKGVAYVKRKIYEFIQQSFIRKQKILDEIKPLDDLNNKKDSCMSNHTAEIGKDLDYLKDVNGTTSGIGTGSSVEKYIIDESDYMSFINNPSLTVTVPIAVGESDFENLNTEDFSSESDLEESKEKLNESSSSSEGSTVDIGAPVEEQPVVEPEETLEPEACFTEGCVQRFKCCQINVEEGRGKQWWNLRRTCFRIVEHNWFETFIVFMILLSSGALAFEDIYIDQRKTIKTMLEYADKVFTYIFILEMLLKWVAYGYQTYFTNAWCWLDFLIVDVSLVSLTANALGYSELGAIKSLRTLRALRPLRALSRFEGMRVVVNALLGAIPSIMNVLLVCLIFWLIFSIMGVNLFAGKFYHCINTTTGDRFDIEDVNNHTDCLKLIERNETARWKNVKVNFDNVGFGYLSLLQVATFKGWMDIMYAAVDSRNVELQPKYEESLYMYLYFVIFIIFGSFFTLNLFIGVIIDNFNQQKKKFGGQDIFMTEEQKKYYNAMKKLGSKKPQKPIPRPGNKFQGMVFDFVTRQVFDISIMILICLNMVTMMVETDDQSEYVTTILSRINLVFIVLFTGECVLKLISLRHYYFTIGWNIFDFVVVILSIVGMFLAELIEKYFVSPTLFRVIRLARIGRILRLIKGAKGIRTLLFALMMSLPALFNIGLLLFLVMFIYAIFGMSNFAYVKREVGIDDMFNFETFGNSMICLFQITTSAGWDGLLAPILNSKPPDCDPNKVNPGSSVKGDCGNPSVGIFFFVSYIIISFLVVVNMYIAVILENFSVATEESAEPLSEDDFEMFYEVWEKFDPDATQFMEFEKLSQFAAALEPPLNLPQPNKLQLIAMDLPMVSGDRIHCLDILFAFTKRVLGESGEMDALRIQMEERFMASNPSKVSYQPITTTLKRKQEEVSAVIIQRAYRRHLLKRTVKQASFTYNKNKIKGGANLLIKEDMIIDRINENSITEKTDLTMSTAACPPSYDRVTKPIVEKHEQEGKDEKAKGK

SEQ ID NO: 9882 - protein, 366 aa, Homo sapiens
MAARTVIIDHGSGFLKAGTAGWNEPQMVFPNIVNYLPCKENPGPSYARRRVSLGIDICHPDTFSYPIERGRILNWEGVQYLWSFVLENHRREQEVPPVIITETPLREPADRKKMLEILFELLHVPSVLLADQLQMSLYASGLLTGVVVDSGYGLTRVQPFHQGRPLPASGKTLEFAGQDLSAYLLKSLFKEDCDRRCLFQLETVAVTQMNKCYVPQNLGEALDFRERQQSALDESNTYQLPDGSRVELTPMQRVAPEMFFSPQVFEQPGPSIPRAIVESVESCEISLRPLLVSHVMACGGNTLYPGFTKRLFRELMGDHVSSTKATVWEGSNRNFSVWLGASVVAHLSTYQSEWMSREEYGEHMRM

SEQ ID NO: 9883 - protein, 1052 aa, Homo sapiens
MLPSSSWGKRKLRGRLGWVRSDARGVMWARQEGLHHPHPHAVIRCPSSSSSSVSCSGDSEEEDMGLLEVSVSDIKPPAPELGPMPEGLSPQQVVRRHILGSIVQSEGSYVESLKRILQDYRNPLMEMEPKALSARKCQVVFFRVKEILHCHSMFQIALSSRVAEWDSTEKIGDLFVASFSKSMVLDVYSDYVNNFTSAMSIIKKACLTKPAFLEFLKRRQVCSPDRVTLYGLMVKPIQRFPQFILLLQDMLKNTPRGHPDRLSLQLALTELETLAEKLNEQKRLADQVAEIQQLTKSVSDRSSLNKLLTSGQRQLLLCETLTETVYGDRGQLIKSKERRVFLLNDMLVCANINFKGQLEISSLVPLGPKYVVKWNTALPQVQVVEVGQDGGTYDKDNVLIQHSGAKKASASGQAQNKVYLGPPRLFQELQDLQKDLAVVEQITLLISTLHGTYQNLNMTVAQDWCLALQRLMRVKEEEIHSANKCRLRLLLPGKPDKSGRPISFMVVFITPNPLSKISWVNRLHLAKIGLREENQPGWLCPDEDKKSKAPFWCPILACCIPAFSSRALSLQLGALVHSPVNCPLLGFSAVSTSLPQGYLWVGGGQEGAGGQVEIFSLNRPSPRTVKSFPLAAPVLCMEYIPELEEEAESRDESPTVADPSATVHPTICLGLQDGSILLYSSVDTGTQCLVSCRSPGLQPVLCLRHSPFHLLAGLQDGTLAAYPRTSGGVLWDLESPPVCLTVGPGPVRTLLSLEDAVWASCGPRVTVLEATTLQPQQSFEAHQDEAVSVTHMVKAGSGVWMAFSSGTSIRLFHTETLEHLQEINIATRTTFLLPGQKHLCVTSLLICQGLLWVGTDQGVIVLLPVPRLEGIPKITGKGMVSLNGHCGPVAFLAVATSILAPDILRSDQEEAEGPRAEEDKPDGQAHEPMPDSHVGRELTRKKGILLQYRLRSTAHLPGPLLSMREPAPADGAALEHSEEDGSIYEMADDPDIWVRSRPCARDAHRKEICSVAIISGGQGYRNFGSALGSSGRQAPCGETDSTLLIWQVPLML

SEQ ID NO: 9884 - protein, 1240 aa, Homo sapiens
MASSNPPPQPAIGDQLVPGVPGPSSEAEDDPGEAFEFDDSDDEEDTSAALGVPSLAPERDTDPPLIHLDSIPVTDPDPAAAPPGTGVPAWVSNGDAADAAFSGARHSSWKRKSSRRIDRFTFPALEEDVIYDDVPCESPDAHQPGAERNLLYEDAHRAGAPRQAEDLGWSSSEFESYSEDSGEEAKPEVEVEPAKHRVSFQPKMTQLMKAAKSGTKDGLEKTRMAVMRKVSFLHRKDVLGDSEEEDMGLLEVSVSDIKPPAPELGPMPEGLSPQQVVRRHILGSIVQSEGSYVESLKRILQDYRNPLMEMEPKALSARKCQVVFFRVKEILHCHSMFQIALSSRVAEWDSTEKIGDLFVASFSKSMVLDVYSDYVNNFTSAMSIIKKACLTKPAFLEFLKRRQVCSPDRVTLYGLMVKPIQRFPQFILLLQDMLKNTPRGHPDRLSLQLALTELETLAEKLNEQKRLADQVAEIQQLTKSVSDRSSLNKLLTSGQRQLLLCETLTETVYGDRGQLIKSKERRVFLLNDMLVCANINFKPANHRGQLEISSLVPLGPKYVVKWNTALPQVQVVEVGQDGGTYDKDNVLIQHSGAKKASASGQAQNKVYLGPPRLFQELQDLQKDLAVVEQITLLISTLHGTYQNLNMTVAQDWCLALQRLMRVKEEEIHSANKCRLRLLLPGKPDKSGRPISFMVVFITPNPLSKISWVNRLHLAKIGLREENQPGWLCPDEDKKSKAPFWCPILACCIPAFSSRALSLQLGALVHSPVNCPLLGFSAVSTSLPQGYLWVGGGQEGAGGQVEIFSLNRPSPRTVKSFPLAAPVLCMEYIPELEEEAESRDESPTVADPSATVHPTICLGLQDGSILLYSSVDTGTQCLVSCRSPGLQPVLCLRHSPFHLLAGLQDGTLAAYPRTSGGVLWDLESPPVCLTVGPGPVRTLLSLEDAVWASCGPRVTVLEATTLQPQQSFEAHQDEAVSVTHMVKAGSGVWMAFSSGTSIRLFHTETLEHLQEINIATRTTFLLPGQKHLCVTSLLICQGLLWVGTDQGVIVLLPVPRLEGIPKITGKGMVSLNGHCGPVAFLAVATSILAPDILRSDQEEAEGPRAEEDKPDGQAHEPMPDSHVGRELTRKKGILLQYRLRSTAHLPGPLLSMREPAPADGAALEHSEEDGSIYEMADDPDIWVRSRPCARDAHRKEICSVAIISGGQGYRNFGSALGSSGRQAPCGETDSTLLIWQVPLML

SEQ ID NO: 9885 - protein, 354 aa, Homo sapiens
MEKFKAAMLLGSVGDALGYRNVCKENSTVGMKIQEELQRSGGLDHLVLSPGEWPVSDNTIMHIATAEALTTDYWCLDDLYREMVRCYVEIVEKLPERRPDPATIEGCAQLKPNNYLLAWHTPFNEKGSGFGAATKAMCIGLRYWKPERLETLIEVSVECGRMTHNHPTGFLGSLCTALFVSFAAQGKPLVQWGRDMLRAVPLAEEYCRKTIRHTAEYQEHWFYFEAKWQFYLEERKISKDSENKAIFPDNYDAEEREKTYRKWSSEGRGGRRGHDAPMIAYDALLAAGNSWTELCHRAMFHGGESAATGTIAGCLFGLLYGLDLVPKGLYQDLEDKEKLEDLGAALYRLSTEEK

SEQ ID NO: 9886 - protein, 2005 aa, Homo sapiens
MAQSVLVPPGPDSFRFFTRESLAAIEQRIAEEKAKRPKQERKDEDDENGPKPNSDLEAGKSLPFIYGDIPPEMVSVPLEDLDPYYINKKTFIVLNKGKAISRFSATPALYILTPFNPIRKLAIKILVHSLFNMLIMCTILTNCVFMTMSNPPDWTKNVEYTFTGIYTFESLIKILARGFCLEDFTFLRDPWNWLDFTVITFAYVTEFVNLGNVSALRTFRVLRALKTISVIPGLKTIVGALIQSVKKLSDVMILTVFCLSVFALIGLQLFMGNLRNKCLQWPPDNSSFEINITSFFNNSLDGNGTTFNRTVSIFNWDEYIEDKSHFYFLEGQNDALLCGNSSDAGQCPEGYICVKAGRNPNYGYTSFDTFSWAFLSLFRLMTQDFWENLYQLTLRAAGKTYMIFFVLVIFLGSFYLINLILAVVAMAYEEQNQATLEEAEQKEAEFQQMLEQLKKQQEEAQAAAAAASAESRDFSGAGGIGVFSESSSVASKLSSKSEKELKNRRKKKKQKEQSGEEEKNDRVRKSESEDSIRRKGFRFSLEGSRLTYEKRFSSPHQSLLSIRGSLFSPRRNSRASLFSFRGRAKDIGSENDFADDEHSTFEDNDSRRDSLFVPHRHGERRHSNVSQASRASRVLPILPMNGKMHSAVDCNGVVSLVGGPSTLTSAGQLLPEGTTTETEIRKRRSSSYHVSMDLLEDPTSRQRAMSIASILTNTMEELEESRQKCPPCWYKFANMCLIWDCCKPWLKVKHLVNLVVMDPFVDLAITICIVLNTLFMAMEHYPMTEQFSSVLSVGNLVFTGIFTAEMFLKIIAMDPYYYFQEGWNIFDGFIVSLSLMELGLANVEGLSVLRSFRLLRVFKLAKSWPTLNMLIKIIGNSVGALGNLTLVLAIIVFIFAVVGMQLFGKSYKECVCKISNDCELPRWHMHDFFHSFLIVFRVLCGEWIETMWDCMEVAGQTMCLTVFMMVMVIGNLVVLNLFLALLLSSFSSDNLAATDDDNEMNNLQIAVGRMQKGIDFVKRKIREFIQKAFVRKQKALDEIKPLEDLNNKKDSCISNHTTIEIGKDLNYLKDGNGTTSGIGSSVEKYVVDESDYMSFINNPSLTVTVPIAVGESDFENLNTEEFSSESDMEESKEKLNATSSSEGSTVDIGAPAEGEQPEVEPEESLEPEACFTEDCVRKFKCCQISIEEGKGKLWWNLRKTCYKIVEHNWFETFIVFMILLSSGALAFEDIYIEQRKTIKTMLEYADKVFTYIFILEMLLKWVAYGFQVYFTNAWCWLDFLIVDVSLVSLTANALGYSELGAIKSLRTLRALRPLRALSRFEGMRVVVNALLGAIPSIMNVLLVCLIFWLIFSIMGVNLFAGKFYHCINYTTGEMFDVSVVNNYSECKALIESNQTARWKNVKVNFDNVGLGYLSLLQVATFKGWMDIMYAAVDSRNVELQPKYEDNLYMYLYFVIFIIFGSFFTLNLFIGVIIDNFNQQKKKFGGQDIFMTEEQKKYYNAMKKLGSKKPQKPIPRPANKFQGMVFDFVTKQVFDISIMILICLNMVTMMVETDDQSQEMTNILYWINLVFIVLFTGECVLKLISLRYYYFTIGWNIFDFVVVILSIVGMFLAELIEKYFVSPTLFRVIRLARIGRILRLIKGAKGIRTLLFALMMSLPALFNIGLLLFLVMFIYAIFGMSNFAYVKREVGIDDMFNFETFGNSMICLFQITTSAGWDGLLAPILNSGPPDCDPDKDHPGSSVKGDCGNPSVGIFFFVSYIIISFLVVVNMYIAVILENFSVATEESAEPLSEDDFEMFYEVWEKFDPDATQFIEFAKLSDFADALDPPLLIAKPNKVQLIAMDLPMVSGDRIHCLDILFAFTKRVLGESGEMDALRIQMEERFMASNPSKVSYEPITTTLKRKQEEVSAIIIQRAYRRYLLKQKVKKVSSIYKKDKGKECDGTPIKEDTLIDKLNENSTPEKTDMTPSTTSPPSYDSVTKPEKEKFEKDKSEKEDKGKDIRESKK

SEQ ID NO: 9887 - protein, 522 aa, Homo sapiens
MPRKKAAAAAWEEPSSGNGTARAGPRKRGGPAGRKRERPERCSSSSGGGSSGDEDGLELDGAPGGGKRAARPATAGKAGGAAVVITEPEHTKERVKLEGSKCKGQLLIFGATNWDLIGRKEVPKQQAAYRNLGQNLWGPHRYGCLAGVRVRTVVSGSCAAHSLLITTEGKLWSWGRNEKGQLGHGDTKRVEAPRLIEGLSHEVIVSAACGRNHTLALTETGSVFAFGENKMGQLGLGNQTDAVPSPAQIMYNGQPITKMACGAEFSMIMDCKGNLYSFGCPEYGQLGHNSDGKFIARAQRIEYDCELVPRRVAIFIEKTKDGQILPVPNVVVRDVACGANHTLVLDSQKRVFSWGFGGYGRLGHAEQKDEMVPRLVKLFDFPGRGASQIYAGYTCSFAVSEVGGLFFWGATNTSRESTMYPKAVQDLCGWRIRSLACGKSSIIVAADESTISWGPSPTFGELGYGDHKPKSSTAAQEVKTLDGIFSEQVAMGYSHSLVIARDESETEKEKIKKLPEYNPRTL

SEQ ID NO: 9888 - protein, 759 aa, Homo sapiens
MADEAPRKGSFSALVGRTNGLTKPAALAAAPAKPGGAGGSKKLVIKNFRDRPRLPDNYTQDTWRKLHEAVRAVQSSTSIRYNLEELYQAVENLCSHKVSPMLYKQLRQACEDHVQAQILPFREDSLDSVLFLKKINTCWQDHCRQMIMIRSIFLFLDRTYVLQNSTLPSIWDMGLELFRTHIISDKMVQSKTIDGILLLIERERSGEAVDRSLLRSLLGMLSDLQVYKDSFELKFLEETNCLYAAEGQRLMQEREVPEYLNHVSKRLEEEGDRVITYLDHSTQKPLIACVEKQLLGEHLTAILQKGLDHLLDENRVPDLAQMYQLFSRVRGGQQALLQHWSEYIKTFGTAIVINPEKDKDMVQDLLDFKDKVDHVIEVCFQKNERFVNLMKESFETFINKRPNKPAELIAKHVDSKLRAGNKEATDEELERTLDKIMILFRFIHGKDVFEAFYKKDLAKRLLVGKSASVDAEKSMLSKLKHECGAAFTSKLEGMFKDMELSKDIMVHFKQHMQNQSDSGPIDLTVNILTMGYWPTYTPMEVHLTPEMIKLQEVFKAFYLGKHSGRKLQWQTTLGHAVLKAEFKEGKKEFQVSLFQTLVLLMFNEGDGFSFEEIKMATGIEDSELRRTLQSLACGKARVLIKSPKGKEVEDGDKFIFNGEFKHKLFRIKINQIQMKETVEEQVSTTERVFQDRQYQIDAAIVRIMKMRKTLGHNLLVSELYNQLKFPVKPGDLKKRIESLIDRDYMERDKDNPNQYHYVA

SEQ ID NO: 9889 - protein, 659 aa, Homo sapiens
MLYKQLRQACEDHVQAQILPFREDSLDSVLFLKKINTCWQDHCRQMIMIRSIFLFLDRTYVLQNSTLPSIWDMGLELFRTHIISDKMVQSKTIDGILLLIERERSGEAVDRSLLRSLLGMLSDLQVYKDSFELKFLEETNCLYAAEGQRLMQEREVPEYLNHVSKRLEEEGDRVITYLDHSTQKPLIACVEKQLLGEHLTAILQKGLDHLLDENRVPDLAQMYQLFSRVRGGQQALLQHWSEYIKTFGTAIVINPEKDKDMVQDLLDFKDKVDHVIEVCFQKNERFVNLMKESFETFINKRPNKPAELIAKHVDSKLRAGNKEATDEELERTLDKIMILFRFIHGKDVFEAFYKKDLAKRLLVGKSASVDAEKSMLSKLKHECGAAFTSKLEGMFKDMELSKDIMVHFKQHMQNQSDSGPIDLTVNILTMGYWPTYTPMEVHLTPEMIKLQEVFKAFYLGKHSGRKLQWQTTLGHAVLKAEFKEGKKEFQVSLFQTLVLLMFNEGDGFSFEEIKMATGIEDSELRRTLQSLACGKARVLIKSPKGKEVEDGDKFIFNGEFKHKLFRIKINQIQMKETVEEQVSTTERVFQDRQYQIDAAIVRIMKMRKTLGHNLLVSELYNQLKFPVKPGDLKKRIESLIDRDYMERDKDNPNQYHYVA

SEQ ID NO: 9890 - protein, 693 aa, Homo sapiens
MDRPDEGPPAKTRRLSSSESPQRDPPPPPPPPPLLRLPLPPPQQRPRLQEETEAAQVLADMRGVGLGPALPPPPPYVILEEGGIRAYFTLGAECPGWDSTIESGYGEAPPPTESLEALPTPEASGGSLEIDFQVVQSSSFGGEGALETCSAVGWAPQRLVDPKSKEEAIIIVEDEDEDERESMRSSRRRRRRRRRKQRKVKRESRERNAERMESILQALEDIQLDLEAVNIKAGKAFLRLKRKFIQMRRPFLERRDLIIQHIPGFWVKAFLNHPRISILINRRDEDIFRYLTNLQVQDLRHISMGYKMKLYFQTNPYFTNMVIVKEFQRNRSGRLVSHSTPIRWHRGQEPQARRHGNQDASHSFFSWFSNHSLPEADRIAEIIKNDLWVNPLRYYLRERGSRIKRKKQEMKKRKTRGRCEVVIMEDAPDYYAVEDIFSEISDIDETIHDIKISDFMETTDYFETTDNEITDINENICDSENPDHNEVPNNETTDNNESADDHETTDNNESADDNNENPEDNNKNTDDNEENPNNNENTYGNNFFKGGFWGSHGNNQDSSDSDNEADEASDDEDNDGNEGDNEGSDDDGNEGDNEGSDDDDRDIEYYEKVIEDFDKDQADYEDVIEIISDESVEEEGIEEGIQQDEDIYEEGNYEEEGSEDVWEEGEDSDDSDLEDVLQVPNGWANPGKRGKTG

SEQ ID NO: 9891 - protein, 485 aa, Homo sapiens
MAAAPPLSKAEYLKRYLSGADAGVDRGSESGRKRRKKRPKPGGAGGKGMRIVDDDVSWTAISTTKLEKEEEEDDGDLPVVAEFVDERPEEVKQMEAFRSSAKWKLLGGHNEDLPSNRHFRHDTPDSSPRRVRHGTPDPSPRKDRHDTPDPSPRRARHDTPDPSPLRGARHDSDTSPPRRIRHDSSDTSPPRRARHDSPDPSPPRRPQHNSSGDCQKATDSDLSSPRHKQSPGHQDSDSDLSPPRNRPRHRSSDSDLSPPRRRQRTKSSDSDLSPPRRSQPPGKKAAHMYSGAKTGLVLTDIQREQQELKEQDQETMAFEAEFQYAETVFRDKSGRKRNLKLERLEQRRKAEKDSERDELYAQWGKGLAQSRQQQQNVEDAMKEMQKPLARYIDDEDLDRMLREQEREGDPMANFIKKNKAKENKNKKVRPRYSGPAPPPNRFNIWPGYRWDGVDRSNGFEQKRFARLASKKAVEELAYKWSVEDM

SEQ ID NO: 9892 - protein, 152 aa, Homo sapiens
MDSGTEEYELNGGLPPGTPGSPDASPARWGWRHGPINVNHYASKKSAAESMLDIALLMANASQLKAVVEQGPSFAFYVPLVVLISISLVLQIGVGVLLIFLVKYDLNNPAKHAKLDFLNNLATGLVFIIVVVNIFITAFGVQKPLMDMAPQQ

SEQ ID NO: 9893 - protein, 1128 aa, Homo sapiens
MDGRTPRPQDAPARRKPKAKAPLPPAETKYTDVSSAADSVESTAFIMEQKENMIDKDVELSVVLPGDIIKSTTVHGSKPMMDLLIFLCAQYHLNPSSYTIDLLSAEQNHIKFKPNTPIGMLEVEKVILKPKMLDKKKPTPIIPEKTVRVVINFKKTQKTIVRVSPHASLQELAPIICSKCEFDPLHTLLLKDYQSQEPLDLTKSLNDLGLRELYAMDVNRESCQISQNLDIMKEKENKGFFSFFQRSKKKRDQTASAPATPLVNKHRPTFTRSNTISKPYISNTLPSDAPKKRRAPLPPMPASQSVPQDLAHIQERPASCIVKSMSVDETDKSPCEAGRVRAGSLQLSSMSAGNSSLRRTKRKAPSPPSKIPPHQSDENSRVTALQPVDGVPPDSASEANSPEELSSPAGISSDYSLEEIDEKEELSEVPKVEAENISPKSQDIPFVSTDIINTLKNDPDSALGNGSGEFSQNSMEEKQETKSTDGQEPHSVVYDTSNGKKVVDSIRNLKSLGPNQENVVQNEIIVYPENTEDNMKNGVKKTEINVEGVAKNNNIDMEVERPSNSEAHETDTAISYKENHLAASSVPDQKLNQPSAEKTKDAAIQTTPSCNSFDGKHQDHNLSDSKVEECVQTSNNNISTQHSCLSSQDSVNTSREFRSQGTLIIHSEDPLTVKDPICAHGNDDLLPPVDRIDKNSTASYLKNYPLYRQDYNPKPKPSNEITREYIPKIGMTTYKIVPPKSLEISKDWQSETIEYKDDQDMHALGKKHTHENVKETAIQTEDSAISESPEEPLPNLKPKPNLRTEHQVPSSVSSPDDAMVSPLKPAPKMTRDTGTAPFAPNLEEINNILESKFKSRASNAQAKPSSFFLQMQKRVSGHYVTSAAAKSVHAAPNPAPKELTNKEAERDMLPSPEQTLSPLSKMPHSVPQPLVEKTDDDVIGQAPAEASPPPIAPKPVTIPASQVSTQNLKTLKTFGAPRPYSSSGPSPFALAVVKRSQSFSKERTESPSASALVQPPANTEEGKTHSVNKFVDIPQLGVSDKENNSAHNEQNSQIPTPTDGPSFTVMRQSSLTFQSSDPEQMRQSLLTAIRSGEAAAKLKRVTIPSNTISVNGRSRLSHSMSPDAQDGH

SEQ ID NO: 9894 - protein, 664 aa, Homo sapiens
MSLQRIVRVSLEHPTSAVCVAGVETLVDIYGSVPEGTEMFEVYGTPGVDIYISPNMERGRERADTRRWRFDATLEIIVVMNSPSNDLNDSHVQISYHSSHEPLPLAYAVLYLTCVDISLDCDLNCEGRQDRNFVDKRQWVWGPSGYGGILLVNCDRDDPSCDVQDNCDQHVHCLQDLEDMSVMVLRTQGPAALFDDHKLVLHTSSYDAKRAQVFHICGPEDVCEAYRHVLGQDKVSYEVPRLHGDEERFFVEGLSFPDAGFTGLISFHVTLLDDSNEDFSASPIFTDTVVFRVAPWIMTPSTLPPLEVYVCRVRNNTCFVDAVAELARKAGCKLTICPQAENRNDRWIQDEMELGYVQAPHKTLPVVFDSPRNGELQDFPYKRILGPDFGYVTREPRDRSVSGLDSFGNLEVSPPVVANGKEYPLGRILIGGNLPGSSGRRVTQVVRDFLHAQKVQPPVELFVDWLAVGHVDEFLSFVPAPDGKGFRMLLASPGACFKLFQEKQKCGHGRALLFQGVVDDEQVKTISINQVLSNKDLINYNKFVQSCIDWNREVLKRELGLAECDIIDIPQLFKTERKKATAFFPDLVNMLVLGKHLGIPKPFGPIINGCCCLEEKVRSLLEPLGLHCTFIDDFTPYHMLHGEVHCGTNVCRKPFSFKWWNMVP

SEQ ID NO: 9895 - protein, 544 aa, Homo sapiens
MKISMINYKSLLALLFILASWIIFTVFQNSTKVWSALNLSISLHYWNNSTKSLFPKTPLISLKPLTETELRIKEIIEKLDQQIPPRPFTHVNTTTSATHSTATILNPRDTYCRGDQLHILLEVRDHLGRRKQYGGDFLRARMSSPALMAGASGKVTDFNNGTYLVSFTLFWEGQVSLSLLLIHPSEGVSALWSARNQGYDRVIFTGQFVNGTSQVHSECGLILNTNAELCQYLDNRDQEGFYCVRPQHMPCAALTHMYSKNKKVSYLSKQEKSLFERSNVGVEIMEKFNTISVSKCNKETVAMKEKCKFGMTSTIPSGHVWRNTWNPVSCSLATVKMKECLRGKLIYLMGDSTIRQWMEYFKASINTLKSVDLHESGKLQHQLAVDLDRNINIQWQKYCYPLIGSMTYSVKEMEYLTRAIDRTGGEKNTVIVISLGQHFRPFPIDVFIRRALNVHKAIQHLLLRSPDTMVIIKTENIREMYNDAERFSDFHGYIQYLIIKDIFQDLSVSIIDAWDITIAYGTNNVHPPQHVVGNQINILLNYIC

SEQ ID NO: 9896 - protein, 614 aa, Homo sapiens
MWMAWCVAALSVVAVCGTSHETNTVLRVTKDVLSNAISGMLQQSDALHSALREVPLGVGDIPYNDFHVRGPPPVYTNGKKLDGIYQYGHIETNDNTAQLGGKYRYGEILESEGSIRDLRNSGYRSAENAYGGHRGLGRYRAAPVGRLHRRELQPGEIPPGVATGAVGPGGLLGTGGMLAADGILAGQGGLLGGGGLLGDGGLLGGGGVLGVLGEGGILSTVQGITGLRIVELTLPRVSVRLLPGVGVYLSLYTRVAINGKSLIGFLDIAVEVNITAKVRLTMDRTGYPRLVIERCDTLLGGIKVKLLRGLLPNLVDNLVNRVLADVLPDLLCPIVDVVLGLVNDQLGLVDSLIPLGILGSVQYTFSSLPLVTGEFLELDLNTLVGEAGGGLIDYPLGWPAVSPKPMPELPPMGDNTKSQLAMSANFLGSVLTLLQKQHALDLDITNGMFEELPPLTTATLGALIPKVFQQYPESCPLIIRIQVLNPPSVMLQKDKALVKVLATAEVMVSQPKDLETTICLIDVDTEFLASFSTEGDKLMIDAKLEKTSLNLRTSNVGNFDIGLMEVLVEKIFDLAFMPAMNAVLGSGVPLPKILNIDFSNADIDVLEDLLVLSA

SEQ ID NO: 9897 - protein, 665 aa, Homo sapiens
MLRERTVRLQYGSRVEAVYVLGTYLWTDVYSAAPAGAQTFSLKHSEHVWVEVVRDGEAEEVATNGKQRWLLSPSTTLRVTMSQASTEASSDKVTVNYYDEEGSIPIDQAGLFLTAIEISLDVDADRDGVVEKNNPKKASWTWGPEGQGAILLVNCDRETPWLPKEDCRDEKVYSKEDLKDMSQMILRTKGPDRLPAGYEIVLYISMSDSDKVGVFYVENPFFGQRYIHILGRRKLYHVVKYTGGSAELLFFVEGLCFPDEGFSGLVSIHVSLLEYMAQDIPLTPIFTDTVIFRIAPWIMTPNILPPVSVFVCCMKDNYLFLKEVKNLVEKTNCELKVCFQYLNRGDRWIQDEIEFGYIEAPHKGFPVVLDSPRDGNLKDFPVKELLGPDFGYVTREPLFESVTSLDSFGNLEVSPPVTVNGKTYPLGRILIGSSFPLSGGRRMTKVVRDFLKAQQVQAPVELYSDWLTVGHVDEFMSFVPIPGTKKFLLLMASTSACYKLFREKQKDGHGEAIMFKGLGGMSSKRITINKILSNESLVQENLYFQRCLDWNRDILKKELGLTEQDIIDLPALFKMDEDHRARAFFPNMVNMIVLDKDLGIPKPFGPQVEEECCLEMHVRGLLEPLGLECTFIDDISAYHKFLGEVHCGTNVRRKPFTFKWWHMVP

SEQ ID NO: 9898 - protein, 484 aa, Homo sapiens
MLGKLAMLLWVQQALLALLLPTLLAQGEARRSRNTTRPALLRLSDYLLTNYRKGVRPVRDWRKPTTVSIDVIVYAILNVDEKNQVLTTYIWYRQYWTDEFLQWNPEDFDNITKLSIPTDSIWVPDILINEFVDVGKSPNIPYVYIRHQGEVQNYKPLQVVTACSLDIYNFPFDVQNCSLTFTSWLHTIQDINISLWRLPEKVKSDRSVFMNQGEWELLGVLPYFREFSMESSNYYAEMKFYVVIRRRPLFYVVSLLLPSIFLMVMDIVGFYLPPNSGERVSFKITLLLGYSVFLIIVSDTLPATAIGTPLIGVYFVVCMALLVISLAETIFIVRLVHKQDLQQPVPAWLRHLVLERIAWLLCLREQSTSQRPPATSQATKTDDCSAMGNHCSHMGGPQDFEKSPRDRCSPPPPPREASLAVCGLLQELSSIRQFLEKRDEIREVARDWLRVGSVLDKLLFHIYLLAVLAYSITLVMLWSIWQYA

SEQ ID NO: 9899 - protein, 75 aa, Homo sapiens
MSWRGRRYRPRRCLRLAQLVGPMLEPSVPEPQQEEPPTESQDHTPGQKREDDQGAAEIQGTSILAQDKTQFSETG

SEQ ID NO: 9900 - protein, 824 aa, Homo sapiens
MSAPSEEEEYARLVMEAQPEWLRAEVKRLSHELAETTREKIQAAEYGLAVLEEKHQLKLQFEELEVDYEAIRSEMEQLKEAFGQAHTNHKKVAADGESREESLIQESASKEQYYVRKVLELQTELKQLRNVLTNTQSENERLASVAQELKEINQNVEIQRGRLRDDIKEYKFREARLLQDYSELEEENISLQKQVSVLRQNQVEFEGLKHEIKRLEEETEYLNSQLEDAIRLKEISERQLEEALETLKTEREQKNSLRKELSHYMSINDSFYTSHLHVSLDGLKFSDDAAEPNNDAEALVNGFEHGGLAKLPLDNKTSTPKKEGLAPPSPSLVSDLLSELNISEIQKLKQQLMQMEREKAGLLATLQDTQKQLEHTRGSLSEQQEKVTRLTENLSALRRLQASKERQTALDNEKDRDSHEDGDYYEVDINGPEILACKYHVAVAEAGELREQLKALRSTHEAREAQHAEEKGRYEAEGQALTEKVSLLEKASRQDRELLARLEKELKKVSDVAGETQGSLSVAQDELVTFSEELANLYHHVCMCNNETPNRVMLDYYREGQGGAGRTSPGGRTSPEARGRRSPILLPKGLLAPEAGRADGGTGDSSPSPGSSLPSPLSDPRREPMNIYNLIAIIRDQIKHLQAAVDRTTELSRQRIASQELGPAVDKDKEALMEEILKLKSLLSTKREQITTLRTVLKANKQTAEVALANLKSKYENEKAMVTETMMKLRNELKALKEDAATFSSLRAMFATRCDEYITQLDEMQRQLAAAEDEKKTLNSLLRMAIQQKLALTQRLELLELDHEQTRRGRAKAAPKTKPATPSL

SEQ ID NO: 9901 - protein, 1099 aa, Homo sapiens
MQSLGVSGNRKVMQSGTCEPFQSLSHQRNDEEAVVDRGGTRSILKTHFEKEDLEGHRTLFIGVHVPLGGRKSHRRHRHRGHKHRKRDRERDSGLEDGRESPSFDTPSQRVQFILGTEDDDEEHIPHDLFTELDEICWREGEDAEWRETARWLKFEEDVEDGGERWSKPYVATLSLHSLFELRSCILNGTVLLDMHANTLEEIADMVLDQQVSSGQLNEDVRHRVHEALMKQHHHQNQKKLTNRIPIVRSFADIGKKQSEPNSMDKNAGQVVSPQSAPACVENKNDVSRENSTVDFSKVDLHFMKKIPPGAEASNILVGELEFLDRTVVAFVRLSPAVLLQGLAEVPIPTRFLFILLGPLGKGQQYHEIGRSIATLMTDEVFHDVAYKAKDRNDLVSGIDEFLDQVTVLPPGEWDPSIRIEPPKNVPSQEKRKIPAVPNGTAAHGEAEPHGGHSGPELQRTGRIFGGLILDIKRKAPYFWSDFRDAFSLQCLASFLFLYCACMSPVITFGGLLGEATEGRISAIESLFGASMTGIAYSLFGGQPLTILGSTGPVLVFEKILFKFCKEYGLSYLSLRASIGLWTATLCIILVATDASSLVCYITRFTEEAFASLICIIFIYEALEKLFELSEAYPINMHNDLELLTQYSCNCVEPHNPSNGTLKEWRESNISASDIIWENLTVSECKSLHGEYVGRACGHDHPYVPDVLFWSVILFFSTVTLSATLKQFKTSRYFPTKVRSIVSDFAVFLTILCMVLIDYAIGIPSPKLQVPSVFKPTRDDRGWFVTPLGPNPWWTVIAAIIPALLCTILIFMDQQITAVIINRKEHKLKKGCGYHLDLLMVAVMLGVCSIMGLPWFVAATVLSITHVNSLKLESECSAPGEQPKFLGIREQRVTGLMIFILMGSSVFMTSILKFIPMPVLYGVFLYMGASSLKGIQFFDRIKLFWMPAKHQPDFIYLRHVPLRKVHLFTIIQMSCLGLLWIIKVSRAAIVFPMMVLALVFVRKLMDLLFTKRELSWLDDLMPESKKKKLEDAEKEEEQSMLAMEDEGTVQLPLEGHYRDDPSVINISDEMSKTALWRNLLITADNSKDKESSFPSKSSPS

SEQ ID NO: 9902 - protein, 122 aa, Homo sapiens
MPRSSRSPGDPGALLEDVAHNPRPRRIAQRGRNTSRMAEDTSPNMNDNILLPVRNNDQALGLTQCMLGCVYASCCARSSWRRQAFCSSVLSVCPRALPSPRWRYPWALALIIGHWARHCTAT

SEQ ID NO: 9903 - protein, 354 aa, Homo sapiens
MPRSSRSPGDPGALLEDVAHNPRPRRIAQRGRNTSRMAEDTSPNMTWFTCFACSLRTQAQQVLFNTCRCKLLCQKLMEKTGILLLCAFGFWMFSIHLPSKMKVWQDDSINGPLQSLRLYQEKVRHHSGEIQDLRGSMNQLIAKLQEMEAMSDEQKMAQKIMKMIHGDYIEKPDFALKSIGASIDFEHTSVTYNHEKAHSYWNWIQLWNYAQPPDVILEPNVTPGNCWAFEGDRGQVTIQLAQKVYLSNLTLQHIPKTISLSGSLDTAPKDFVIYGMEGSPKEEVFLGAFQFQPENIIQMFPLQNQPARAFSAVKVKISSNWGNPGFTCLYRVRVHGSVAPPREQPHQNPYPKRD

SEQ ID NO: 9904 - protein, 1233 aa, Homo sapiens
MRGLPRGRGLMRARGRGRAAPPGSRGRGRGGPHRGRGRPRSLLSLPRAQASWTPQLSTGLTSPPVPCLPSQGEAPAEMGALLLEKETRGATERVHGSLGDTPRSEETLPKATPDSLEPAGPSSPASVTVTVGDEGADTPVGATPLIGDESENLEGDGDLRGGRILLGHATKSFPSSPSKGGSCPSRAKMSMTGAGKSPPSVQSLAMRLLSMPGAQGAAAAGSEPPPATTSPEGQPKVHRARKTMSKPGNGQPPVPEKRPPEIQHFRMSDDVHSLGKVTSDLAKRRKLNSGGGLSEELGSARRSGEVTLTKGDPGSLEEWETVVGDDFSLYYDSYSVDERVDSDSKSEVEALTEQLSEEEEEEEEEEEEEEEEEEEEEEEEDEESGNQSDRSGSSGRRKAKKKWRKDSPWVKPSRKRRKREPPRAKEPRGVSNDTSSLETERGFEELPLCSCRMEAPKIDRISERAGHKCMATESVDGELSGCNAAILKRETMRPSSRVALMVLCETHRARMVKHHCCPGCGYFCTAGTFLECHPDFRVAHRFHKACVSQLNGMVFCPHCGEDASEAQEVTIPRGDGVTPPAGTAAPAPPPLSQDVPGRADTSQPSARMRGHGEPRRPPCDPLADTIDSSGPSLTLPNGGCLSAVGLPLGPGREALEKALVIQESERRKKLRFHPRQLYLSVKQGELQKVILMLLDNLDPNFQSDQQSKRTPLHAAAQKGSVEICHVLLQAGANINAVDKQQRTPLMEAVVNNHLEVARYMVQRGGCVYSKEEDGSTCLHHAAKIGNLEMVSLLLSTGQVDVNAQDSGGWTPIIWAAEHKHIEVIRMLLTRGADVTLTDNEENICLHWASFTGSAAIAEVLLNARCDLHAVNYHGDTPLHIAARESYHDCVLLFLSRGANPELRNKEGDTAWDLTPERSDVWFALQLNRKLRLGVGNRAIRTEKIICRDVARGYENVPIPCVNGVDGEPCPEDYKYISENCETSTMNIDRNITHLQHCTCVDDCSSSNCLCGQLSIRCWYDKDGRLLQEFNKIEPPLIFECNQACSCWRNCKNRVVQSGIKVRLQLYRTAKMGWGVRALQTIPQGTFICEYVGELISDAEADVREDDSYLFDLDNKDGEVYCIDARYYGNISRFINHLCDPNIIPVRVFMLHQDLRFPRIAFFSSRDIRTGEELGFDYGDRFWDIKSKYFTCQCGSEKCKHSAEAIALEQSRLARLDPHPELLPELGSLPPVNT

SEQ ID NO: 9905 - protein, 1176 aa, Homo sapiens
MAAAAGAAAAAAAEGEAPAEMGALLLEKETRGATERVHGSLGDTPRSEETLPKATPDSLEPAGPSSPASVTVTVGDEGADTPVGATPLIGDESENLEGDGDLRGGRILLGHATKSFPSSPSKGGSCPSRAKMSMTGAGKSPPSVQSLAMRLLSMPGAQGAAAAGSEPPPATTSPEGQPKVHRARKTMSKPGNGQPPVPEKRPPEIQHFRMSDDVHSLGKVTSDLAKRRKLNSGGGLSEELGSARRSGEVTLTKGDPGSLEEWETVVGDDFSLYYDSYSVDERVDSDSKSEVEALTEQLSEEEEEEEEEEEEEEEEEEEEEEEEDEESGNQSDRSGSSGRRKAKKKWRKDSPWVKPSRKRRKREPPRAKEPRGVSNDTSSLETERGFEELPLCSCRMEAPKIDRISERAGHKCMATESVDGELSGCNAAILKRETMRPSSRVALMVLCETHRARMVKHHCCPGCGYFCTAGTFLECHPDFRVAHRFHKACVSQLNGMVFCPHCGEDASEAQEVTIPRGDGVTPPAGTAAPAPPPLSQDVPGRADTSQPSARMRGHGEPRRPPCDPLADTIDSSGPSLTLPNGGCLSAVGLPLGPGREALEKALVIQESERRKKLRFHPRQLYLSVKQGELQKVILMLLDNLDPNFQSDQQSKRTPLHAAAQKGSVEICHVLLQAGANINAVDKQQRTPLMEAVVNNHLEVARYMVQRGGCVYSKEEDGSTCLHHAAKIGNLEMVSLLLSTGQVDVNAQDSGGWTPIIWAAEHKHIEVIRMLLTRGADVTLTDNEENICLHWASFTGSAAIAEVLLNARCDLHAVNYHGDTPLHIAARESYHDCVLLFLSRGANPELRNKEGDTAWDLTPERSDVWFALQLNRKLRLGVGNRAIRTEKIICRDVARGYENVPIPCVNGVDGEPCPEDYKYISENCETSTMNIDRNITHLQHCTCVDDCSSSNCLCGQLSIRCWYDKDGRLLQEFNKIEPPLIFECNQACSCWRNCKNRVVQSGIKVRLQLYRTAKMGWGVRALQTIPQGTFICEYVGELISDAEADVREDDSYLFDLDNKDGEVYCIDARYYGNISRFINHLCDPNIIPVRVFMLHQDLRFPRIAFFSSRDIRTGEELGFDYGDRFWDIKSKYFTCQCGSEKCKHSAEAIALEQSRLARLDPHPELLPELGSLPPVNT

SEQ ID NO: 9906 - protein, 1210 aa, Homo sapiens
MAAAAGAAAAAAAEGEAPAEMGALLLEKETRGATERVHGSLGDTPRSEETLPKATPDSLEPAGPSSPASVTVTVGDEGADTPVGATPLIGDESENLEGDGDLRGGRILLGHATKSFPSSPSKGGSCPSRAKMSMTGAGKSPPSVQSLAMRLLSMPGAQGAAAAGSEPPPATTSPEGQPKVHRARKTMSKPGNGQPPVPEKRPPEIQHFRMSDDVHSLGKVTSDLAKRRKLNSGGGLSEELGSARRSGEVTLTKGDPGSLEEWETVVGDDFSLYYDSYSVDERVDSDSKSEVEALTEQLSEEEEEEEEEEEEEEEEEEEEEEEEDEESGNQSDRSGSSGRRKAKKKWRKDSPWVKPSRKRRKREPPRAKEPRGVNGVGSSGPSEYMEVPLGSLELPSEGTLSPNHAGVSNDTSSLETERGFEELPLCSCRMEAPKIDRISERAGHKCMATESVDGELSGCNAAILKRETMRPSSRVALMVLCETHRARMVKHHCCPGCGYFCTAGTFLECHPDFRVAHRFHKACVSQLNGMVFCPHCGEDASEAQEVTIPRGDGVTPPAGTAAPAPPPLSQDVPGRADTSQPSARMRGHGEPRRPPCDPLADTIDSSGPSLTLPNGGCLSAVGLPLGPGREALEKALVIQESERRKKLRFHPRQLYLSVKQGELQKVILMLLDNLDPNFQSDQQSKRTPLHAAAQKGSVEICHVLLQAGANINAVDKQQRTPLMEAVVNNHLEVARYMVQRGGCVYSKEEDGSTCLHHAAKIGNLEMVSLLLSTGQVDVNAQDSGGWTPIIWAAEHKHIEVIRMLLTRGADVTLTDNEENICLHWASFTGSAAIAEVLLNARCDLHAVNYHGDTPLHIAARESYHDCVLLFLSRGANPELRNKEGDTAWDLTPERSDVWFALQLNRKLRLGVGNRAIRTEKIICRDVARGYENVPIPCVNGVDGEPCPEDYKYISENCETSTMNIDRNITHLQHCTCVDDCSSSNCLCGQLSIRCWYDKDGRLLQEFNKIEPPLIFECNQACSCWRNCKNRVVQSGIKVRLQLYRTAKMGWGVRALQTIPQGTFICEYVGELISDAEADVREDDSYLFDLDNKDGEVYCIDARYYGNISRFINHLCDPNIIPVRVFMLHQDLRFPRIAFFSSRDIRTGEELGFDYGDRFWDIKSKYFTCQCGSEKCKHSAEAIALEQSRLARLDPHPELLPELGSLPPVNT

SEQ ID NO: 9907 - protein, 2017 aa, Homo sapiens
MSLGLAGAQEVELTLETVIQTLESSVLCQEKGLGARDLAQDAQITSLPALIREIVTRNLSQPESPVLLPATEMASLLSLQEENQLLQQELSRVEDLLAQSRAERDELAIKYNAVSERLEQALRLEPGELETQEPRGLVRQSVELRRQLQEEQASYRRKLQAYQEGQQRQAQLVQRLQGKILQYKKRCSELEQQLLERSGELEQQRLRDTEHSQDLESALIRLEEEQQRSASLAQVNAMLREQLDQAGSANQALSEDIRKVTNDWTRCRKELEHREAAWRREEESFNAYFSNEHSRLLLLWRQVVGFRRLVSEVKMFTERDLLQLGGELARTSRAVQEAGLGLSTGLRLAESRAEAALEKQALLQAQLEEQLRDKVLREKDLAQQQMQSDLDKADLSARVTELGLAVKRLEKQNLEKDQVNKDLTEKLEALESLRLQEQAALETEDGEGLQQTLRDLAQAVLSDSESGVQLSGSERTADASNGSLRGLSGQRTPSPPRRSSPGRGRSPRRGPSPACSDSSTLALIHSALHKRQLQVQDMRGRYEASQDLLGTLRKQLSDSESERRALEEQLQRLRDKTDGAMQAHEDAQREVQRLRSANELLSREKSNLAHSLQVAQQQAEELRQEREKLQAAQEELRRQRDRLEEEQEDAVQDGARVRRELERSHRQLEQLEGKRSVLAKELVEVREALSRATLQRDMLQAEKAEVAEALTKAEAGRVELELSMTKLRAEEASLQDSLSKLSALNESLAQDKLDLNRLVAQLEEEKSALQGRQRQAEQEATVAREEQERLEELRLEQEVARQGLEGSLRVAEQAQEALEQQLPTLRHERSQLQEQLAQLSRQLSGREQELEQARREAQRQVEALERAAREKEALAKEHAGLAVQLVAAEREGRTLSEEATRLRLEKEALEGSLFEVQRQLAQLEARREQLEAEGQALLLAKETLTGELAGLRQQIIATQEKASLDKELMAQKLVQAEREAQASLREQRAAHEEDLQRLQREKEAAWRELEAERAQLQSQLQREQEELLARLEAEKEELSEEIAALQQERDEGLLLAESEKQQALSLKESEKTALSEKLMGTRHSLATISLEMERQKRDAQSRQEQDRSTVNALTSELRDLRAQREEAAAAHAQEVRRLQEQARDLGKQRDSCLREAEELRTQLRLLEDARDGLRRELLEAQRKLRESQEGREVQRQEAGELRRSLGEGAKEREALRRSNEELRSAVKKAESERISLKLANEDKEQKLALLEEARTAVGKEAGELRTGLQEVERSRLEARRELQELRRQMKMLDSENTRLGRELAELQGRLALGERAEKESRRETLGLRQRLLKGEASLEVMRQELQVAQRKLQEQEGEFRTRERRLLGSLEEARGTEKQQLDHARGLELKLEAARAEAAELGLRLSAAEGRAQGLEAELARVEVQRRAAEAQLGGLRSALRRGLGLGRAPSPAPRPVPGSPARDAPAEGSGEGLNSPSTLECSPGSQPPSPGPATSPASPDLDPEAVRGALREFLQELRSAQRERDELRTQTSALNRQLAEMEAERDSATSRARQLQKAVAESEEARRSVDGRLSGVQAELALQEESVRRSERERRATLDQVATLERSLQATESELRASQEKISKMKANETKLEGDKRRLKEVLDASESRTVKLELQRRSLEGELQRSRLGLSDREAQAQALQDRVDSLQRQVADSEVKAGTLQLTVERLNGALAKVEESEGALRDKVRGLTEALAQSSASLNSTRDKNLHLQKALTACEHDRQVLQERLDAARQALSEARKQSSSLGEQVQTLRGEVADLELQRVEAEGQLQQLREVLRQRQEGEAAALNTVQKLQDERRLLQERLGSLQRALAQLEAEKREVERSALRLEKDRVALRRTLDKVEREKLRSHEDTVRLSAEKGRLDRTLTGAELELAEAQRQIQQLEAQVVVLEQSHSPAQLEVDAQQQQLELQQEVERLRSAQAQTERTLEARERAHRQRVRGLEEQVSTLKGQLQQELRRSSAPFSPPSGPPEK

SEQ ID NO: 9908 - protein, 332 aa, Homo sapiens
MGRPLHLVLLSASLAGLLLLGESLFIRREQANNILARVTRANSFLEEMKKGHLERECMEETCSYEEAREVFEDSDKTNEFWNKYKDGDQCETSPCQNQGKCKDGLGEYTCTCLEGFEGKNCELFTRKLCSLDNGDCDQFCHEEQNSVVCSCARGYTLADNGKACIPTGPYPCGKQTLERRKRSVAQATSSSGEAPDSITWKPYDAADLDPTENPFDLLDFNQTQPERGDNNLTRIVGGQECKDGECPWQALLINEENEGFCGGTILSEFYILTAAHCLYQAKRFKGTGTRSRRRAVRRCTRWRWSSSTTGSQRRPMTSTSPCSGSRPPSPSA

SEQ ID NO: 9909 - protein, 488 aa, Homo sapiens
MGRPLHLVLLSASLAGLLLLGESLFIRREQANNILARVTRANSFLEEMKKGHLERECMEETCSYEEAREVFEDSDKTNEFWNKYKDGDQCETSPCQNQGKCKDGLGEYTCTCLEGFEGKNCELFTRKLCSLDNGDCDQFCHEEQNSVVCSCARGYTLADNGKACIPTGPYPCGKQTLERRKRSVAQATSSSGEAPDSITWKPYDAADLDPTENPFDLLDFNQTQPERGDNNLTRIVGGQECKDGECPWQALLINEENEGFCGGTILSEFYILTAAHCLYQAKRFKVRVGDRNTEQEEGGEAVHEVEVVIKHNRFTKETYDFDIAVLRLKTPITFRMNVAPACLPERDWAESTLMTQKTGIVSGFGRTHEKGRQSTRLKMLEVPYVDRNSCKLSSSFIITQNMFCAGYDTKQEDACQGDSGGPHVTRFKDTYFVTGIVSWGEGCARKGKYGIYTKVTAFLKWIDRSMKTRGLPKAKSHAPEVITSSPLK

SEQ ID NO: 9910 - protein, 668 aa, Homo sapiens
MGGKQRDEDDEAYGKPVKYDPSFRGPIKNRSCTDVICCVLFLLFILGYIVVGIVAWLYGDPRQVLYPRNSTGAYCGMGENKDKPYLLYFNIFSCILSSNIISVAENGLQCPTPQTVITSLQQELCPSFLLPSAPALGRCFPWTNVTPPALPGITNDTTIQQGISGLIDSLNARDISVKIFEDFAQSWYWILVALGVALVLSLLFILLLRLVAGPLVLVLILGVLGVLAYGIYYCWEEYRVLRDKGASISQLGFTTNLSAYQSVQETWLAALIVLAVLEAILLLMLIFLRQRIRIAIALLKEASKAVGQMMSTMFYPLVTFVLLLICIAYWAMTALYLATSGQPQYVLWASNISSPGCEKVPINTSCNPTAHLVNSSCPGLMCVFQGYSSKGLIQRSVFNLQIYGVLGLFWTLNWVLALGQCVLAGAFASFYWAFHKPQDIPTFPLISAFIRTLRYHTGSLAFGALILTLVQIARVILEYIDHKLRGVQNPVARCIMCCFKCCLWCLEKFIKFLNRNAYIMIAIYGKNFCVSAKNAFMLLMRNIVRVVVLDKVTDLLLFFGKLLVVGGVGVLSFFFFSGRIPGLGKDFKSPHLNYYWLPIMTSILGAYVIASGFFSVFGMCVDTLFLCFLEDLERNNGSLDRPYYMSKSLLKILGKKNEAPPDNKKRKK

SEQ ID NO: 9911 - protein, 466 aa, Homo sapiens
MVSQALRLLCLLLGLQGCLAAGGVAKASGGETRDMPWKPGPHRVFVTQEEAHGVLHRRRRANAFLEELRPGSLERECKEEQCSFEEAREIFKDAERTKLFWISYSDGDQCASSPCQNGGSCKDQLQSYICFCLPAFEGRNCETHKDDQLICVNENGGCEQYCSDHTGTKRSCRCHEGYSLLADGVSCTPTVEYPCGKIPILEKRNASKPQGRIVGGKVCPKGECPWQVLLLVNGAQLCGGTLINTIWVVSAAHCFDKIKNWRNLIAVLGEHDLSEHDGDEQSRRVAQVIIPSTYVPGTTNHDIALLRLHQPVVLTDHVVPLCLPERTFSERTLAFVRFSLVSGWGQLLDRGATALELMVLNVPRLMTQDCLQQSRKVGDSPNITEYMFCAGYSDGSKDSCKGDSGGPHATHYRGTWYLTGIVSWGQGCATVGHFGVYTRVSQYIEWLQKLMRSEPRPGVLLRAPFP

SEQ ID NO: 9912 - protein, 717 aa, Homo sapiens
MASSSDSEDDSFMAVDQEETVLEGTMDQDEEPHPVLEAEETRHNRSMSELPEEVLEYILSFLSPYQEHKTAALVCKQWYRLIKGVAHQCYHGFMKAVQEGNIQWESRTYPYPGTPITQRFSHSACYYDANQSMYVFGGCTQSSCNAAFNDLWRLDLNSKEWIRPLASGSYPSPKAGATLVVYKDLLVLFGGWTRPSPYPLHQPERFFDEIHTYSPSKNWWNCIVTTHGPPPMAGHSSCVIDDKMIVFGGSLGSRQMSNDVWVLDLEQWAWSKPNISGPSPHPRGGQSQIVIDDATILILGGCGGPNALFKDAWLLHMHSGPWAWQPLKVENEEHGAPELWCHPACRVGQCVVVFSQAPSGRAPLSPSLNSRPSPISATPPALVPETREYRSQSPVRSMDEAPCVNGRWGTLRPRAQRQTPSGSREGSLSPARGDGSPILNGGSLSPGTAAVGGSSLDSPVQAISPSTPSAPEGYDLKIGLSLAPRRGSLPDQKDLRLGSIDLNWDLKPASSSNPMDGMDNRTVGGSMRHPPEQTNGVHTPPHVASALAGAVSPGALRRSLEAIKAMSSKGPSASAALSPPLGSSPGSPGSQSLSSGETVPIPRPGPAQGDGHSLPPIARRLGHHPPQSLNVGKPLYQSMNCKPMQMYVLDIKDTKEKGRVKWKVFNSSSVVGPPETSLHTVVQGRGELIIFGGLMDKKQNVKYYPKTNALYFVRAKR

SEQ ID NO: 9913 - protein, 984 aa, Homo sapiens
MTVRRLSLLCRDLWALWLLLKAGADEIMHQDIVPLCAADIQDQLKKRFAYLSGGRGQDGSPVITFPDYPAFSEIPDKEFQNVMTYLTSIPSLQDAGIGFILVIDRRRDKWTSVKASVLRIAASFPANLQLVLVLRPTGFFQRTLSDIAFKFNRDDFKMKVPVIMLSSVPDLHGYIDKSQLTEDLGGTLDYCHSRWLCQRTAIESFALMVKQTAQMLQSFGTELAETELPNDVQSTSSVLCAHTEKKDKAKEDLRLALKEGHSVLESLRELQAEGSEPSVNQDQLDNQATVQRLLAQLNETEAAFDEFWAKHQQKLEQCLQLRHFEQGFREVKAILDAASQKIATFTDIGNSLAHVEHLLRDLASFEEKSGVAVERARALSLDGEQLIGNKHYAVDSIRPKCQELRHLCDQFSAEIARRRGLLSKSLELHRRLETSMKWCDEGIYLLASQPVDKCQSQDGAEAALQEIEKFLETGAENKIQELNAIYKEYESILNQDLMEHVRKVFQKQASMEEVFHRRQASLKKLAARQTRPVQPVAPRPEALAKSPCPSPGIRRGSENSSSEGGALRRGPYRRAKSEMSESRQGRGSAGEEEESLAILRRHVMSELLDTERAYVEELLCVLEGYAAEMDNPLMAHLLSTGLHNKKDVLFGNMEEIYHFHNRIFLRELENYTDCPELVGRCFLERMEDFQIYEKYCQNKPRSESLWRQCSDCPFFQECQRKLDHKLSLDSYLLKPVQRITKYQLLLKEMLKYSRNCEGAEDLQEALSSILGILKAVNDSMHLIAITGYDGNLGDLGKLLMQGSFSVWTDHKRGHTKVKELARFKPMQRHLFLHEKAVLFCKKREENGEGYEKAPSYSYKQSLNMAAVGITENVKGDAKKFEIWYNAREEVYIVQAPTPEIKAAWVNEIRKVLTSQLQACREASQHRALEQSQSLPLPAPTSTSPSRGNSRNIKKLEERKTDPLSLEGYVSSAPLTKPPEKGKEP

SEQ ID NO: 9914 - protein, 258 aa, Homo sapiens
MARPPVPGSVVVPNWHESAEGKEYLACILRKNRRRVFGLLERPVLLPPVSIDTASYKIFVSGKSGVGKTALVAKLAGLEVPVVHHETTGIQTTVVFWPAKLQASSRVVMFRFEFWDCGESALKKFDHMLLACMENTDAFLFLFSFTDRASFEDLPGQLARIAGEAPGVVRMVIGSKFDQYMHTDVPERDLTAFRQAWELPLLRVKSVPGRRLADGRTLDGRAGLADVAHILNGLAEQLWHQDQVAAGLLPNPPESAPE

SEQ ID NO: 9915 - protein, 1123 aa, Homo sapiens
MTVRRLSLLCRDLWALWLLLKAGADEIMHQDIVPLCAADIQDQLKKRFAYLSGGRGQDGSPVITFPDYPAFSEIPDKEFQNVMTYLTSIPSLQDAGIGFILVIDRRRDKWTSVKASVLRIAASFPANLQLVLVLRPTGFFQRTLSDIAFKFNRDDFKMKVPVIMLSSVPDLHGYIDKSQLTEDLGGTLDYCHSRWLCQRTAIESFALMVKQTAQMLQSFGTELAETELPNDVQSTSSVLCAHTEKKDKAKEDLRLALKEGHSVLESLRELQAEGSEPSVNQDQLDNQATVQRLLAQLNETEAAFDEFWAKHQQKLEQCLQLRHFEQGFREVKAILDAASQKIATFTDIGNSLAHVEHLLRDLASFEEKSGVAVERARALSLDGEQLIGNKHYAVDSIRPKCQELRHLCDQFSAEIARRRGLLSKSLELHRRLETSMKWCDEGIYLLASQPVDKCQSQDGAEAALQEIEKFLETGAENKIQELNAIYKEYESILNQDLMEHVRKVFQKQASMEEVFHRRQASLKKLAARQTRPVQPVAPRPEALAKSPCPSPGIRRGSENSSSEGGALRRGPYRRAKSEMSESRQGRGSAGEEEESLAILRRHVMSELLDTERAYVEELLCVLEGYAAEMDNPLMAHLLSTGLHNKKDVLFGNMEEIYHFHNRIFLRELENYTDCPELVGRCFLERMEDFQIYEKYCQNKPRSESLWRQCSDCPFFQECQRKLDHKLSLDSYLLKPVQRITKYQLLLKEMLKYSRNCEGAEDLQEALSSILGILKAVNDSMHLIAITGYDGNLGDLGKLLMQGSFSVWTDHKRGHTKVKELARFKPMQRHLFLHEKAVLFCKKREENGEGYEKAPSYSYKQSLNMAAVGITENVKGDAKKFEIWYNAREEVYIVQAPTPEIKAAWVNEIRKVLTSQLQACREASQHRALEQSQSLPLPAPTSTSPSRGNSRNIKKLEERKTDPLSLEGYVSSAPLTKPPEKGKGWSKTSHSLEAPEDDGGWSSAEEQINSSDAEEDGGLGPKKLVPGKYTVVADHEKGGPDALRVRSGDVVELVQEGDEGLWYVRDPTTGKEGWVPASSLSVRLGPSGSAQCLSSSESSPGSAVLSNSSSCSEGGQAPFSDLQG

SEQ ID NO: 9916 - protein, 1137 aa, Homo sapiens
MFDCWRFILCKRPGSNSYSSPQRPNEAKKEETDHQIDVSDVIRLVQDTPEATAMATDEIMHQDIVPLCAADIQDQLKKRFAYLSGGRGQDGSPVITFPDYPAFSEIPDKEFQNVMTYLTSIPSLQDAGIGFILVIDRRRDKWTSVKASVLRIAASFPANLQLVLVLRPTGFFQRTLSDIAFKFNRDDFKMKVPVIMLSSVPDLHGYIDKSQLTEDLGGTLDYCHSRWLCQRTAIESFALMVKQTAQMLQSFGTELAETELPNDVQSTSSVLCAHTEKKDKAKEDLRLALKEGHSVLESLRELQAEGSEPSVNQDQLDNQATVQRLLAQLNETEAAFDEFWAKHQQKLEQCLQLRHFEQGFREVKAILDAASQKIATFTDIGNSLAHVEHLLRDLASFEEKSGVAVERARALSLDGEQLIGNKHYAVDSIRPKCQELRHLCDQFSAEIARRRGLLSKSLELHRRLETSMKWCDEGIYLLASQPVDKCQSQDGAEAALQEIEKFLETGAENKIQELNAIYKEYESILNQDLMEHVRKVFQKQASMEEVFHRRQASLKKLAARQTRPVQPVAPRPEALAKSPCPSPGIRRGSENSSSEGGALRRGPYRRAKSEMSESRQGRGSAGEEEESLAILRRHVMSELLDTERAYVEELLCVLEGYAAEMDNPLMAHLLSTGLHNKKDVLFGNMEEIYHFHNRIFLRELENYTDCPELVGRCFLERMEDFQIYEKYCQNKPRSESLWRQCSDCPFFQECQRKLDHKLSLDSYLLKPVQRITKYQLLLKEMLKYSRNCEGAEDLQEALSSILGILKAVNDSMHLIAITGYDGNLGDLGKLLMQGSFSVWTDHKRGHTKVKELARFKPMQRHLFLHEKAVLFCKKREENGEGYEKAPSYSYKQSLNMAAVGITENVKGDAKKFEIWYNAREEVYIVQAPTPEIKAAWVNEIRKVLTSQLQACREASQHRALEQSQSLPLPAPTSTSPSRGNSRNIKKLEERKTDPLSLEGYVSSAPLTKPPEKGKGWSKTSHSLEAPEDDGGWSSAEEQINSSDAEEDGGLGPKKLVPGKYTVVADHEKGGPDALRVRSGDVVELVQEGDEGLWYVRDPTTGKEGWVPASSLSVRLGPSGSAQCLSSSGKAHVPRAHP

SEQ ID NO: 9917 - protein, 1191 aa, Homo sapiens
MDCSLVRTLVHRYCAGEENWVDSRTIYVGHREPPPGAEAYIPQRYPDNRIVSSKYTFWNFIPKNLFEQFRRVANFYFLIIFLVQLIIDTPTSPVTSGLPLFFVITVTAIKQGYEDWLRHKADNAMNQCPVHFIQHGKLVRKQSRKLRVGDIVMVKEDETFPCDLIFLSSNRGDGTCHVTTASLDGESSHKTHYAVQDTKGFHTEEDIGGLHATIECEQPQPDLYKFVGRINVYSDLNDPVVRPLGSENLLLRGATLKNTEKIFGVAIYTGMETKMALNYQSKSQKRSAVEKSMNAFLIVYLCILISKALINTVLKYMWQSEPFRDEPWYNQKTESERQRNLFLKAFTDFLAFMVLFNYIIPVSMYVTVEMQKFLGSYFITWDEDMFDEETGEGPLVNTSDLNEELGQVEYIFTDKTGTLTENNMEFKECCIEGHVYVPHVICNGQVLPESSGIDMIDSSPSVNGREREELFFRALCLCHTVQVKDDDSVDGPRKSPDGGKSCVYISSSPDEVALVEGVQRLGFTYLRLKDNYMEILNRENHIERFELLEILSFDSVRRRMSVIVKSATGEIYLFCKGADSSIFPRVIEGKVDQIRARVERNAVEGLRTLCVAYKRLIQEEYEGICKLLQAAKVALQDREKKLAEAYEQIEKDLTLLGATAVEDRLQEKAADTIEALQKAGIKVWVLTGDKMETAAATCYACKLFRRNTQLLELTTKRIEEQSLHDVLFELSKTVLRHSGSLTRDNLSGLSADMQDYGLIIDGAALSLIMKPREDGSSGNYRELFLEICRSCSAVLCCRMAPLQKAQIVKLIKFSKEHPITLAIGDGANDVSMILEAHVGIGVIGKEGRQAARNSDYAIPKFKHLKKMLLVHGHFYYIRISELVQYFFYKNVCFIFPQFLYQFFCGFSQQTLYDTAYLTLYNISFTSLPILLYSLMEQHVGIDVLKRDPTLYRDVAKNALLRWRVFIYWTLLGLFDALVFFFGAYFVFENTTVTSNGQIFGNWTFGTLVFTVMVFTVTLKLALDTHYWTWINHFVIWGSLLFYVVFSLLWGGVIWPFLNYQRMYYVFIQMLSSGPAWLAIVLLVTISLLPDVLKKVLCRQLWPTATERVQNGCAQPRDRDSEFTPLASLQSPGYQSTCPSAAWYSSHSQQVTLAAWKEKVSTEPPPILGGSHHHCSSIPSHSCPRSRVGMLV

SEQ ID NO: 9918 - protein, 1262 aa, Homo sapiens
MLQQVPENINFPAEEEKILEFWTEFNCFQECLKQSKHKPKFTFYDGPPFATGLPHYGHILAGTIKDIVTRYAHQSGFHVDRRFGWDCHGLPVEYEIDKTLGIRGPEDVAKMGITEYNNQCRAIVMRYSAEWKSTVSRLGRWIDFDNDYKTLYPQFMESVWWVFKQLYDKGLVYRGVKVMPFSTACNTPLSNFESHQNYKDVQDPSVFVTFPLEEDETVSLVAWTTTPWTLPSNLAVCVNPEMQYVKIKDVARGRLLILMEARLSALYKLESDYEILERFPGAYLKGKKYRPLFDYFLKCKENGAFTVLVDNYVKEEEGTGVVHQAPYFGAEDYRVCMDFNIIRKDSLPVCPVDASGCFTTEVTDFAGQYVKDADKSIIRTLKEQGRLLVATTFTHSYPFCWRSDTPLIYKAVPSWFVRVENMVDQLLRNNDLCYWVPELVREKRFGNWLKDARDWTISRNRYWGTPIPLWVSDDFEEVVCIGSVAELEELSGAKISDLHRESVDHLTIPSRCGKGSLHRISEVFDCWFESGSMPYAQVHYPFENKREFEDAFPADFIAEGIDQTRGWFYTLLVLATALFGQPPFKNVIVNGLVLASDGQKMSKRKKNYPDPVSIIQKYGADALRLYLINSPVVRAENLRFKEEGVRDVLKDVLLPWYNAYRFLIQNVLRLQKEEEIEFLYNENTVRESPNITDRWILSFMQSLIGFFETEMAAYRLYTVVPRLVKFVDILTNWYVRMNRRRLKGENGMEDCVMALETLFSVLLSLCRLMAPYTPFLTELMYQNLKVLIDPVSVQDKDTLSIHYLMLPRVREELIDKKTESAVSQMQSVIELGRVIRDRKTIPIKYPLKEIVVIHQDPEALKDIKSLEKYIIEELNVRKVTLSTDKNKYGIRLRAEPDHMVLGKRLKGAFKAVMTSIKQLSSEELEQFQKTGTIVVEGHELHDEDIRLMYTFDQATGGTAQFEAHSDAQALVLLDVTPDQSMVDEGMAREVINRIQKLRKKCNLVPTDEITVYYKAKSEGTYLNSVIESHTEFIFTTIKAPLKPYPVSPSDKVLIQEKTQLKGSELEITLTRGSSLPGPACAYVNLNICANGSEQGGVLLLENPKGDNRLDLLKLKSVVTSIFGVKNTELAVFHDETEIQNQTDLLSLSGKTLCVTAGSAPSLINSSSTLLCQYINLQLLNAKPQECLMGTVGTLLLENPLGQNGLTHQGLLYEAAKVFGLRSRKLKLFLNETQTQEITEDIPVKTLNMKTVYVSVLPTTADF

SEQ ID NO: 9919 - protein, 1134 aa, Homo sapiens
MDCSLVRTLVHRYCAGEENWVDSRTIYVGHREPPPGAEAYIPQRYPDNRIVSSKYTFWNFIPKNLFEQFRRVANFYFLIIFLVQLIIDTPTSPVTSGLPLFFVITVTAIKQGYEDWLRHKADNAMNQCPVHFIQHGKLVRKQSRKLRVGDIVMVKEDETFPCDLIFLSSNRGDGTCHVTTASLDGESSHKTHYAVQDTKGFHTEEDIGGLHATIECEQPQPDLYKFVGRINVYSDLNDPVVRPLGSENLLLRGATLKNTEKIFGVAIYTGMETKMALNYQSKSQKRSAVEKSMNAFLIVYLCILISKALINTVLKYMWQSEPFRDEPWYNQKTESERQRNLFLKAFTDFLAFMVLFNYIIPVSMYVTVEMQKFLGSYFITWDEDMFDEETGEGPLVNTSDLNEELGQVEYIFTDKTGTLTENNMEFKECCIEGHVYVPHVICNGQVLPESSGIDMIDSSPSVNGREREELFFRALCLCHTVQVKDDDSVDGPRKSPDGGKSCVYISSSPDEVALVEGVQRLGFTYLRLKDNYMEILNRENHIERFELLEILSFDSVRRRMSVIVKSATGEIYLFCKGADSSIFPRVIEGKVDQIRARVERNAVEGLRTLCVAYKRLIQEEYEGICKLLQAAKVALQDREKKLAEAYEQIEKDLTLLGATAVEDRLQEKAADTIEALQKAGIKVWVLTGDKMETAAATCYACKLFRRNTQLLELTTKRIEEQSLHDVLFELSKTVLRHSGSLTRDNLSGLSADMQDYGLIIDGAALSLIMKPREDGSSGNYRELFLEICRSCSAVLCCRMAPLQKAQIVKLIKFSKEHPITLAIGDGANDVSMILEAHVGIGVIGKEGRQAARNSDYAIPKFKHLKKMLLVHGHFYYIRISELVQYFFYKNVCFIFPQFLYQFFCGFSQQTLYDTAYLTLYNISFTSLPILLYSLMEQHVGIDVLKRDPTLYRDVAKNALLRWRVFIYWTLLGLFDALVFFFGAYFVFENTTVTSNGQIFGNWTFGTLVFTVMVFTVTLKLALDTHYWTWINHFVIWGSLLFYVVFSLLWGGVIWPFLNYQRMYYVFIQMLSSGPAWLAIVLLVTISLLPDVLKKVLCRQLWPTATERVQTKSQCLSVEQSTIFMLSQTSSSLSF

SEQ ID NO: 9920 - protein, 495 aa, Homo sapiens
MRDAGDPSPPNKMLRRSDSPENKYSDSTGHSKAKNVHTHRVRERDGGTSYSPQENSHNHSALHSSNSHSSNPSNNPSKTSDAPYDSADDWSEHISSSGKKYYYNCRTEVSQWEKPKEWLEREQRQKEANKMAVNSFPKDRDYRREVMQATATSGFASGKSTSGDKPVSHSCTTPSTSSASGLNPTSAPPTSASAVPVSPVPQSPIPPLLQDPNLLRQLLPALQATLQLNNSNVDISKINEAVTQASLQSIIHKFLTAGPSAFNITSLISQAAQLSTQAQPSNQSPMSLTSDASSPRSYVSPRISTPQTNTVPIKPLISTPPVSSQPKVSTPVVKQGPVSQSATQQPVTADKQQGHEPVSPRSLQRSSSQRSPSPGPNHTSNSSNASNATVVPQNSSARSTCSLTPALAAHFSENLIKHVQGWPADHAEKQASRLREEAHNMGTIHMSEICTELKNLRSLVRVCEIQATLREQRILFLRQQIKELEKLKNQNSFMV

SEQ ID NO: 9921 - protein, 1264 aa, Homo sapiens
MSTLYVSPHPDAFPSLRALIAARYGEAGEGPGWGGAHPRICLQPPPTSRTPFPPPRLPALEQGPGGLWVWGATAVAQLLWPAGLGGPGGSRAAVLVQQWVSYADTELIPAACGATLPALGLRSSAQDPQAVLGALGRALSPLEEWLRLHTYLAGEAPTLADLAAVTALLLPFRYVLDPPARRIWNNVTRWFVTCVRQPEFRAVLGEVVLYSGARPLSHQPGPEAPALPKTAAQLKKEAKKREKLEKFQQKQKIQQQQPPPGEKKPKPEKREKRDPGVITYDLPTPPGEKKDVSGPMPDSYSPRYVEAAWYPWWEQQGFFKPEYGRPNVSAANPRGVFMMCIPPPNVTGSLHLGHALTNAIQDSLTRWHRMRGETTLWNPGCDHAGIATQVVVEKKLWREQGLSRHQLGREAFLQEVWKWKEEKGDRIYHQLKKLGSSLDWDRACFTMDPKLSAAVTEAFVRLHEEGIIYRSTRLVNWSCTLNSAISDIEVDKKELTGRTLLSVPGYKEKVEFGVLVSFAYKVQGSDSDEEVVVATTRIETMLGDVAVAVHPKDTRYQHLKGKNVIHPFLSRSLPIVFDEFVDMDFGTGAVKITPAHDQNDYEVGQRHGLEAISIMDSRGALINVPPPFLGLPRFEARKAVLVALKERGLFRGIEDNPMVVPLCNRSKDVVEPLLRPQWYVRCGEMAQAASAAVTRGDLRILPEAHQRTWHAWMDNIREWCISRQLWWGHRIPAYFVTVSDPAVPPGEDPDGRYWVSGRNEAEAREKAAKEFGVSPDKISLQQDEDVLDTWFSSGLFPLSILGWPNQSEDLSVFYPGTLLETGHDILFFWVARMVMLGLKLTGRLPFREVYLHAIVRDAHGRKMSKSLGNVIDPLDVIYGISLQGLHNQLLNSNLDPSEVEKAKEGQKADFPAGIPECGTDALRFGLCAYMSQGRDINLDVNRILGYRHFCNKLWNATKFALRGLGKGFVPSPTSQPGGHESLVDRWIRSRLTEAVRLSNQGFQAYDFPAVTTAQYSFWLYELCDVYLECLKPVLNGVDQVAAECARQTLYTCLDVGLRLLSPFMPFVTEELFQRLPRRMPQAPPSLCVTPYPEPSECSWKDPEAEAALELALSITRAVRSLRADYNLTRIRPDCFLEVADEATGALASAVSGYVQALASAGVVAVLALGAPAPQGCAVALASDRCSIHLQLQGLVDPARELGKLQAKRVEAQRQAQRLRERRAASGYPVKVPLEVQEADEAKLQQTEAELRKVDEAIALFQKML

SEQ ID NO: 9922 - protein, 602 aa, Homo sapiens
MRDAGDPSPPNKMLRRSDSPENKYSDSTGHSKAKNVHTHRVRERDGGTSYSPQENSHNHSALHSSNSHSSNPSNNPSKTSDAPYDSADDWSEHISSSGKKYYYNCRTEVSQWEKPKEWLEREQRQKEANKMAVNSFPKDRDYRREVMQATATSGFASGMEDKHSSDASSLLPQNILSQTSRHNDRDYRLPRAETHSSSTPVQHPIKPVVHPTATPSTVPSSPFTLQSDHQPKKSFDANGASTLSKLPTPTSSVPAQKTERKESTSGDKPVSHSCTTPSTSSASGLNPTSAPPTSASAVPVSPVPQSPIPPLLQDPNLLRQLLPALQATLQLNNSNVDISKINEVLTAAVTQASLQSIIHKFLTAGPSAFNITSLISQAAQLSTQAQPSNQSPMSLTSDASSPRSYVSPRISTPQTNTVPIKPLISTPPVSSQPKVSTPVVKQGPVSQSATQQPVTADKQQGHEPVSPRSLQRSSSQRSPSPGPNHTSNSSNASNATVVPQNSSARSTCSLTPALAAHFSENLIKHVQGWPADHAEKQASRLREEAHNMGTIHMSEICTELKNLRSLVRVCEIQATLREQRILFLRQQIKELEKLKNQNSFMV

SEQ ID NO: 9923 - protein, 1541 aa, Homo sapiens
MKDKQKKKKERTWAEAARLVLENYSDAPMTPKQILQVIEAEGLKEMRSGTSPLACLNAMLHSNSRGGEGLFYKLPGRISLFTLKKDALQWSRHPATVEGEEPEDTADVESCGSNEASTVSGENDVSLDETSSNASCSTESQSRPLSNPRDSYRASSQANKQKKKTGVMLPRVVLTPLKVNGAHVESASGFSGCHADGESGSPSSSSSGSLALGSAAIRGQAEVTQDPAPLLRGFRKPATGQMKRNRGEEIDFETPGSILVNTNLRALINSRTFHALPSHFQQQLLFLLPEVDRQVGTDGLLRLSSSALNNEFFTHAAQSWRERLADGEFTHEMQVRIRQEMEKEKKVEQWKEKFFEDYYGQKLGLTKEESLQQNVGQEEAEIKSGLCVPGESVRIQRGPATRQRDGHFKKRSRPDLRTRARRNLYKKQESEQAGVAKDAKSVASDVPLYKDGEAKTDPAGLSSPHLPGTSSAAPDLEGPEFPVESVASRIQAEPDNLARASASPDRIPSLPQETVDQEPKDQKRKSFEQAASASFPEKKPRLEDRQSFRNTIESVHTEKPQPTKEEPKVPPIRIQLSRIKPPWVVKGQPTYQICPRIIPTTESSCRGWTGARTLADIKARALQVRGARGHHCHREAATTAIGGGGGPGGGGGGATDEGGGRGSSSGDGGEACGHPEPRGGPSTPGKCTSDLQRTQLLPPYPLNGEHTQAGTAMSRARREDLPSLRKEESCLLQRATVGLTDGLGDASQLPVAPTGDQPCQALPLLSSQTSVAERLVEQPQLHPDVRTECESGTTSWESDDEEQGPTVPADNGPIPSLVGDDTLEKGTGQALDSHPTMKDPVNVTPSSTPESSPTDCLQNRAFDDELGLGGSCPPMRESDTRQENLKTKALVSNSSLHWIPIPSNDEVVKQPKPESREHIPSVEPQVGEEWEKAAPTPPALPGDLTAEEGLDPLDSLTSLWTVPSRGGSDSNGSYCQQVDIEKLKINGDSEALSPHGESTDTASDFEGHLTEDSSEADTREAAVTKGSSVDKDEKPNWNQSAPLSKVNGDMRLVTRTDGMVAPQSWVSRVCAVRQKIPDSLLLASTEYQPRAVCLSMPGSSVEATNPLVMQLLQGSLPLEKVLPPAHDDSMSESPQVPLTKDQSHGSLRMGSLHGLGKNSGMVDGSSPSSLRALKEPLLPDSCETGTGLARIEATQAPGAPQKNCKAVPSFDSLHPVTNPITSSRKLEEMDSKEQFSSFSCEDQKEVRAMSQDSNSNAAPGKSPGDLTTSRTPRFSSPNVISFGPEQTGRALGDQSNVTGQGKKLFGSGNVAATLQRPRPADPMPLPAEIPPVFPSGKLGPSTNSMSGGVQTPREDWAPKPHAFVGSVKNEKTFVGGPLKANAENRKATGHSPLELVGHLEGMPFVMDLPFWKLPREPGKGLSEPLEPSSLPSQLSIKQAFYGKLSKLQLSSTSFNYSSSSPTFPKGLAGSVVQLSHKANFGASHSASLSLQMFTDSSTVESISLQCACSLKAMIMCQGCGAFCHDDCIGPSKLCVLCLVVR

SEQ ID NO: 9924 - protein, 891 aa, Homo sapiens
MLPTEVPQSHPGPSALLLLQLLLPPTSAFFPNIWSLLAAPGSITHQDLTEEAALNVTLQLFLEQPPPGRPPLRLEDFLGRTLLADDLFAAYFGPGSSRRFRAALGEVSRANAAQDFLPTSRNDPDLHFDAERLGQGRARLVGALRETVVAARALDHTLARQRLGAALHALQDFYSHSNWVELGEQQPHPHLLWPRQELQNLAQVADPTCSDCEELSCPRNWLGFTLLTSGYFGTHPPKPPGKCSHGGHFDRSSSQPPRGGINKDSTSPGFSPHHMLHLQAAKLALLASIQAFSLLRSRLGDRDFSRLLDITPASSLSFVLDTTGSMGEEINAAKIQARHLVEQRRGSPMEPVHYVLVPFHDPGFGPVFTTSDPDSFWQQLNEIHALGGGDEPEMCLSALQLALLHTPPLSDIFVFTDASPKDAFLTNQVESLTQERRCRVTFLVTEDTSRVQGRARREILSPLRFEPYKAVALASGGEVIFTKDQHIRDVAAIVGESMAALVTLPLDPPVVVPGQPLVFSVDGLLQKITVRIHGDISSFWIKNPAGVSQGQEEGGGPLGHTRRFGQFWMVTMDDPPQTGTWEIQVTAEDTPGVRVQAQTSLDFLFHFGIPMEDGPHPGLYPLTQPVAGLQTQLLVEVTGLGSRANPGDPQPHFSHVILRGVPEGAELGQVPLEPVGPPERGLLAASLSPTLLSTPRPFSLELIGQDAAGRRLHRAAPQPSTVVPVLLELSGPSGFLAPGSKVPLSLRIASFSGPQDLDLRTFVNPSFSLTSNLSRAHLELNESAWGRLWLEVPDSAAPDSVVMVTVTAGGREANPVPPTHAFLRLLVSAPAPQDRHTTPTGSSDPILTTATPAFSPFTLVTQGRAGAGLAAGSPWWGTVGGVLLLLGLASW

SEQ ID NO: 9925 - protein, 778 aa, Homo sapiens
MSSAMLVTCLPDPSSSFREDAPRPPVPGEEGETPPCQPGVGKGQVTKPMPVSSNTRRNEDGLGEPEGRASPDSPLTRWTKSLHSLLGDQDGAYLFRTFLEREKCVDTLDFWFACNGFRQMNLKDTKTLRVAKAIYKRYIENNSIVSKQLKPATKTYIRDGIKKQQIDSIMFDQAQTEIQSVMEENAYQMFLTSDIYLEYVRSGGENTAYMSNGGLGSLKVVCGYLPTLNEEEEWTCADFKCKLSPTVVGLSSKTLRATASVRSTETVDSGYRSFKRSDPVNPYHIGSGYVFAPATSANDSEISSDALTDDSMSMTDSSVDGIPPYRVGSKKQLQREMHRSVKANGQVSLPHFPRTHRLPKEMTPVEPATFAAELISRLEKLKLELESRHSLEERLQQIREDEEREGSELTLNSREGAPTQHPLSLLPSGSYEEDPQTILDDHLSRVLKTPGCQSPGVGRYSPRSRSPDHHHHHHSQYHSLLPPGGKLPPAAASPGACPLLGGKGFVTKQTTKHVHHHYIHHHAVPKTKEEIEAEATQRVHCFCPGGSEYYCYSKCKSHSKAPETMPSEQFGAQSTKKAYPLESARSSPGERASRHHLWGGNSGHPRTTPRAHLFTQDPAMPPLTPPNTLAQLEEACRRLAEVSKPPKQRCCVASQQRDRNHSATVQTGATPFSNPSLAPEDHKEPKKLAGVHALQASELVVTYFFCGEEIPYRRMLKAQSLTLGHFKEQLSKKGNYRYYFKKASDEFACGAVFEEIWEDETVLPMYEGRILGKVERID

SEQ ID NO: 9926 - protein, 943 aa, Homo sapiens
MARGSALPRRPLLCIPAVWAAAALLLSVSRTSGEVEVLDPNDPLGPLDGQDGPIPTLKGYFLNFLEPVNNITIVQGQTAILHCKVAGNPPPNVRWLKNDAPVVQEPRRIIIRKTEYGSRLRIQDLDTTDTGYYQCVATNGMKTITATGVLFVRLGPTHSPNHNFQDDYHEDGFCQPYRGIACARFIGNRTIYVDSLQMQGEIENRITAAFTMIGTSTHLSDQCSQFAIPSFCHFVFPLCDARSRTPKPRELCRDECEVLESDLCRQEYTIARSNPLILMRLQLPKCEALPMPESPDAANCMRIGIPAERLGRYHQCYNGSGMDYRGTASTTKSGHQCQPWALQHPHSHHLSSTDFPELGGGHAYCRNPGGQMEGPWCFTQNKNVRMELCDVPSCSPRDSSKMGILYILVPSIAIPLVIACLFFLVCMCRNKQKASASTPQRRQLMASPSQDMEMPLINQHKQAKLKEISLSAVRFMEELGEDRFGKVYKGHLFGPAPGEQTQAVAIKTLKDKAEGPLREEFRHEAMLRARLQHPNVVCLLGVVTKDQPLSMIFSYCSHGDLHEFLVMRSPHSDVGSTDDDRTVKSALEPPDFVHLVAQIAAGMEYLSSHHVVHKDLATRNVLVYDKLNVKISDLGLFREVYAADYYKLLGNSLLPIRWMAPEAIMYGKFSIDSDIWSYGVVLWEVFSYGLQPYCGYSNQDVVEMIRNRQVLPCPDDCPAWVYALMIECWNEFPSRRPRFKDIHSRLRAWGNLSNYNSSAQTSGASNTTQTSSLSTSPVSNVSNARYVGPKQKAPPFPQPQFIPMKGQIRPMVPPPQLYVPVNGYQPVPAYGAYLPNFYPVQIPMQMAPQQVPPQMVPKPSSHHSGSGSTSTGYVTTAPSNTSMADRAALLSEGADDTQNAPEDGAQSTVQEAEEEEEGSVPETELLGDCDTLQVDEAQVQLEA

SEQ ID NO: 9927 - protein, 747 aa, Homo sapiens
MSKLKSSESVRVVVRCRPMNGKEKAASYDKVVDVDVKLGQVSVKNPKGTAHEMPKTFTFDAVYDWNAKQFELYDETFRPLVDSVLQGFNGTIFAYGQTGTGKTYTMEGIRGDPEKRGVIPNSFDHIFTHISRSQNQQYLVRASYLEIYQEEIRDLLSKDQTKRLELKERPDTGVYVKDLSSFVTKSVKEIEHVMNVGNQNRSVGATNMNEHSSRSHAIFVITIECSEVGLDGENHIRVGKLNLVDLAGSERQAKTGAQGERLKEATKINLSLSALGNVISALVDGKSTHIPYRDSKLTRLLQDSLGGNAKTVMVANVGPASYNVEETLTTLRYANRAKNIKNKPRVNEDPKDALLREFQEEIARLKAQLEKRSIGRRKRREKRREGGGSGGGGEEEEEEGEEGEEEGDDKDDYWREQQEKLEIEKRAIVEDHSLVAEEKMRLLKEKEKKMEDLRREKDAAEMLGAKIKAMESKLLVGGKNIVDHTNEQQKILEQKRQEIAEQKRREREIQQQMESRDEETLELKETYSSLQQEVDIKTKKLKKLFSKLQAVKAEIHDLQEEHIKERQELEQTQNELTRELKLKHLIIENFIPLEEKSKIMNRAFFDEEEDHWKLHPITRLENQQMMKRPVSAVGYKRPLSQHARMSMMIRPEARYRAENIVLLELDMPSRTTRDYEGPAIAPKVQAALDAALQDEDEIQVDASSFESTANKKSKARPKSGRKSGSSSSSSGTPASQLYPQSRGLVPK

SEQ ID NO: 9928 - protein, 704 aa, Homo sapiens
MKTITATGVLFVRLGPTHSPNHNFQDDYHEDGFCQPYRGIACARFIGNRTIYVDSLQMQGEIENRITAAFTMIGTSTHLSDQCSQFAIPSFCHFVFPLCDARSRTPKPRELCRDECEVLESDLCRQEYTIARSNPLILMRLQLPKCEALPMPESPDAANCMRIGIPAERLGRYHQCYNGSGMDYRGTASTTKSGHQCQPWALQHPHSHHLSSTDFPELGGGHAYCRNPGGQMEGPWCFTQNKNVRMELCDVPSCSPRDSSKMGILYILVPSIAIPLVIACLFFLVCMCRNKQKASASTPQRRQLMASPSQDMEMPLINQHKQAKLKEISLSAVRFMEELGEDRFGKVYKGHLFGPAPGEQTQAVAIKTLKDKAEGPLREEFRHEAMLRARLQHPNVVCLLGVVTKDQPLSMIFSYCSHGDLHEFLVMRSPHSDVGSTDDDRTVKSALEPPDFVHLVAQIAAGMEYLSSHHVVHKDLATRNVLVYDKLNVKISDLGLFREVYAADYYKLLGNSLLPIRWMAPEAIMYGKFSIDSDIWSYGVVLWEVFSYGLQPYCGYSNQDVVEMIRNRQVLPCPDDCPAWVYALMIECWNEFPSRRPRFKDIHSRLRAWGNLSNYNSSAQTSGASNTTQTSSLSTSPVSNVVRMRGSGRQCWMTETPNALLWHNVSGVGSCRWVRGLADFKDEATDFRVMPRDPSLHCHVTSTA

SEQ ID NO: 9929 - protein, 339 aa, Homo sapiens
MAAAVAAAPGALGSLHAGGARLVAACSAWLCPGLRLPGSLAGRRAGPAIWAQGWVPAAGGPAPKRGYSSEMKTEDELRVRHLEEENRGIVVLGINRAYGKNSLSKNLIKMLSKAVDALKSDKKVRTIIIRSEVPGIFCAGADLKERAKMSSSEVGPFVSKIRAVINDIANLPVPTIAAIDGLALGGGLELALACDIRVAASSAKMGLVETKLAIIPGGGGTQRLPRAIGMSLAKELIFSARVLDGKEAKAVGLISHVLEQNQEGDAAYRKALDLAREFLPQGPVAMRVAKLAINQGMEVDLVTGLAIEEACYAQTIPTKDRLEGLLAFKEKRPPRYKGE

SEQ ID NO: 9930 - protein, 810 aa, Homo sapiens
MDFPQHSQHVLEQLNQQRQLGLLCDCTFVVDGVHFKAHKAVLAACSEYFKMLFVDQKDVVHLDISNAAGLGQVLEFMYTAKLSLSPENVDDVLAVATFLQMQDIITACHALKSLAEPATSPGGNAEALATEGGDKRAKEEKVATSTLSRLEQAGRSTPIGPSRDLKEERGGQAQSAASGAEQTEKADAPREPPPVELKPDPTSGMAAAEAEAALSESSEQEMEVEPARKGEEEQKEQEEQEEEGAGPAEVKEEGSQLENGEAPEENENEESAGTDSGQELGSEARGLRSGTYGDRTESKAYGSVIHKCEDCGKEFTHTGNFKRHIRIHTGEKPFSCRECSKAFSDPAACKAHEKTHSPLKPYGCEECGKSYRLISLLNLHKKRHSGEARYRCEDCGKLFTTSGNLKRHQLVHSGEKPYQCDYCGRSFSDPTSKMRHLETHDTDKEHKCPHCDKKFNQVGNLKAHLKIHIADGPLKCRECGKQFTTSGNLKRHLRIHSGEKPYVCIHCQRQFADPGALQRHVRIHTGEKPCQCVMCGKAFTQASSLIAHVRQHTGEKPYVCERCGKRFVQSSQLANHIRHHDNIRPHKCSVCSKAFVNVGDLSKHIIIHTGEKPYLCDKCGRGFNRVDNLRSHVKTVHQGKAGIKILEPEEGSEVSVVTVDDMVTLATEALAATAVTQLTGPATLPAVVPVGAAVTADETEVLKAEISKAVKQVQEEDPNTHILYACDSCGDKFLDANSLAQHVRIHTAQALVMFQTDADFYQQYGPGGTWPAGQVLQAGELVFRPRDGAEGQPALAETSPTAPECPPPAE

SEQ ID NO: 9931 - protein, 4307 aa, Homo sapiens
MANGTADVRKLFIFTTTQNYFGLMSELWDQPLLCNCLEINNFLDDGNQMLLRVQRSDAGISFSNTIEFGDTKDKVLVFFKLRPEVITDENLHDNILVSSMLESPISSLYQAVRQVFAPMLLKDQEWSRNFDPKLQNLLSELEAGLGIVLRRSDTNLTKLKFKEDDTRGILTPSDEFQFWIEQAHRGNKQISKERANYFKELFETIAREFYNLDSLSLLEVVDLVETTQDVVDDVWRQTEHDHYPESRMLHLLDIIGGSFGRFVQKKLGTLNLWEDPYYLVKESLKAGISICEQWVIVCNHLTGQVWQRYVPHPWKNEKYFPETLDKLGKRLEEVLAIRTIHEKFLYFLPASEEKIICLTRVFEPFTGLNPVQYNPYTEPLWKAAVSQYEKIIAPAEQKIAGKLKNYISEIQDSPQQLLQAFLKYKELVKRPTISKELMLERETLLARLVDSIKDFRLDFENRCRGIPGDASGPLSGKNLSEVVNSIVWVRQLELKVDDTIKIAEALLSDLPGFRCFHQSAKDLLDQLKLYEQEQFDDWSRDIQSGLSDSRSGLCIEASSRIMELDSNDGLLKVHYSDRLVILLREVRQLSALGFVIPAKIQQVANIAQKFCKQAIILKQVAHFYNSIDQQMIQSQRPMMLQSALAFEQIIKNSKAGSGGKSQITWDNPKELEGYIQKLQNAAERLATENRKLRKWHTTFCEKVVVLMNIDLLRQQQRWKDGLQELRTGLATVEAQGFQASDMHAWKQHWNHQLYKALEHQYQMGLEALNENLPEINIDLTYKQGRLQFRPPFEEIRAKYYREMKRFIGIPNQFKGVGEAGDESIFSIMIDRNASGFLTIFSKAEDLFRRLSAVLHQHKEWIVIGQVDMEALVEKHLFTVHDWEKNFKALKIKGKEVERLPSAVKVDCLNINCNPVKTVIDDLIQKLFDLLVLSLKKSIQAHLHEIDTFVTEAMEVLTIMPQSVEEIGDANLQYSKLQERKPEILPLFQEAEDKNRLLRTVAGGGLETISNLKAKWDKFELMMESHQLMIKDQIEVMKGNVKSRLQIYYQELEKFKARWDQLKPGDDVIETGQHNTLDKSAKLIKEKKIEFDDLEVTRKKLVDDCHHFRLEEPNFSLASSISKDIESCAQIWAFYEEFQQGFQEMANEDWITFRTKTYLFEEFLMNWHDRLRKVEEHSVMTVKLQSEVDKYKIVIPILKYVRGEHLSPDHWLDLFRLLGLPRGTSLEKLLFGDLLRVADTIVAKAADLKDLNSRAQGEVTIREALRELDLWGVGAVFTLIDYEDSQSRTMKLIKDWKDIVNQVGDNRCLLQSLKDSPYYKGFEDKVSIWERKLAELDEYLQNLNHIQRKWVYLEPIFGRGALPKEQTRFNRVDEDFRSIMTDIKKDNRVTTLTTHAGIRNSLLTILDQLQRCQKSLNEFLEEKRSAFPRFYFIGDDDLLEILGQSTNPSVIQSHLKKLFAGINSVCFDEKSKHITAMKSLEGEVVPFKNKVPLSNNVETWLNDLALEMKKTLEQLLKECVTTGRSSQGAVDPSLFPSQILCLAEQIKFTEDVENAIKDHSLHQIETQLVNKLEQYTNIDTSSEDPGNTESGILELKLKALILDIIHNIDVVKQLNQIQVHTTEDWAWKKQLRFYMKSDHTCCVQMVDSEFQYTYEYQGNASKLVYTPLTDKCYLTLTQAMKMGLGGNPYGPAGTGKTESVKALGGLLGRQVLVFNCDEGIDVKSMGRIFVGLVKCGAWGCFDEFNRLEESVLSAVSMQIQTIQDALKNHRTVCELLGKEVEVNSNSGIFITMNPAGKGYGGRQKLPDNLKQLFRPVAMSHPDNELIAEVILYSEGFKDAKVLSRKLVAIFNLSRELLTPQQHYDWGLRALKTVLRGSGNLLRQLNKSGTTQNANESHIVVQALRLNTMSKFTFTDCTRFDALIKDVFPGIELKEVEYDELSAALKQVFEEANYEIIPNQIKKALELYEQLCQRMGVVIVGPSGAGKSTLWRMLRAALCKTGKVVKQYTMNPKAMPRYQLLGHIDMDTREWSDGVLTNSARQVVREPQDVSSWIICDGDIDPEWIESLNSVLDDNRLLTMPSGERIQFGPNVNFVFETHDLSCASPATISRMGMIFLSDEETDLNSLIKSWLRNQPAEYRNNLENWIGDYFEKALQWVLKQNDYVVETSLVGTVMNGLSHLHGCRDHDEFIINLIRGLGGNLNMKSRLEFTKEVFHWARESPPDFHKPMDTYYDSTRGRLATYVLKKPEDLTADDFSNGLTLPVIQTPDMQRGLDYFKPWLSSDTKQPFILVGPEGCGKGMLLRYAFSQLRSTQIATVHCSAQTTSRHLLQKLSQTCMVISTNTGRVYRPKDCERLVLYLKDINLPKLDKWGTSTLVAFLQQVLTYQGFYDENLEWVGLENIQIVASMSAGGRLGRHKLTTRFTSIVRLCSIDYPEREQLQTIYGAYLEPVLHKNLKNHSIWGSSSKIYLLAGSMVQVYEQVRAKFTVDDYSHYFFTPCILTQWVLGLFRYDLEGGSSNHPLDYVLEIVAYEARRLFRDKIVGAKELHLFDIILTSVFQGDWGSDILDNMSDSFYVTWGARHNSGARAAPGQPLPPHGKPLGKLNSTDLKDVIKKGLIHYGRDNQNLDILLFHEVLEYMSRIDRVLSFPGGSLLLAGRSGVGRRTITSLVSHMHGAVLFSPKISRGYELKQFKNDLKHVLQLAGIEAQQVVLLLEDYQFVHPTFLEMINSLLSSGEVPGLYTLEELEPLLLPLKDQASQDGFFGPVFNYFTYRIQQNLHIVLIMDSANSNFMINCESNPALHKKCQVLWMEGWSNSSMKKIPEMLFSETGGGEKYNDKKRKEEKKKNSVDPDFLKSFLLIHESCKAYGATPSRYMTFLHVYSAISSSKKKELLKRQSHLQAGVSKLNEAKALVDELNRKAGEQSVLLKTKQDEADAALQMITVSMQDASEQKTELERLKHRIAEEVVKIEERKNKIDDELKEVQPLVNEAKLAVGNIKPESLSEIRSLRMPPDVIRDILEGVLRLMGIFDTSWVSMKSFLAKRGVREDIATFDARNISKEIRESVEELLFKNKGSFDPKNAKRASTAAAPLAAWVKANIQYSHVLERIHPLETEQAGLESNLKKTEDRKRKLEELLNSVGQKVSELKEKFQSRTSEAAKLEAEVSKAQETIKAAEVLINQLDREHKRWNAQVVEITEELATLPKRAQLAAAFITYLSAAPESLRKTCLEEWTKSAGLEKFDLRRFLCTESEQLIWKSEGLPSDDLSIENALVILQSRVCPFLIDPSSQATEWLKTHLKDSRLEVINQQDSNFITALELAVRFGKTLIIQEMDGVEPVLYPLLRRDLVAQGPRYVVQIGDKIIDYNEEFRLFLSTRNPNPFIPPDAASIVTEVNFTTTRSGLRGQLLALTIQHEKPDLEEQKTKLLQQEEDKKIQLAKLEESLLETLATSQGNILENKDLIESLNQTKASSALIQESLKESYKLQISLDQERDAYLPLAESASKMYFIISDLSKINNMYRFSLAAFLRLFQRALQNKQDSENTEQRIQSLISSLQHMVYEYICRCLFKADQLMFALHFVRGMHPELFQENEWDTFTGVVVGDMLRKADSQQKIRDQLPSWIDQERSWAVATLKIALPSLYQTLCFEDAALWRTYYNNSMCEQEFPSILAKKVSLFQQILVVQALRPDRLQSAMALFACKTLGLKEVSPLPLNLKRLYKETLEIEPILIIISPGADPSQELQELANAERSGECYHQVAMGQGQADLAIQMLKECARNGDWLCLKNLHLVVSWLPVLEKELNTLQPKDTFRLWLTAEVHPNFTPILLQSSLKITYESPPGLKKNLMRTYESWTPEQISKKDNTHRAHALFSLAWFHAACQERRNYIPQGWTKFYEFSLSDLRAGYNIIDRLFDGAKDVQWEFVHGLLENAIYGGRIDNYFDLRVLQSYLKQFFNSSVIDVFNQRNKKSIFPYSVSLPQSCSILDYRAVIEKIPEDDKPSFFGLPANIARSSQRMISSQVISQLRILGRSITAGSKFDREIWSNELSPVLNLWKKLNQNSNLIHQKVPPPNDRQGSPILSFIILEQFNAIRLVQSVHQSLAALSKVIRGTTLLSSEVQKLASALLNQKCPLAWQSKWEGPEDPLQYLRGLVARALAIQNWVDKAEKQALLSETLDLSELFHPDTFLNALRQETARAVGRSVDSLKFVASWKGRLQEAKLQIKISGLLLEGCSFDGNQLSENQLDSPSVSSVLPCFMGWIPQDACGPYSPDECISLPVYTSAERDRVVTNIDVPCGGNQDQWIQCGAALFLKNQ

SEQ ID NO: 9932 - protein, 646 aa, Homo sapiens
MTDNSNNQLVVRAKFNFQQTNEDELSFSKGDVIHVTRVEEGGWWEGTLNGRTGWFPSNYVREVKASEKPVSPKSGTLKSPPKGFDTTAINKSYYNVVLQNILETENEYSKELQTVLSTYLRPLQTSEKLSSANISYLMGNLEEICSFQQMLVQSLEECTKLPEAQQRVGGCFLNLMPQMKTLYLTYCANHPSAVNVLTEHSEELGEFMETKGASSPGILVLTTGLSKPFMRLDKYPTLLKELERHMEDYHTDRQDIQKSMAAFKNLSAQCQEVRKRKELELQILTEAIRNWEGDDIKTLGNVTYMSQVLIQCAGSEEKNERYLLLFPNVLLMLSASPRMSGFIYQGKLPTTGMTITKLEDSENHRNAFEISGSMIERILVSCNNQQDLQEWVEHLQKQTKVTSVGNPTIKPHSVPSHTLPSHPVTPSSKHADSKPAPLTPAYHTLPHPSHHGTPHTTINWGPLEPPKTPKPWSLSCLRPAPPLRPSAALCYKEDLSKSPKTMKKLLPKRKPERKPSDEEFASRKSTAALEEDAQILKVIEAYCTSAKTRQTLNSSSRKESAPQVLLPEEEKIIVEETKSNGQTVIEEKSLVDTVYALKDEVQELRQDNKKMKKSLEEEQRARKDLEKLVRKVLKNMNDPAWDETNL

SEQ ID NO: 9933 - protein, 753 aa, Homo sapiens
MNSAEQTVTWLITLGVLESPKKTISDPEGFLQASLKDGVVLCRLLERLLPGTIEKTFDANDLYQGQNFNKVLSSLVTLNKVTADIGLGSDSVCARPSSHRIKSFDSLGSQSLHTRTSKLFQGQYRSLDMTDNSNNQLVVRAKFNFQQTNEDELSFSKGDVIHVTRVEEGGWWEGTLNGRTGWFPSNYVREVKASEKPVSPKSGTLKSPPKGFDTTAINKSYYNVVLQNILETENEYSKELQTVLSTYLRPLQTSEKLSSANISYLMGNLEEICSFQQMLVQSLEECTKLPEAQQRVGGCFLNLMPQMKTLYLTYCANHPSAVNVLTEHSEELGEFMETKGASSPGILVLTTGLSKPFMRLDKYPTLLKELERHMEDYHTDRQDIQKSMAAFKNLSAQCQEVRKRKELELQILTEAIRNWEGDDIKTLGNVTYMSQVLIQCAGSEEKNERYLLLFPNVLLMLSASPRMSGFIYQGKLPTTGMTITKLEDSENHRNAFEISGSMIERILVSCNNQQDLQEWVEHLQKQTKVTSVGNPTIKPHSVPSHTLPSHPVTPSSKHADSKPAPLTPAYHTLPHPSHHGTPHTTINWGPLEPPKTPKPWSLSCLRPAPPLRPSAALCYKEDLSKSPKTMKKLLPKRKPERKPSDEEFASRKSTAALEEDAQILKVIEAYCTSAKTRQTLNSTWQGTDLMHNHVLADDDQPSLDSLGRRSSLSRLEPSDLSEDSDYDSIWTAHSYRMGSTSRKSCCSYISHQN

SEQ ID NO: 9934 - protein, 803 aa, Homo sapiens
MNSAEQTVTWLITLGVLESPKKTISDPEGFLQASLKDGVVLCRLLERLLPGTIEKVYPEPRSESECLSNIREFLRGCGASLRLELLFPPSQPPQHLVTTILLSASTFDANDLYQGQNFNKVLSSLVTLNKVTADIGLGSDSVCARPSSHRIKSFDSLGSQSLHTRTSKLFQGQYRSLDMTDNSNNQLVVRAKFNFQQTNEDELSFSKGDVIHVTRVEEGGWWEGTLNGRTGWFPSNYVREVKASEKPVSPKSGTLKSPPKGFDTTAINKSYYNVVLQNILETENEYSKELQTVLSTYLRPLQTSEKLSSANISYLMGNLEEICSFQQMLVQSLEECTKLPEAQQRVGGCFLNLMPQMKTLYLTYCANHPSAVNVLTEHSEELGEFMETKGASSPGILVLTTGLSKPFMRLDKYPTLLKELERHMEDYHTDRQDIQKSMAAFKNLSAQCQEVRKRKELELQILTEAIRNWEGDDIKTLGNVTYMSQVLIQCAGSEEKNERYLLLFPNVLLMLSASPRMSGFIYQGKLPTTGMTITKLEDSENHRNAFEISGSMIERILVSCNNQQDLQEWVEHLQKQTKVTSVGNPTIKPHSVPSHTLPSHPVTPSSKHADSKPAPLTPAYHTLPHPSHHGTPHTTINWGPLEPPKTPKPWSLSCLRPAPPLRPSAALCYKEDLSKSPKTMKKLLPKRKPERKPSDEEFASRKSTAALEEDAQILKVIEAYCTSAKTRQTLNSTWQGTDLMHNHVLADDDQPSLDSLGRRSSLSRLEPSDLSEDSDYDSIWTAHSYRMGSTSRKSCCSYISHQN

SEQ ID NO: 9935 - protein, 803 aa, Homo sapiens
MDFPQHSQHVLEQLNQQRQLGLLCDCTFVVDGVHFKAHKAVLAACSEYFKMLFVDQKDVVHLDISNAAGLGQVLEFMYTAKLSLSPENVDDVLAVATFLQMQDIITACHALKSLAEPATSPGGNAEALATEGGDKRAKEEKVATSTLSRLEQAGRSTPIGPSRDLKEERGGQAQSAASGAEQTEKADAPREPPPVELKPDPTSGMAAAEAEAALSESSEQEMEVEPARKGEEEQKEQEEQEEEGAGPAEVKEEGSQLENGEAPEENENEESAGTDSGQELGSEARGLRSGTYGDRTESKAYGSVIHKCEDCGKEFTHTGNFKRHIRIHTGEKPFSCRECSKAFSDPAACKAHEKTHSPLKPYGCEECGKSYRLISLLNLHKKRHSGEARYRCEDCGKLFTTSGNLKRHQLVHSGEKPYQCDYCGRSFSDPTSKMRHLETHDTDKEHKCPHCDKKFNQVGNLKAHLKIHIADGPLKCRECGKQFTTSGNLKRHLRIHSGEKPYVCIHCQRQFADPGALQRHVRIHTGEKPCQCVMCGKAFTQASSLIAHVRQHTGEKPYVCERCGKRFVQSSQLANHIRHHDNIRPHKCSVCSKAFVNVGDLSKHIIIHTGEKPYLCDKCGRGFNRVDNLRSHVKTVHQGKAGIKILEPEEGSEVSVVTVDDMVTLATEALAATAVTQLTVVPVGAAVTADETEVLKAEISKAVKQVQEEDPNTHILYACDSCGDKFLDANSLAQHVRIHTAQALVMFQTDADFYQQYGPGGTWPAGQVLQAGELVFRPRDGAEGQPALAETSPTAPECPPPAE

SEQ ID NO: 9936 - protein, 635 aa, Homo sapiens
MASSGMADSANHLPFFFGNITREEAEDYLVQGGMSDGLYLLRQSRNYLGGFALSVAHGRKAHHYTIERELNGTYAIAGGRTHASPADLCHYHSQESDGLVCLLKKPFNRPQGVQPKTGPFEDLKENLIREYVKQTWNLQGQALEQAIISQKPQLEKLIATTAHEKMPWFHGKISREESEQIVLIGSKTNGKFLIRARDNNGSYALCLLHEGKVLHYRIDKDKTGKLSIPEGKKFDTLWQLVEHYSYKADGLLRVLTVPCQKIGTQGNVNFGGRPQLPGSHPATWSAGGIISRIKSYSFPKPGHRKSSPAQGNRQESTVSFNPYEPELAPWAADKGPQREALPMDTEVYESPYADPEEIRPKEVYLDRKLLTLEDKELGSGNFGTVKKGYYQMKKVVKTVAVKILKNEANDPALKDELLAEANVMQQLDNPYIVRMIGICEAESWMLVMEMAELGPLNKYLQQNRHVKDKNIIELVHQVSMGMKYLEESNFVHRDLAARNVLLVTQHYAKISDFGLSKALRADENYYKAQTHGKWPVKWYAPECINYYKFSSKSDVWSFGVLMWEAFSYGQKPYRGMKGSEVTAMLEKGERMGCPAGCPREMYDLMNLCWTYDVENRPGFAAVELRLRNYYYDVVN

SEQ ID NO: 9937 - protein, 612 aa, Homo sapiens
MASSGMADSANHLPFFFGNITREEAEDYLVQGGMSDGLYLLRQSRNYLGGFALSVAHGRKAHHYTIERELNGTYAIAGGRTHASPADLCHYHSQESDGLVCLLKKPFNRPQGVQPKTGPFEDLKENLIREYVKQTWNLQGQALEQAIISQKPQLEKLIATTAHEKMPWFHGKISREESEQIVLIGSKTNGKFLIRARDNNGSYALCLLHEGKVLHYRIDKDKTGKLSIPEGKKFDTLWQLVEHYSYKADGLLRVLTVPCQKIGTQGNVNFGGRPQLPGSHPASSPAQGNRQESTVSFNPYEPELAPWAADKGPQREALPMDTEVYESPYADPEEIRPKEVYLDRKLLTLEDKELGSGNFGTVKKGYYQMKKVVKTVAVKILKNEANDPALKDELLAEANVMQQLDNPYIVRMIGICEAESWMLVMEMAELGPLNKYLQQNRHVKDKNIIELVHQVSMGMKYLEESNFVHRDLAARNVLLVTQHYAKISDFGLSKALRADENYYKAQTHGKWPVKWYAPECINYYKFSSKSDVWSFGVLMWEAFSYGQKPYRGMKGSEVTAMLEKGERMGCPAGCPREMYDLMNLCWTYDVENRPGFAAVELRLRNYYYDVVN

SEQ ID NO: 9938 - protein, 3664 aa, Homo sapiens
MVRETRHLWVGNLPENVREEKIIEHFKRYGRVESVKILPKRGSEGGVAAFVDFVDIKSAQKAHNSVNKMGDRDLRTDYNEPGTIPSAARGLDDTVSIASRSREVSGFRGGGGGPAYGPPPSLHAREGRYERRLDGASDNRERAYEHSAYGHHERGTGGFDRTRHYDQDYYRDPRERTLQHGLYYASRSRSPNRFDAHDPRYEPRAREQFTLPSVVHRDIYRDDITREVRGRRPERNYQHSRSRSPHSSQSRNQSPQRLASQASRPTRSPSGSGSRSRSSSSDSISSSSSTSSDSSDSSSSSSDDSPARSVQSAAVPAPTSQLLSSLEKDEPRKSFGIKVQNLPVRSTDTSLKDGLFHEFKKFGKVTSVQIHGTSEERYGLVFFRQQEDQEKALTASKGKLFFGMQIEVTAWIGPETESENEFRPLDERIDEFHPKATRTLFIGNLEKTTTYHDLRNIFQRFGEIVDIDIKKVNGVPQYAFLQYCDIASVCKAIKKMDGEYLGNNRLKLGFGKSMPTNCVWLDGLSSNVSDQYLTRHFCRYGPVVKVVFDRLKGMALVLYNEIEYAQAAVKETKGRKIGGNKIKVDFANRESQLAFYHCMEKSGQDIRDFYEMLAERREERRASYDYNQDRTYYESVRTPGTYPEDSRRDYPARGREFYSEWETYQGDYYESRYYDDPREYRDYRNDPYEQDIREYSYRQRERERERERFESDRDRDHERRPIERSQSPVHLRRPQSPGASPSQAERLPSDSERRLYSRSSDRSGSCSSLSPPRYEKLDKSRLERYTKNEKTDKERTFDPERVERERRLIRKEKVEKDKTDKQKRKGKVHSPSSQSSETDQENEREQSPEKPRSCNKLSREKADKEGIAKNRLELMPCVVLTRVKEKEGKVIDHTPVEKLKAKLDNDTVKSSALDQKLQVSQTEPAKSDLSKLESVRMKVPKEKGLSSHVEVVEKEGRLKARKHLKPEQPADGVSAVDLEKLEARKRRFADSNLKAEKQKPEVKKSSPEMEDARVLSKKQPDVSSREVILLREGEAERKPVRKEILKRESKKIKLDRLNTVASPKDCQELASISVGSGSRPSSDLQARLGELAGESVENQEVQSKKPIPSKPQLKQLQVLDDQGPEREDVRKNYCSLRDETPERKSGQEKSHSVNTEEKIGIDIDHTQSYRKQMEQSRRKQQMEMEIAKSEKFGSPKKDVDEYERRSLVHEVGKPPQDVTDDSPPSKKKRMDHVDFDICTKRERNYRSSRQISEDSERTGGSPSVRHGSFHEDEDPIGSPRLLSVKGSPKVDEKVLPYSNITVREESLKFNPYDSSRREQMADMAKIKLSVLNSEDELNRWDSQMKQDAGRFDVSFPNSIIKRDSLRKRSVRDLEPGEVPSDSDEDGEHKSHSPRASALYESSRLSFLLRDREDKLRERDERLSSSLERNKFYSFALDKTITPDTKALLERAKSLSSSREENWSFLDWDSRFANFRNNKDKEKVDSAPRPIPSWYMKKKKIRTDSEGKMDDKKEDHKEEEQERQELFASRFLHSSIFEQDSKRLQHLERKEEDSDFISGRIYGKQTSEGANSTTDSIQEPVVLFHSRFMELTRMQQKEKEKDQKPKEVEKQEDTENHPKTPESAPENKDSELKTPPSVGPPSVTVVTLESAPSALEKTTGDKTVEAPLVTEEKTVEPATVSEEAKPASEPAPAPVEQLEQVDLPPGADPDKEAAMMPAGVEEGSSGDQPPYLDAKPPTPGASFSQAESNVDPEPDSTQPLSKPAQKSEEANEPKAEKPDATADAEPDANQKAEAAPESQPPASEDLEVDPPVAAKDKKPNKSKRSKTPVQAAAVSIVEKPVTRKSERIDREKLKRSNSPRGEAQKLLELKMEAEKITRTASKNSAADLEHPEPSLPLSRTRRRNVRSVYATMGDHENRSPVKEPVEQPRVTRKRLERELQEAAAVPTTPRRGRPPKTRRRADEEEENEAKEPAETLKPPEGWRSPRSQKTAAGGGPQGKKGKNEPKVDATRPEATTEVGPQIGVKESSMEPKAAEEEAGSEQKRDRKDAGTDKNPPETAPVEVVEKKPAPEKNSKSKRGRSRNSRLAVDKSASLKNVDAAVSPRGAAAQAGERESGVVAVSPEKSESPQKEDGLSSQLKSDPVDPDKEPEKEDVSASGPSPEATQLAKQMELEQAVEHIAKLAEASASAAYKADAPEGLAPEDRDKPAHQASETELAAAIGSIINDISGEPENFPAPPPYPGESQTDLQPPAGAQALQPSEEGMETDEAVSGILETEAATESSRPPVNAPDPSAGPTDTKEARGNSSETSHSVPEAKGSKEVEVTLVRKDKGRQKTTRSRRKRNTNKKVVAPVESHVPESNQAQGESPAANEGTTVQHPEAPQEEKQSEKPHSTPPQSCTSDLSKIPSTENSSQEISVEERTPTKASVPPDLPPPPQPAPVDEEPQARFRVHSIIESDPVTPPSDPSIPIPTLPSVTAAKLSPPVASGGIPHQSPPTKVTEWITRQEEPRAQSTPSPALPPDTKASDVDTSSSTLRKILMDPKYVSATSVTSTSVTTAIAEPVSAAPCLHEAPPPPVDSKKPLEEKTAPPVTNNSEIQASEVLVAADKEKVAPVIAPKITSVISRMPVSIDLENSQKITLAKPAPQTLTGLVSALTGLVNVSLVPVNALKGPVKGSVTTLKSLVSTPAGPVNVLKGPVNVLTGPVNVLTTPVNATVGTVNAAPGTVNAAASAVNATASAVTVTAGAVTAASGGVTATTGTVTMAGAVIAPSTKCKQRASANENSRFHPGSMPVIDDRPADAGSGAGLRVNTSEGVVLLSYSGQKTEGPQRISAKISQIPPASAMDIEFQQSVSKSQVKPDSVTASQPPSKGPQAPAGYANVATHSTLVLTAQTYNASPVISSVKADRPSLEKPEPIHLSVSTPVTQGGTVKVLTQGINTPPVLVHNQLVLTPSIVTTNKKLADPVTLKIETKVLQPANLGSTLTPHHPPALPSKLPTEVNHVPSGPSIPADRTVSHLAAAKLDAHSPRPSGPGPSSFPRASHPSSTASTALSTNATVMLAAGIPVPQFISSIHPEQSVIMPPHSITQTVSLSHLSQGEVRMNTPTLPSITYSIRPEALHSPRAPLQPQQIEVRAPQRASTPQPAPAGVPALASQHPPEEEVHYHLPVARATAPVQSEVLVMQSEYRLHPYTVPRDVRIMVHPHVTAVSEQPRAADGVVKVPPASKAPQQPGKEAAKTPDAKAAPTPTPAPVPVPVPLPAPAPAPHGEARILTVTPSNQLQGLPLTPPVVVTHGVQIVHSSGELFQEYRYGDIRTYHPPAQLTHTQFPAASSVGLPSRTKTAAQGPPPEGEPLQPPQPVQSTQPAQPAPPCPPSQLGQPGQPPSSKMPQVSQEAKGTQTGVEQPRLPAGPANRPPEPHTQVQRAQAETGPTSFPSPVSVSMKPDLPVSLPTQTAPKQPLFVPTTSGPSTPPGLVLPHTEFQPAPKQDSSPHLTSQRPVDMVQLLKKYPIVWQGLLALKNDTAAVQLHFVSGNNVLAHRSLPLSEGGPPLRIAQRMRLEATQLEGVARRMTVETDYCLLLALPCGRDQEDVVSQTESLKAAFITYLQAKQAAGIINVPNPGSNQPAYVLQIFPPCEFSESHLSRLAPDLLASISNISPHLMIVIASV

SEQ ID NO: 9939 - protein, 422 aa, Homo sapiens
MSFVECPYHSPAERLVAEADEGGPSAITGMGLCFRCLLFSFSGRSGVEGGRVDLNVFGSLGLQPWIGSSRCWGGPCSSALRCGWFSSWPPPSKSAIPIGGGSRGAGRVSRWPPPHWLEAWRVSPRPLSPLSPATFGRGFIAVAVIPGLWARGRGCSSDRLPRPAGPARRQFQAASLLTRGWGRAWPWKQILKELDECYERFSRETDGAQKRRMLHCVQRALIRSQELGDEKIQIVSQMVELVENRTRQVDSHVELFEAQQELGDTAGNSGKAGADRPKGEAAAQADKPNSKRSRRQRNNENRENASSNHDHDDGASGTPKEKKAKTSKKKKRSKAKAEREASPADLPIDPNEPTYCLCNQVSYGEMIGCDNDECPIEWFHFSCVGLNHKPKGKWYCPKCRGENEKTMDKALEKSKKERAYNR

SEQ ID NO: 9940 - protein, 241 aa, Homo sapiens
MAEEQPQVELFVKAGSDGAKIGNCPFSQRLFMVLWLKGVTFNVTTVDTKRRTETVQKLCPGGQLPFLLYGTEVHTDTNKIEEFLEAVLCPPRYPKLAALNPESNTAGLDIFAKFSAYIKNSNPALNDNLEKGLLKALKVLDNYLTSPLPEEVDETSAEDEGVSQRKFLDGNELTLADCNLLPKLHIVQVVCKKYRGFTIPEAFRGVHRYLSNAYAREEFASTCPDDEEIELAYEQVAKALK

SEQ ID NO: 9941 - protein, 352 aa, Homo sapiens
MNTIVFNKLSGAVLFEDGGASERERGGRPYSGVLDSPHARPEVGIPDGPPLKDNLGLRHRRTGARQNGGKVRHKRQALQDMARPLKQWLYKHRDNPYPTKTEKILLALGSQMTLVQVSNWFANARRRLKNTVRQPDLSWALRIKLYNKYVQGNAERLSVSSDDSCSEDGENPPRTHMNEGGYNTPVHHPVIKSENSVIKAGVRPESRASEDYVAPPKYKSSLLNRYLNDSLRHVMATNTTMMGKTRQRNHSGSFSSNEFEEELVSPSSSETEGNFVYRTDTLENGSNKGESAANRKGPSKDDTYWKEINAAMALTNLAQGKDKLQGTTSCIIQKSSHIAEVKTVKVPLVQQF

SEQ ID NO: 9942 - protein, 999 aa, Homo sapiens
MEPGEVKDRILENISLSVKKLQSYFAACEDEIPAIRNHDKVLQRLCEHLDHALLYGLQDLSSGYWVLVVHFTRREAIKQIEVLQHVATNLGRSRAWLYLALNENSLESYLRLFQENLGLLHKYYVKNALVCSHDHLTLFLTLVSGLEFIRFELDLDAPYLDLAPYMPDYYKPQYLLDFEDRLPSSVHGSDSLSLNSFNSVTSTNLEWDDSAIAPSSEDGDLTDTVSGPRSTASDLTSSKASTRSPTQRQNPFNEEPAETVSSSDTTPVHTTSQEKEEAQALDPPDACTELEVIRVTKKKKIGKKKKSRSDEEASPLHPACSQKKCAKQGDGDSRNGSPSLGRDSPDTMLASPQEEGEGPSSTTESSERSEPGLLIPEMKDTSMERLGQPLSKVIDQLNGQLDPSTWCSRAEPPDQSFRTGSPGDAPERPPLCDFSEGLSAPMDFYRFTVESPSTVTSGGGHHDPAGLGQPLHVPSSPEAAGQEEEGGGGEGQTPRPLEDTTREAQELEAQLSLVREGPVSEPEPGTQEVLCQLKRDQPSPCLSSAEDSGVDEGQGSPSEMVHSSEFRVDNNHLLLLMIHVFRENEEQLFKMIRMSTGHMEGNLQLLYVLLTDCYVYLLRKGATEKPYLVEEAVSYNELDYVSVGLDQQTVKLVCTNRRKQFLLDTADVALAEFFLASLKSAMIKGCREPPYPSILTDATMEKLALAKFVAQESKCEASAVTVRFYGLVHWEDPTDESLGPTPCHCSPPEGTITKEGMLHYKAGTSYLGKEHWKTCFVVLSNGILYQYPDRTDVIPLLSVNMGGEQCGGCRRANTTDRPHAFQVILSDRPCLELSAESEAEMAEWMQHLCQAVSKGVIPQGVAPSPCIPCCLVLTDDRLFTCHEDCQTSFFRSLGTAKLGDISAVSTEPGKEYCVLEFSQDSQQLLPPWVIYLSCTSELDRLLSALNSGWKTIYQVDLPHTAIQEASNKKKFEDALSLIHSAWQRSDSLCRGRASRDPWC

SEQ ID NO: 9943 - protein, 1019 aa, Homo sapiens
MEPGEVKDRILENISLSVKKLQSYFAACEDEIPAIRNHDKVLQRLCEHLDHALLYGLQDLSSGYWVLVVHFTRREAIKQIEVLQHVATNLGRSRAWLYLALNENSLESYLRLFQENLGLLHKYYVKNALVCSHDHLTLFLTLVSGLEFIRFELDLDAPYLDLAPYMPDYYKPQYLLDFEDRLPSSVHGSDSLSLNSFNSVTSTNLEWDDSAIAPSSEDYDFGDVFPAVPSVPSTDWEDGDLTDTVSGPRSTASDLTSSKASTRSPTQRQNPFNEEPAETVSSSDTTPVHTTSQEKEEAQALDPPDACTELEVIRVTKKKKIGKKKKSRSDEEASPLHPACSQKKCAKQGDGDSRNGSPSLGRDSPDTMLASPQEEGEGPSSTTESSERSEPGLLIPEMKDTSMERLGQPLSKVIDQLNGQLDPSTWCSRAEPPDQSFRTGSPGDAPERPPLCDFSEGLSAPMDFYRFTVESPSTVTSGGGHHDPAGLGQPLHVPSSPEAAGQEEEGGGGEGQTPRPLEDTTREAQELEAQLSLVREGPVSEPEPGTQEVLCQLKRDQPSPCLSSAEDSGVDEGQGSPSEMVHSSEFRVDNNHLLLLMIHVFRENEEQLFKMIRMSTGHMEGNLQLLYVLLTDCYVYLLRKGATEKPYLVEEAVSYNELDYVSVGLDQQTVKLVCTNRRKQFLLDTADVALAEFFLASLKSAMIKGCREPPYPSILTDATMEKLALAKFVAQESKCEASAVTVRFYGLVHWEDPTDESLGPTPCHCSPPEGTITKEGMLHYKAGTSYLGKEHWKTCFVVLSNGILYQYPDRTDVIPLLSVNMGGEQCGGCRRANTTDRPHAFQVILSDRPCLELSAESEAEMAEWMQHLCQAVSKGVIPQGVAPSPCIPCCLVLTDDRLFTCHEDCQTSFFRSLGTAKLGDISAVSTEPGKEYCVLEFSQDSQQLLPPWVIYLSCTSELDRLLSALNSGWKTIYQVDLPHTAIQEASNKKKFEDALSLIHSAWQRSDSLCRGRASRDPWC

SEQ ID NO: 9944 - protein, 781 aa, Homo sapiens
MVRVLRSMCLPQLCSHILSVCSGTTSDRNVYSVPGSQYLYNQPSCYRGFQTVKHRNENTCPLPQEMKALFKKKTYDEKKTYDQQKFDSERADGTISSEIKSARGSHHLSIYAENSLKSDGYHKRTDRKSRIIAKNVSTSKPEFEFTTLDFPELQGAENNMSEIQKQPKWGPVHSVSTDISLLREVVKPAAVLSKGEIVVKNNPNESVTANAATNSPSCTRELSWTPMGYVVRQTLSTELSAAPKNVTSMINLKTIASSADPKNVSIPSSEALSSDPSYNKEKHIIHPTQKSKASQGSDLEQNEASRKNKKKKEKSTSKYEVLTVQEPPRIEDAEEFPNLAVASERRDRIETPKFQSKQQPQDNFKNNVKKSQLPVQLDLGGMLTALEKKQHSQHAKQSSKPVVVSVGAVPVLSKECASGERGRRMSQMKTPHNPLDSSAPLMKKGKQREIPKAKKPTSLKKIILKERQERKQRLQENAVSPAFTSDDTQDGESGGDDQFPEQAELSGPEGMDELISTPSVEDKSEEPPGTELQRDTEASHLAPNHTTFPKIHSRRFRDYCSQMLSKEVDACVTDLLKELVRFQDRMYQKDPVKAKTKRRLVLGLREVLKHLKLKKLKCVIISPNCEKIQSKGGLDDTLHTIIDYACEQNIPFVFALNRKALGRSLNKAVPVSVVGIFSYDGAQDQFHKMVELTVAARQAYKTMLENVQQELVGEPRPQAPPSLPTQGPSCPAEDGPPALKEKEEPHYIEIWKKHLEAYSGCTLELEESLEASTSQMMNLNL

SEQ ID NO: 9945 - protein, 217 aa, Homo sapiens
MAVFLQLLPLLLSRAQGNPGASLDGRPGDRVNLSCGGVSHPIRWVWAPSFPACKGLSKGRRPILWASSSGTPTVPPLQPFVGRLRSLDSGIRRLELLLSAGDSGTFFCKGRHEDESRTVLHVLGDRTYCKAPGPTHGACPRNRFDHSLDLLCPPHIAPLVKTEPQRPVKEEEPKIPGDLDQEPSLLYADLDHLALSRPRRLSTADPADASTIYAVVV

SEQ ID NO: 9946 - protein, 854 aa, Homo sapiens
MASEGPREPESEGIKLSADVKPFVPRFAGLNVAWLESSEACVFPSSAATYYPFVQEPPVTEQKIYTEDMAFGASTFPPQYLSSEITLHPYAYSPYTLDSTQNVYSVPGSQYLYNQPSCYRGFQTVKHRNENTCPLPQEMKALFKKKTYDEKKTYDQQKFDSERADGTISSEIKSARGSHHLSIYAENSLKSDGYHKRTDRKSRIIAKNVSTSKPEFEFTTLDFPELQGAENNMSEIQKQPKWGPVHSVSTDISLLREVVKPAAVLSKGEIVVKNNPNESVTANAATNSPSCTRELSWTPMGYVVRQTLSTELSAAPKNVTSMINLKTIASSADPKNVSIPSSEALSSDPSYNKEKHIIHPTQKSKASQGSDLEQNEASRKNKKKKEKSTSKYEVLTVQEPPRIEDAEEFPNLAVASERRDRIETPKFQSKQQPQDNFKNNVKKSQLPVQLDLGGMLTALEKKQHSQHAKQSSKPVVVSVGAVPVLSKECASGERGRRMSQMKTPHNPLDSSAPLMKKGKQREIPKAKKPTSLKKIILKERQERKQRLQENAVSPAFTSDDTQDGESGGDDQFPEQAELSGPEGMDELISTPSVEDKSEEPPGTELQRDTEASHLAPNHTTFPKIHSRRFRDYCSQMLSKEVDACVTDLLKELVRFQDRMYQKDPVKAKTKRRLVLGLREVLKHLKLKKLKCVIISPNCEKIQSKGGLDDTLHTIIDYACEQNIPFVFALNRKALGRSLNKAVPVSVVGIFSYDGAQDQFHKMVELTVAARQAYKTMLENVQQELVGEPRPQAPPSLPTQGPSCPAEDGPPALKEKEEPHYIEIWKKHLEAYSGCTLELEESLEASTSQMMNLNL

SEQ ID NO: 9947 - protein, 237 aa, Homo sapiens
MAVFLQLLPLLLSRAQGNPGASLDGRPGDRVNLSCGGVSHPIRWVWAPSFPACKGLSKGRRPILWASSSGTPTVPPLQPFVGRLRSLDSGIRRLELLLSAGDSGTFFCKGRHEDESRTVLHVLGDRTYCKAPGPTHGSVYPQLLIPLLGAGLVLGLGALGLVWWLHRRLPPQPIRPLPRFALSPPHSSTCENRAPEASKGGRAQDSRGPGPGTEPALCGSGPSSPQQAPPAVHSGPC

SEQ ID NO: 9948 - protein, 222 aa, Homo sapiens
MAVFLQLLPLLLSRAQGNPGASLDGRPGDRVNLSCGGVSHPIRWVWAPSFPACKGLSKGRRPILWASSSGTPTVPPLQPFVGRLRSLDSGIRRLELLLSAGDSGTFFCKGRHEDESRTVLHVLGDRTYCKAPGPTHGSVYPQLLIPLLGAGLVLGLGALGLVWWLHRRLPPQPIRPLPRFALSPPHSSTCENRAPEASKGGRAQDSRGPGPGTGKGMGMGRG

SEQ ID NO: 9949 - protein, 398 aa, Homo sapiens
MELEEGKAGSGLRQYYLSKIEELQLIVNDKSQNLRRLQAQRNELNAKVRLLREELQLLQEQGSYVGEVVRAMDKKKVLVKVHPEGKFVVDVDKNIDINDVTPNCRVALRNDSYTLHKILPNKVDPLVSLMMVEKVPDSTYEMIGGLDKQIKEIKEVIELPVKHPELFEALGIAQPKGVLLYGPPGTGKTLLARAVAHHTDCTFIRVSGSELVQKFIGEGARMVRELFVMAREHAPSIIFMDEIDSIGSSRLEGGSGGDSEVQRTMLELLNQLDGFEATKNIKVIMATNRIDILDSALLRPGRIDRKIEFPPPNEEARLDILKIHSRKMNLTRGINLRKIAELMPGASGAEVKGVCTEAGMYALRERRVHVTQEDFEMAVAKVMQKDSEKNMSIKKLWK

SEQ ID NO: 9950 - protein, 1669 aa, Homo sapiens
MGPRLSVWLLLLPAALLLHEEHSRAAAKGGCAGSGCGKCDCHGVKGQKGERGLPGLQGVIGFPGMQGPEGPQGPPGQKGDTGEPGLPGTKGTRGPPGASGYPGNPGLPGIPGQDGPPGPPGIPGCNGTKGERGPLGPPGLPGFAGNPGPPGLPGMKGDPGEILGHVPGMLLKGERGFPGIPGTPGPPGLPGLQGPVGPPGFTGPPGPPGPPGPPGEKGQMGLSFQGPKGDKGDQGVSGPPGVPGQAQVQEKGDFATKGEKGQKGEPGFQGMPGVGEKGEPGKPGPRGKPGKDGDKGEKGSPGFPGEPGYPGLIGRQGPQGEKGEAGPPGPPGIVIGTGPLGEKGERGYPGTPGPRGEPGPKGFPGLPGQPGPPGLPVPGQAGAPGFPGERGEKGDRGFPGTSLPGPSGRDGLPGPPGSPGPPGQPGYTNGIVECQPGPPGDQGPPGIPGQPGFIGEIGEKGQKGESCLICDIDGYRGPPGPQGPPGEIGFPGQPGAKGDRGLPGRDGVAGVPGPQGTPGLIGQPGAKGEPGEFYFDLRLKGDKGDPGFPGQPGMPGRAGSPGRDGHPGLPGPKGSPGSVGLKGERGPPGGVGFPGSRGDTGPPGPPGYGPAGPIGDKGQAGFPGGPGSPGLPGPKGEPGKIVPLPGPPGAEGLPGSPGFPGPQGDRGFPGTPGRPGLPGEKGAVGQPGIGFPGPPGPKGVDGLPGDMGPPGTPGRPGFNGLPGNPGVQGQKGEPGVGLPGLKGLPGLPGIPGTPGEKGSIGVPGVPGEHGAIGPPGLQGIRGEPGPPGLPGSVGSPGVPGIGPPGARGPPGGQGPPGLSGPPGIKGEKGFPGFPGLDMPGPKGDKGAQGLPGITGQSGLPGLPGQQGAPGIPGFPGSKGEMGVMGTPGQPGSPGPVGAPGLPGEKGDHGFPGSSGPRGDPGLKGDKGDVGLPGKPGSMDKVDMGSMKGQKGDQGEKGQIGPIGEKGSRGDPGTPGVPGKDGQAGQPGQPGPKGDPGISGTPGAPGLPGPKGSVGGMGLPGTPGEKGVPGIPGPQGSPGLPGDKGAKGEKGQAGPPGIGIPGLRGEKGDQGIAGFPGSPGEKGEKGSIGIPGMPGSPGLKGSPGSVGYPGSPGLPGEKGDKGLPGLDGIPGVKGEAGLPGTPGPTGPAGQKGEPGSDGIPGSAGEKGEPGLPGRGFPGFPGAKGDKGSKGEVGFPGLAGSPGIPGSKGEQGFMGPPGPQGQPGLPGSPGHATEGPKGDRGPQGQPGLPGLPGPMGPPGLPGIDGVKGDKGNPGWPGAPGVPGPKGDPGFQGMPGIGGSPGITGSKGDMGPPGVPGFQGPKGLPGLQGIKGDQGDQGVPGAKGLPGPPGPPGPYDIIKGEPGLPGPEGPPGLKGLQGLPGPKGQQGVTGLVGIPGPPGIPGFDGAPGQKGEMGPAGPTGPRGFPGPPGPDGLPGSMGPPGTPSVDHGFLVTRHSQTIDDPQCPSGTKILYHGYSLLYVQGNERAHGQDLGTAGSCLRKFSTMPFLFCNINNVCNFASRNDYSYWLSTPEPMPMSMAPITGENIRPFISRCAVCEAPAMVMAVHSQTIQIPPCPSGWSSLWIGYSFVMHTSAGAEGSGQALASPGSCLEEFRSAPFIECHGRGTCNYYANAYSFWLATIERSEMFKKPTPSTLKAGELRTHVSRCQVCMRRT

SEQ ID NO: 9951 - protein, 352 aa, Homo sapiens
MLRLLASGCARGPGPGVGARPAAGLFHPGRRQSRQASDAPRNQPPSPEFVARPVGVCSMMRLPVQTSPEGLDAAFIGVPLDTGTSNRPGARFGPRRIREESVMLGTVNPSTGALPFQSLMVADLGDVNVNLYNLQDSCRRIQEAYEKIVAAGCIPLTLGGDHTITYPILQAMAKKHGPVGLLHVDAHTDTTDKALGEKLYHGAPFRRCVDEGLLDCKRVVQIGIRGSSTTLDPYRYNRSQGFRVVLAEDCWMKSLVPLMGEVRQQMGGKPIYISFDIDALDPAYAPGTGTPEIAGLTPSQALEIIRGCQGLNVMGCDLVEVSPPYDLSGNTALLAANLLFEMLCALPKVTTV

SEQ ID NO: 9952 - protein, 594 aa, Homo sapiens
MLPRTKYNRFRNDSVTSVDDLLHSLSVSGGGGKVSAARATPAAAPYLVSGEALRKAPDDGPGSLGHLLHKVSHLKLSSSGLRGLSSAARERAGARLSGSCSAPSLAAPDGSAPSAPRAPAMSAARKGRPGDEPLPRPPRGAPHASDQVLGPGVTYVVKYLGCIEVLRSMRSLDFSTRTQITREAISRVCEAVPGAKGAFKKRKPPSKMLSSILGKSNLQFAGMSISLTISTASLNLRTPDSKQIIANHHMRSISFASGGDPDTTDYVAYVAKDPVNRRACHILECCDGLAQDVIGSIGQAFELRFKQYLQCPTKIPALHDRMQSLDEPWTEEEGDGSDHPYYNSIPSKMPPPGGFLDTRLKPRPHAPDTAQFAGKEQTYYQGRHLGDTFGEDWQQTPLRQGSSDIYSTPEGKLHVAPTGEAPTYVNTQQIPPQAWPAAVSSAESSPRKDLFDMKPFEDALKNQPLGPVLSKAASVECISPVSPRAPDAKMLEELQAETWYQGEMSRKEAEGLLEKDGDFLVRKSTTNPGSFVLTGMHNGQAKHLLLVDPEGTIRTKDRVFDSISHLINHHLESSLPIVSAGSELCLQQPVERKQ

SEQ ID NO: 9953 - protein, 1328 aa, Homo sapiens
MSSMPKPERHAESLLDICHDTNSSPTDLMTVTKNQNIILQSISRSEEFDQDGDCSHSTLVNEEEDPSGGRQDWQPRTEGVEITVTFPRDVSPPQEMSQEDLKEKNLINSSLQEWAQAHAVSHPNEIETVELRKKKLTMRPLVLQKEESSRELCNVNLGFLLPRSCLELNISKSVTREDAPHFLKEQQRKSEEFSTSHMKYSGRSIKFLLPPLSLLPTRSGVLTIPQNHKFPKEKERNIPSLTSFVPKLSVSVRQSDELSPSNEPPGALVKSLMDPTLRSSDGFIWSRNMCSFPKTNHHRQCLEKEENWKSKEIEECNKIEITHFEKGQSLVSFENLKEGNIPAVREEDIDCHGSKTRKPEEENSQYLSSRKNESSVAKNYEQDPEIVCTIPSKFQETQHSEITPSQDEEMRNNKAASKRVSLHKNEAMEPNNILEECTVLKSLSSVVFDDPIDKLPEGCSSMETNIKISIAERAKPEMSRMVPLIHITFPVDGSPKEPVIAKPSLQTRKGTIHNNHSVNIPVHQENDKHKMNSHRSKLDSKTKTSKKTPQNFVISTEGPIKPTMHKTSIKTQIFPALGLVDPRPWQLPRFQKKMPQIAKKQSTHRTQKPKKQSFPCICKNPGTQKSCVPLSVQPTEPRLNYLDLKYSDMFKEINSTANGPGIYEMFGTPVYCHVRETERDENTYYREICSAPSGRRITNKCRSSHSERKSNIRTRLSQKKTHMKCPKTSFGIKQEHKVLISKEKSSKAVHSNLHDIENGDGISEPDWQIKSSGNEFLSSKDEIHPMNLAQTPEQSMKQNEFPPVSDLSIVEEVSMEESTGDRDISNNQILTTSLRDLQELEELHHQIPFIPSEDSWAVPSEKNSNKYVQQEKQNTASLSKVNASRILTNDLEFDSVSDHSKTLTNFSFQAKQESASSQTYQYWVHYLDHDSLANKSITYQMFGKTLSGTNSISQEIMDSVNNEELTDELLGCLAAELLALDEKDNNSCQKMANETDPENLNLVLRWRGSTPKEMGRETTKVKIQRHSSGLRIYDREEKFLISNEKKIFSENSLKSEEPILWTKGEILGKGAYGTVYCGLTSQGQLIAVKQVALDTSNKLAAEKEYRKLQEEVDLLKALKHVNIVAYLGTCLQENTVSIFMEFVPGGSISSIINRFGPLPEMVFCKYTKQILQGVAYLHENCVVHRDIKGNNVMLMPTGIIKLIDFGCARRLAWAGLNGTHSDMLKSMHGTPYWMAPEVINESGYGRKSDIWSIGCTVFEMATGKPPLASMDRMAAMFYIGAHRGLMPPLPDHFSENAADFVRMCLTRDQHERPSALQLLKHSFLERSH

SEQ ID NO: 9954 - protein, 526 aa, Homo sapiens
LGGRSSCEDPGCPRDEERAPRMGCMKSKFLQVGGNTFSKTETSASPHCPVYVPDPTSTIKPGPNSHNSNTPGIREAGSEDIIVVALYDYEAIHHEDLSFQKGDQMVVLEESGEWWKARSLATRKEGYIPSNYVARVDSLETEEWFFKGISRKDAERQLLAPGNMLGSFMIRDSETTKGSYSLSVRDYDPRQGDTVKHYKIRTLDNGGFYISPRSTFSTLQELVDHYKKGNDGLCQKLSVPCMSSKPQKPWEKDAWEIPRESLKLEKKLGAGQFGEVWMATYNKHTKVAVKTMKPGSMSVEAFLAEANVMKTLQHDKLVKLHAVVTKEPIYIITEFMAKGSLLDFLKSDEGSKQPLPKLIDFSAQIAEGMAFIEQRNYIHRDLRAANILVSASLVCKIADFGLARVIEDNEYTAREGAKFPIKWTAPEAINFGSFTIKSDVWSFGILLMEIVTYGRIPYPGMSNPEVIRALERGYRMPRPENCPEELYNIMMRCWKNRPEERPTFEYIQSVLDDFYTATESQYQQQP

SEQ ID NO: 9955 - protein, 1338 aa, Homo sapiens
MASPPRHGPPGPASGDGPNLNNNNNNNNHSVRKCGYLRKQKHGHKRFFVLRGPGAGGDEATAGGGSAPQPPRLEYYESEKKWRSKAGAPKRVIALDCCLNINKRADAKHKYLIALYTKDEYFAVAAENEQEQEGWYRALTDLVSEGRAAAGDAPPAAAPAASCSASLPGALGGSAGAAGAEDSYGLVAPATAAYREVWQVNLKPKGLGQSKNLTGVYRLCLSARTIGFVKLNCEQPSVTLQLMNIRRCGHSDSFFFIEVGRSAVTGPGELWMQADDSVVAQNIHETILEAMKALKELFEFRPRSKSQSSGSSATHPISVPGARRHHHLVNLPPSQTGLVRRSRTDSLAATPPAAKCSSCRVRTASEGDGGAAAGAAAAGARPVSVAGSPLSPGPVRAPLSRSHTLSGGCGGRGSKVALLPAGGALQHSRSMSMPVAHSPPAATSPGSLSSSSGHGSGSYPPPPGPHPPLPHPLHHGPGQRPSSGSASASGSPSDPGFMSLDEYGSSPGDLRAFCSHRSNTPESIAETPPARDGGGGGEFYGYMTMDRPLSHCGRSYRRVSGDAAQDLDRGLRKRTYSLTTPARQRPVPQPSSASLDEYTLMRATFSGSAGRLCPSCPASSPKVAYHPYPEDYGDIEIGSHRSSSSNLGADDGYMPMTPGAALAGSGSGSCRSDDYMPMSPASVSAPKQILQPRAAAAAAAAVPSAGPAGPAPTSAAGRTFPASGGGYKASSPAESSPEDSGYMRMWCGSKLSMEHADGKLLPNGDYLNVSPSDAVTTGTPPDFFSAALHPGGEPLRGVPGCCYSSLPRSYKAPYTCGGDSDQYVLMSSPVGRILEEERLEPQATPGPSQAASAFGAGPTQPPHPVVPSPVRPSGGRPEGFLGQRGRAVRPTRLSLEGLPSLPSMHEYPLPPEPKSPGEYINIDFGEPGARLSPPAPPLLASAASSSSLLSASSPASSLGSGTPGTSSDSRQRSPLSDYMNLDFSSPKSPKPGAPSGHPVGSLDGLLSPEASSPYPPLPPRPSASPSSSLQPPPPPPAPGELYRLPPASAVATAQGPGAASSLSSDTGDNGDYTEMAFGVAATPPQPIAAPPKPEAARVASPTSGVKRLSLMEQVSGVEAFLQASQPPDPHRGAKVIRADPQGGRRRHSSETFSSTTTVTPVSPSFAHNPKRHNSASVENVSLRKSSEGGVGVGPGGGDEPPTSPRQLQPAPPLAPQGRPWTPGQPGGLVGCPGSGGSPMRRETSAGFQNGLNYIAIDVREEPGLPPQPQPPPPPLPQPGDKSSWGRTRSLGGLISAVGVGSTGGGCGGPGPGALPPANTYASIDFLSHHLKEATIVKE

SEQ ID NO: 9956 - protein, 525 aa, Homo sapiens
LGGRSSCEDPGCPRDEERAPRMGCMKSKFLQVGGNTFSKTETSASPHCPVYVPDPTSTIKPGPNSHNSNTPGIREGSEDIIVVALYDYEAIHHEDLSFQKGDQMVVLEESGEWWKARSLATRKEGYIPSNYVARVDSLETEEWFFKGISRKDAERQLLAPGNMLGSFMIRDSETTKGSYSLSVRDYDPRQGDTVKHYKIRTLDNGGFYISPRSTFSTLQELVDHYKKGNDGLCQKLSVPCMSSKPQKPWEKDAWEIPRESLKLEKKLGAGQFGEVWMATYNKHTKVAVKTMKPGSMSVEAFLAEANVMKTLQHDKLVKLHAVVTKEPIYIITEFMAKGSLLDFLKSDEGSKQPLPKLIDFSAQIAEGMAFIEQRNYIHRDLRAANILVSASLVCKIADFGLARVIEDNEYTAREGAKFPIKWTAPEAINFGSFTIKSDVWSFGILLMEIVTYGRIPYPGMSNPEVIRALERGYRMPRPENCPEELYNIMMRCWKNRPEERPTFEYIQSVLDDFYTATESQYQQQP

SEQ ID NO: 9957 - protein, 325 aa, Homo sapiens
MDQYCILGRIGEGAHGIVFKAKHVETGEIVALKKVALRRLEDGFPNQALREIKALQEMEDNQYVVQLKAVFPHGGGFVLAFEFMLSDLAEVVRHAQRPLAQAQVKSYLQMLLKGVAFCHANNIVHRDLKPANLLISASGQLKIADFGLARVFSPDGSRLYTHQVATRSVGCIMGELLNGSPLFPGKNDIEQLCYVLRILGTPNPQVWPELTELPDYNKISFKEQVPMPLEEVLPDVSPQALDLLGQFLLYPPHQRIAASKALLHQYFFTAPLPAHPSELPIPQRLGGPAPKAHPGPPHIHDFHVDRPLEESLLNPELIRPFILEG

SEQ ID NO: 9958 - protein, 534 aa, Homo sapiens
MFQFHAGSWESWCCCCLIPADRPWDRGQHWQLEMADTRSVHETRFEAAVKVIQSLPKNGSFQPTNEMMLKFYSFYKQATEGPCKLSRPGFWDPIGRYKWDAWSSLGDMTKEEAMIAYVEEMKKIIETMPMTEKVEELLRVIGPFYEIVEDKKSGRSSDITSVRLEKISKCLEDLGNVLTSTPNAKTVNGKAESSDSGAESEEEEAQEEVKGAEQSDNDKKMMKKSADHKNLEVIVTNGYDKDGFVQDIQNDIHASSSLNGRSTEEVKPIDENLGQTGKSAVCIHQDINDDHVEDVTGIQHLTSDSDSEVYCDSMEQFGQEESLDSFTSNNGPFQYYLGGHSSQPMENSGFREDIQVPPGNGNIGNMQVVAVEGKGEVKHGGEDGRNNSGAPHREKRGGETDEFSNVRRGRGHRMQHLSEGTKGRQVGSGGDGERWGSDRGSRGSLNEQIALVLMRLQEDMQNVLQRLQKLETLTALQAKSSTSTLQTAPQPTSQRPSWWPFEMSPGVLTFAIIWPFIAQWLVYLYYQRRRRKLN

SEQ ID NO: 9959 - protein, 356 aa, Homo sapiens
MSRPLLITFTPATDPSDLWKDGQQQPQPEKPESTLDGAAARAFYEALIGDESSAPDSQRSQTEPARERKRKKRRIMKAPAAEAVAEGASGRHGQGRSLEAEDKMTHRILRAAQEGDLPELRRLLEPHEAGGAGGNINARDAFWWTPLMCAARAGQGAAVSYLLGRGAAWVGVCELSGRDAAQLAEEAGFPEVARMVRESHGETRSPENRSPTPSLQYCENCDTHFQDSNHRTSTAHLLSLSQGPQPPNLPLGVPISSPGFKLLLRGGWEPGMGLGPRGEGRANPIPTVLKRDQEGLGYRSAPQPRVTHFPAWDTRAVAGRERPPRVATLSWREERRREEKDRAWERDLRTYMNLEF

SEQ ID NO: 9960 - protein, 523 aa, Homo sapiens
MFQFHAGSWESWCCCCLIPADRPWDRGQHWQLEMADTRSVHETRFEAAVKVIQSLPKNGSFQPTNEMMLKFYSFYKQATEGPCKLSRPGFWDPIGRYKWDAWSSLGDMTKEEAMIAYVEEMKKIIETMPMTEKVEELLRVIGPFYEIVEDKKSGRSSDITSDLGNVLTSTPNAKTVNGKAESSDSGAESEEEEAQEEVKGAEQSDNDKKMMKKSADHKNLEVIVTNGYDKDGFVQDIQNDIHASSSLNGRSTEEVKPIDENLGQTGKSAVCIHQDINDDHVEDVTGIQHLTSDSDSEVYCDSMEQFGQEESLDSFTSNNGPFQYYLGGHSSQPMENSGFREDIQVPPGNGNIGNMQVVAVEGKGEVKHGGEDGRNNSGAPHREKRGGETDEFSNVRRGRGHRMQHLSEGTKGRQVGSGGDGERWGSDRGSRGSLNEQIALVLMRLQEDMQNVLQRLQKLETLTALQAKSSTSTLQTAPQPTSQRPSWWPFEMSPGVLTFAIIWPFIAQWLVYLYYQRRRRKLN

SEQ ID NO: 9961 - protein, 490 aa, Homo sapiens
MADTRSVHETRFEAAVKVIQSLPKNGSFQPTNEMMLKFYSFYKQATEGPCKLSRPGFWDPIGRYKWDAWSSLGDMTKEEAMIAYVEEMKKIIETMPMTEKVEELLRVIGPFYEIVEDKKSGRSSDITSDLGNVLTSTPNAKTVNGKAESSDSGAESEEEEAQEEVKGAEQSDNDKKMMKKSADHKNLEVIVTNGYDKDGFVQDIQNDIHASSSLNGRSTEEVKPIDENLGQTGKSAVCIHQDINDDHVEDVTGIQHLTSDSDSEVYCDSMEQFGQEESLDSFTSNNGPFQYYLGGHSSQPMENSGFREDIQVPPGNGNIGNMQVVAVEGKGEVKHGGEDGRNNSGAPHREKRGGETDEFSNVRRGRGHRMQHLSEGTKGRQVGSGGDGERWGSDRGSRGSLNEQIALVLMRLQEDMQNVLQRLQKLETLTALQAKSSTSTLQTAPQPTSQRPSWWPFEMSPGVLTFAIIWPFIAQWLVYLYYQRRRRKLN

SEQ ID NO: 9962 - protein, 269 aa, Homo sapiens
MIRTLLLSTLVAGALSCGVSTYAPDMSRMLGGEEARPNSWPWQVSLQYSSNGQWYHTCGGSLIANSWVLTAAHCISSSGIYRVMLGQHNLYVAESGSLAVSVSKIVVHKDWNSDQVSKGNDIALLKLANPVSLTDKIQLACLPPAGTILPNNYPCYVTGWGRLQTNGALPDDLKQGQLLVVDYATCSSSGWWGSTVKTNMICAGGDGVICTCNGDSGGPLNCQASDGRWEVHGIGSLTSVLGCNYYYKPSIFTRVSNYNDWINSVIANN

SEQ ID NO: 9963 - protein, 458 aa, Homo sapiens
MTRGAWMCRQYDDGLKIWLAAPRENEKPFIDSERAQKWRLSLASLLFFTVLLSDHLWFCAEAKLTRARDKEHQQQQRQQQQQQQQQRQRQQQQQQRRQQEPSWPALLASMGESSPAAQAHRLLSASSSPTLPPSPGDGGGGGGKGNRGKDDRGKALFLGNSAKPVWRLETCYPQGASSGQCFTVENADAVCARNWSRGAAGGDGQEVRSKHPTPLWNLSDFYLSFCNSYTLWELFSGLSSPNTLNCSLDVVLKEGGEMTTCRQCVEAYQDYDHHAQEKYEEFESVLHKYLQSEEYSVKSCPEDCKIVYKAWLCSQYFEVTQFNCRKTIPCKQYCLEVQTRCPFILPDNDEVIYGGLSSFICTGLYETFLTNDEPECCDVRREEKSNNPSKGTVEKSGSCHRTSLTVSSATRLCNSRLKLCVLVLILLHTVLTASAAQNTAGLSFGGINTLEENSTNEE

SEQ ID NO: 9964 - protein, 279 aa, Homo sapiens
MSRPKNQNYKGHGLSKGKEREQRASIRFKTTLMNTLMDVLRHRPGWVEVKDEGEWDFYWCDVSWLRENFDHTYMDEHVRISHFRNHYELTRKNYMVKNLKRFRKQLEREAGKLEAAKCDFFPKTFEMPCEYHLFVEEFRKNPGITWIMKPVARSQGKGIFLFRRLKDIVDWRKDTRSSDDQKDDIPVENYVAQRYIENPYLIGGRKFDLRVYVLVMSMFTSPTWLCKKHLPTTTQRRAASGRCSASGSTWRPNTGPRQWRHSSGTSTTSLSKACRVCRR

SEQ ID NO: 9965 - protein, 439 aa, Homo sapiens
MVPSREALLGPGTTAIRCPKKLQNQNYKGHGLSKGKEREQRASIRFKTTLMNTLMDVLRHRPGWVEVKDEGEWDFYWCDVSWLRENFDHTYMDEHVRISHFRNHYELTRKNYMVKNLKRFRKQLEREAGKLEAAKCDFFPKTFEMPCEYHLFVEEFRKNPGITWIMKPVARSQGKGIFLFRRLKDIVDWRKDTRSSDDQKDDIPVENYVAQRYIENPYLIGGRKFDLRVYVLVMSVFAECLLWSGHRRQDVHLTNVAVQKTSPDYHPKKGCKWTLQRFRQYLASKHGPEAVETLFRDIDNIFVKSLQSVQKVIISDKHCFELYGYDILIDQDLKPWLLEVNASPSLTASSQEDYELKTCLLEDTLHVVDMEARLTGREKRVGGFDLMWNDGPVSREEGAPDLSGMGNFVTNTHLGCVNDRKKQLRQLFCSLQVQKKASS

SEQ ID NO: 9966 - protein, 879 aa, Homo sapiens
MDPTAGSKKEPGGGAATEEGVNRIAVPKPPSIEEFSIVKPISRGAFGKVYLGQKGGKLYAVKVVKKADMINKNMTHQVQAERDALALSKSPFIVHLYYSLQSANNVYLVMEYLIGGDVKSLLHIYGYFDEEMAVKYISEVALALDYLHRHGIIHRDLKPDNMLISNEGHIKLTDFGLSKVTLNRDINMMDILTTPSMAKPRQDYSRTPGQVLSLISSLGFNTPIAEKNQDPANILSACLSETSQLSQGLVCPMSVDQKDTTPYSSKLLKSCLETVASNPGMPVKCLTSNLLQSRKRLATSSASSQSHTFISSVESECHSSPKWEKDCQESDEALGPTMMSWNAVEKLCAKSANAIETKGFNKKDLELALSPIHNSSALPTTGRSCVNLAKKCFSGEVSWEAVELDVNNINMDTDTSQLGFHQSNQWAVDSGGISEEHLGKRSLKRNFELVDSSPCKKIIQNKKTCVEYKHNEMTNCYTNQNTGLTVEVQDLKLSVHKSQQNDCANKENIVNSFTDKQQTPEKLPIPMIAKNLMCELDEDCEKNSKRDYLSSSFLCSDDDRASKNISMNSDSSFPGISIMESPLESQPLDSDRSIKESSFEESNIEDPLIVTPDCQEKTSPKGVENPAVQESNQKMLGPPLEVLKTLASKRNAVAFRSFNSHINASNNSEPSRMNMTSLDAMDISCAYSGSYPMAITPTQKRRSCMPHQQTPNQIKSGTPYRTPKSVRRGVAPVDDGRILGTPDYLAPELLLGRAHGPAVDWWALGVCLFEFLTGIPPFNDETPQQVFQNILKRDIPWPEGEEKLSDNAQSAVEILLTIDDTKRAGMKELKRHPLFSDVDWENLQHQTMPFIPQPDDETDTSYFEARNTAQHLTVSGFSL

SEQ ID NO: 9967 - protein, 878 aa, Homo sapiens
MDPTAGSKKEPGGGAATEEGVNRIAVPKPPSIEEFSIVKPISRGAFGKVYLGQKGGKLYAVKVVKKADMINKNMTHQVQAERDALALSKSPFIVHLYYSLQSANNVYLVMEYLIGGDVKSLLHIYGYFDEEMAVKYISEVALALDYLHRHGIIHRDLKPDNMLISNEGHIKLTDFGLSKVTLNRDINMMDILTTPSMAKPRQDYSRTPGQVLSLISSLGFNTPIAEKNQDPANILSACLSETSQLSQGLVCPMSVDQKDTTPYSSKLLKSCLETVASNPGMPVKCLTSNLLQSRKRLATSSASSQSHTFISSVESECHSSPKWEKDCQESDEALGPTMMSWNAVEKLCAKSANAIETKGFNKKDLELALSPIHNSSALPTTGRSCVNLAKKCFSGEVSWEAVELDVNNINMDTDTSQLGFHQSNQWAVDSGGISEEHLGKRSLKRNFELVDSSPCKKIIQNKKTCVEYKHNEMTNCYTNQNTGLTVEVQDLKLSVHKSQQNDCANKENIVNSFTDKQQTPEKLPIPMIAKNLMCELDEDCEKNSKRDYLSSSFLCSDDDRASKNISMNSDSSFPGISIMESPLESQPLDSDRSIKESSFEESNIEDPLIVTPDCQEKTSPKGVENPAVQESNQKMLGPPLEVLKTLASKRNAVAFRSFNSHINASNNSEPSRMNMTSLDAMDISCAYSGSYPMAITPTQKRRSCMPHQTPNQIKSGTPYRTPKSVRRGVAPVDDGRILGTPDYLAPELLLGRAHGPAVDWWALGVCLFEFLTGIPPFNDETPQQVFQNILKRDIPWPEGEEKLSDNAQSAVEILLTIDDTKRAGMKELKRHPLFSDVDWENLQHQTMPFIPQPDDETDTSYFEARNTAQHLTVSGFSL

SEQ ID NO: 9968 - protein, 1259 aa, Homo sapiens
MGDTAKPYFVKRTKDRGTMDDDDFRRGHPQQDYLIIDDHAKGHGSKMEKGLQKKKITPGNYGNTPRKGPCAVSSNPYAFKNPIYSQPAWMNDSHKDQSKRWLSDEHTGNSDNWREFKPGPRIPVINRQRKDSFQENEDGYRWQDTRGCRTVRRLFHKDLTSLETTSEMEAGSPENKKQRSRPRKPRKTRNEENEQDGDLEGPVIDESVLSTKELLGLQQAEERLKRDCIDRLKRRPRNYPTAKYTCRLCDVLIESIAFAHKHIKEKRHKKNIKEKQEEELLTTLPPPTPSQINAVGIAIDKVVQEFGLHNENLEQRLEIKRIMENVFQHKLPDCSLRLYGSSCSRLGFKNSDVNIDIQFPAIIEGFSLSKLGNFNLQDIEKDVVIWEHTDSAAGDTGITKEEAPRETPIKRGQVSLILDVKHQPSVPVGQLWVELLRFYALEFNLADLVISIRVKELVSRELKDWPKKRIAIEDPYSVKRNVARTLNSQPVFEYILHCLRTTYKYFALPHKITKSSLLKPLNAITCISEHSKEVINHHPDVQTKDDKLKNSVLAQGPGATSSAANTCKVQPLTLKETAESFGSPPKEEMGNEHISVHPENSDCIQADVNSDDYKGDKVYHPETGRKNEKEKVGRKGKHLLTVDQKRGEHVVCGSTRNNESESTLDLEGFQNPTAKECEGLATLDNKADLDGESTEGTEELEDSLNHFTHSVQGQTSEMIPSDEEEEDDEEEEEEEEPRLTINQREDEDGMANEDELDNTYTGSGDEDALSEEDDELGEAAKYEDVKECGKHVERALLVELNKISLKEENVCEEKNSPVDQSDFFYEFSKLIFTKGKGLDCVRTIEELARVLRKHSGLRNILPITTAKVPIVKFFHLRSGLEVDISLYNTLALHNTRLLSAYSAIDPRVKYLCYTMKVFTKMCDIGDASRGSLSSYAYTLMVLYFLQQRNPPVIPVLQEIYKGEKKPEIFVDGWNIYFFDQIDELPTYWSECGKNTESVGQLWLGLLRFYTEEFDFKEHVISIRRKSLLTTFKKQWTSKYIVIEDPFDLNHNLGAGLSRKMTNFIMKAFINGRRVFGIPVKGFPKDYPSKMEYFFDPDVLTEGELAPNDRCCRICGKIGHFMKDCPMRRKVRRRRDQEDALNQRYPENKEKRSKEDKEIHNKYTEREVSTKEDKPIQCTPQKAKPMRAAADLGREKILRPPVEKWKRQDDKDLREKRCFICGREGHIKKECPQFKGSSGSLSSKYMTQGKASAKRTQQES

SEQ ID NO: 9969 - protein, 1495 aa, Homo sapiens
MGDTAKPYFVKRTKDRGTMDDDDFRRGHPQQDYLIIDDHAKGHGSKMEKGLQKKKITPGNYGNTPRKGPCAVSSNPYAFKNPIYSQPAWMNDSHKDQSKRWLSDEHTGNSDNWREFKPGPRIPVINRQRKDSFQENEDGYRWQDTRGCRTVRRLFHKDLTSLETTSEMEAGSPENKKQRSRPRKPRKTRNEENEQDGDLEGPVIDESVLSTKELLGLQQAEERLKRDCIDRLKRRPRNYPTAKYTCRLCDVLIESIAFAHKHIKEKRHKKNIKEKQEEELLTTLPPPTPSQINAVGIAIDKVVQEFGLHNENLEQRLEIKRIMENVFQHKLPDCSLRLYGSSCSRLGFKNSDVNIDIQFPAIMSQPDVLLLVQECLKNSDSFIDVDADFHARVPVVVCREKQSGLLCKVSAGNENACLTTKHLTALGKLEPKLVPLVIAFRYWAKLCSIDRPEEGGLPPYVFALMAIFFLQQRKEPLLPVYLGSWIEGFSLSKLGNFNLQDIEKDVVIWEHTDSAAGDTGITKEEAPRETPIKRGQVSLILDVKHQPSVPVGQLWVELLRFYALEFNLADLVISIRVKELVSRELKDWPKKRIAIEDPYSVKRNVARTLNSQPVFEYILHCLRTTYKYFALPHKITKSSLLKPLNAITCISEHSKEVINHHPDVQTKDDKLKNSVLAQGPGATSSAANTCKVQPLTLKETAESFGSPPKEEMGNEHISVHPENSDCIQADVNSDDYKGDKVYHPETGRKNEKEKVGRKGKHLLTVDQKRGEHVVCGSTRNNESESTLDLEGFQNPTAKECEGLATLDNKADLDGESTEGTEELEDSLNHFTHSVQGQTSEMIPSDEEEEDDEEEEEEEEPRLTINQREDEDGMANEDELDNTYTGSGDEDALSEEDDELGEAAKYEDVKECGKHVERALLVELNKISLKEENVCEEKNSPVDQSDFFYEFSKLIFTKGKSPTVVCSLCKREGHLKKDCPEDFKRIQLEPLPPLTPKFLNILDQVCIQCYKDFSPTIIEDQAREHIRQNLESFIRQDFPGTKLSLFGSSKNGFGFKQSDLDVCMTINGLETAEGLDCVRTIEELARVLRKHSGLRNILPITTAKVPIVKFFHLRSGLEVDISLYNTLALHNTRLLSAYSAIDPRVKYLCYTMKVFTKMCDIGDASRGSLSSYAYTLMVLYFLQQRNPPVIPVLQEIYKGEKKPEIFVDGWNIYFFDQIDELPTYWSECGKNTESVGQLWLGLLRFYTEEFDFKEHVISIRRKSLLTTFKKQWTSKYIVIEDPFDLNHNLGAGLSRKMTNFIMKAFINGRRVFGIPVKGFPKDYPSKMEYFFDPDVLTEGELAPNDRCCRICGKIGHFMKDCPMRRKVRRRRDQEDALNQRYPENKEKRSKEDKEIHNKYTEREVSTKEDKPIQCTPQKAKPMRAAADLGREKILRPPVEKWKRQDDKDLREKRCFICGREGHIKKECPQFKGSSGSLSSKYMTQGKASAKRTQQES

SEQ ID NO: 9970 - protein, 1132 aa, Homo sapiens
MEPNDSTSTAVEEPDSLEVLVKTLDSQTRTFIVGAQMNVKEFKEHIAASVSIPSEKQRLIYQGRVLQDDKKLQEYNVGGKVIHLVERAPPQTHLPSGASSGTGSASATHGGGSPPGTRGPGASVHDRNANSYVMVGTFNLPSDGSAVDVHINMEQAPIQSEPRVRLVMAQHMIRDIQTLLSRMETLPYLQCRGGPQPQHSQPPPQPPAVTPEPVALSSQTSEPVESEAPPREPMEAEEVEERAPAQNPELTPGPAPAGPTPAPETNAPNHPSPAEYVEVLQELQRLESRLQPFLQRYYEVLGAAATTDYNNNHEGREEDQRLINLVGESLRLLGNTFVALSDLRCNLACTPPRHLHVVRPMSHYTTPMVLQQAAIPIQINVGTTVTMTGNGTRPPPTPNAEAPPPGPGQASSVAPSSTNVESSAEGAPPPGPAPPPATSHPRVIRISHQSVEPVVMMHMNIQDSGTQPGGVPSAPTGPLGPPGHGQTLGQQVPGFPTAPTRVVIARPTPPQARPSHPGGPPVSGTLQGAGLGTNASLAQMVSGLVGQLLMQPVLVAQGTPGMAPPPAPATASASAGTTNTATTAGPAPGGPAQPPPTPQPSMADLQFSQLLGNLLGPAGPGAGGSGVASPTITVAMPGVPAFLQGMTDFLQATQTAPPPPPPPPPPPPAPEQQTMPPPGSPSGGAGSPGGLGLESLSPEFFTSVVQGVLSSLLGSLGARAGSSESIAAFIQRLSGSSNIFEPGADGALGFFGALLSLLCQNFSMVDVVMLLHGHFQPLQRLQPQLRSFFHQHYLGGQEPTPSNIRMATHTLITGLEEYVRESFSLVQVQPGVDIIRTNLEFLQEQFNSIAAHVLHCTDSGFGARLLELCNQGLFECLALNLHCLGGQQMELAAVINGRIRRMSRGVNPSLVSWLTTMMGLRLQVVLEHMPVGPDAILRYVRRVGDPPQPLPEEPMEVQGAERASPEPQRENASPAPGTTAEEAMSRGPPPAPEGGSRDEQDGASAETEPWAAAVPPEWVPIIQQDIQSQRKVKPQPPLSDAYLSGMPAKRRKTMQGEGPQLLLSEAVSRAAKAAGARPLTSPESLSRDLEAPEVQESYRQQLRSDIQKRLQEDPNYSPQRFPNAQRAFADDP

SEQ ID NO: 9971 - protein, 271 aa, Homo sapiens
MAVSWRSWLANEGVKHLCLFIWLSMNVLLFWKTFLLYNQGPEYHYLHQMLGCPTETKATFGVHLKIVGDWTERFRDLLLPPSSQDSEILPFIQSRNYPKLYIDGPFGSPFEESLNYEVSLCVAGGIGVTPFASILNTLLDDWKPYKLRRLYFIWVCRDIQSFRWFADLLCMLHNKFWQENRPDYVNIQLYLSQTDGIQKIIGEKYHALNSRLFIGRPRWKLLFDEIAKYNRGKTVGVFCCGPNSLSKTLHKLSNQNNSYGTRFEYNKESFS

SEQ ID NO: 9972 - protein, 596 aa, Homo sapiens
MATENGAVELGIQNPSTDKAPKGPTGERPLAAGKDPGPPDPKKAPDPPTLKKDAKAPASEKGDGTLAQPSTSSQGPKGEGDRGGGPAEGSAGPPAALPQQTATPETSVKKPKAEQGASGSQDPGKPRVGKKAAEGQAAARRGSPAFLHSPSCPAIISSSEKLLAKKPPSEASELTFEGVPMTHSPTDPRPAKAEEGKNILAESQKEVGEKTPGQAGQAKMQGDTSRGIEFQAVPSEKSEVGQALCLTAREEDCFQILDDCPPPPAPFPHRMVELRTGNVSSEFSMNSKEALGGGKFGAVCTCMEKATGLKLAAKVIKKQTPKDKEMVLLEIEVMNQLNHRNLIQLYAAIETPHEIVLFMEYIEGGELFERIVDEDYHLTEVDTMVFVRQICDGILFMHKMRVLHLDLKPENILCVNTTGHLVKIIDFGLARRYNPNEKLKVNFGTPEFLSPEVVNYDQISDKTDMWSMGVITYMLLSGLSPFLGDDDTETLNNVLSGNWYFDEETFEAVSDEAKDFVSNLIVKDQRARMNAAQCLAHPWLNNLAEKAKRCNRRLKSQILLKKYLMKRRWKKNFIAVSAANRFKKISSSGALMALGV

SEQ ID NO: 9973 - protein, 164 aa, Homo sapiens
MKCKPNQTRTYDPEGFKKRAACLCFRSEREDEVLLVSSSRYPDRWIVPGGGMEPEEEPGGAAVREVYEEAGVKGKLGRLLGVFEQNQDRKHRTYVYVLTVTELLEDWEDSVSIGRKREWFKVEDAIKVLQCHKPVHAEYLEKLKLGGSPTNGNSMAPSSPDSDP

SEQ ID NO: 9974 - protein, 101 aa, Homo sapiens
MFLTGDTSPAEDNREATLPQCSLPELYACIENFNKESKKSNLLKMHGISLNEAQEVLARNLNVMSFTRGADVRGDLQPVISVNKMNKPGKHRKTPSPKINK

SEQ ID NO: 9975 - protein, 502 aa, Homo sapiens
MFGTLLLYCFFLATVPALAETGGERQLSPEKSEIWGPGLKADVVLPARYFYIQAVDTSGNKFTSSPGEKVFQVKVSAPEEQFTRVGVQVLDRKDGSFIVRYRMYASYKNLKVEIKFQGQHVAKSPYILKGPVYHENCDCPLQDSAAWLREMNCPETIAQIQRDLAHFPAVDPEKIAVEIPKRFGQRQSLCHYTLKDNKVYIKTHGEHVGFRIFMDAILLSLTRKVKMPDVELFVNLGDWPLEKKKSNSNIHPIFSWCGSTDSKDIVMPTYDLTDSVLETMGRVSLDMMSVQANTGPPWESKNSTAVWRGRDSRKERLELVKLSRKHPELIDAAFTNFFFFKHDENLYGPIVKHISFFDFFKHKYQINIDGTVAAYRLPYLLVGDSVVLKQDSIYYEHFYNELQPWKHYIPVKSNLSDLLEKLKWAKDHDEEAKKIAKAGQEFARNNLMGDDIFCYYFKLFQEYANLQVSEPQIREGMKRVEPQTEDDLFPCTCHRKKTKDEL

SEQ ID NO: 9976 - protein, 2157 aa, Homo sapiens
MSDRSGPTAKGKDGKKYSSLNLFDTYKGKSLEIQKPAVAPRHGLQSLGKVAIARRMPPPANLPSLKAENKGNDPNVSLVPKDGTGWASKQEQSDPKSSDASTAQPPESQPLPASQTPASNQPKRPPAAPENTPLVPSGVKSWAQASVTHGAHGDGGRASSLLSRFSREEFPTLQAAGDQDKAAKERESAEQSSGPGPSLRPQNSTTWRDGGGRGPDELEGPDSKLHHGHDPRGGLQPSGPPQFPPYRGMMPPFMYPPYLPFPPPYGPQGPYRYPTPDGPSRFPRVAGPRGSGPPMRLVEPVGRPSILKEDNLKEFDQLDQENDDGWAGAHEEVDYTEKLKFSDEEDGRDSDEEGAEGHRDSQSASGEERPPEADGKKGNSPNSEPPTPKTAWAETSRPPETEPGPPAPKPPLPPPHRGPAGNWGPPGDYPDRGGPPCKPPAPEDEDEAWRQRRKQSSSEISLAVERARRRREEEERRMQEERRAACAEKLKRLDEKFGAPDKRLKAEPAAPPAAPSTPAPPPAVPKELPAPPAPPPASAPTPETEPEEPAQAPPAQSTPTPGVAAAPTLVSGGGSTSSTSSGSFEASPVEPQLPSKEGPEPPEEVPPPTTPPVPKVEPKGDGIGPTRQPPSQGLGYPKYQKSLPPRFQRQQQEQLLKQQQQHQWQQHQQGSAPPTPVPPSPPQPVTLGAVPAPQAPPPPPKALYPGALGRPPPMPPMNFDPRWMMIPPYVDPRLLQGRPPLDFYPPGVHPSGLVPRERSDSGGSSSEPFDRHAPAMLRERGTPPVDPKLAWVGDVFTATPAEPRPLTSPLRQAADEDDKGMRSETPPVPPPPPYLASYPGFPENGAPGPPISRFPLEEPGPRPLPWPPGSDEVAKIQTPPPKKEPPKEETAQLTGPEAGRKPARGVGSGGQGPPPPRRESRTETRWGPRPGSSRRGIPPEEPGAPPRRAGPIKKPPPPTKVEELPPKPLEQGDETPKPPKPDPLKITKGKLGGPKETPPNGNLSPAPRLRRDYSYERVGPTSCRGRGRGEYFARGRGFRGTYGGRGRGARSREFRSYREFRGDDGRGGGTGGPNHPPAPRGRTASETRSEGSEYEEIPKRRRQRGSETGSETHESDLAPSDKEAPTPKEGTLTQVPLAPPPPGAPPSPAPARFTARGGRVFTPRGVPSRRGRGGGRPPPQVCPGWSPPAKSLAPKKPPTGPLPPSKEPLKEKLIPGPLSPVARGGSNGGSNVGMEDGERPRRRRHGRAQQQDKPPRFRRLKQERENAARGSEGKPSLTLPASAPGPEEALTTVTVAPAPRRAAAKSPDLSNQNSDQANEEWETASESSDFTSERRGDKEAPPPVLLTPKAVGTPGGGGGGAVPGISAMSRGDLSQRAKDLSKRSFSSQRPGMERQNRRPGPGGKAGSSGSSSGGGGGGPGGRTGPGRGDKRSWPSPKNRSRPPEERPPGLPLPPPPPSSSAVFRLDQVIHSNPAGIQQALAQLSSRQGSVTAPGGHPRHKPGLPQAPQGPSPRPPTRYEPQRVNSGLSSDPHFEEPGPMVRGVGGTPRDSAGVSPFPPKRRERPPRKPELLQEESLPPPHSSGFLGSKPEGPGPQAESRDTGTEALTPHIWNRLHTATSRKSYRPSSMEPWMEPLSPFEDVAGTEMSQSDSGVDLSGDSQVSSGPCSQRSSPDGGLKGAAEGPPKRPGGSSPLNAVPCEGPPGSEPPRRPPPAPHDGDRKELPREQPLPPGPIGTERSQRTDRGTEPGPIRPSHRPGPPVQFGTSDKDSDLRLVVGDSLKAEKELTASVTEAIPVSRDWELLPSAAASAEPQSKNLDSGHCVPEPSSSGQRLYPEVFYGSAGPSSSQISGGAMDSQLHPNSGGFRPGTPSLHPYRSQPLYLPPGPAPPSALLSGLALKGQFLDFSTMQATELGKLPAGGVLYPPPSFLYSPAFCPSPLPDTSLLQVRQDLPSPSDFYSTPLQPGGQSGFLPSGAPAQQMLLPMVDSQLPVVNFGSLPPAPPPAPPPLSLLPVGPALQPPSLAVRPPPAPATRVLPSPARPFPASLGRAELHPVELKPFQDYQKLSSNLGGPGSSRTPPTGRSFSGLNSRLKATPSTYSGVFRTQRVDLYQQASPPDALRWIPKPWERTGPPPREGPSRRAEEPGSRGDKEPGLPPPR

SEQ ID NO: 9977 - protein, 716 aa, Homo sapiens
MFSLSSTVQPQVTVPLSHLINAFHTPKNTSVSLSGVSVSQNQHRDVVPEHEAPSSEPSLNLRDLGLSELKIGQIDQLVENLLPGFCKGKNISSHWHTSHVSAQSFFENKYGNLDIFSTLRSSCLYRHHSRALQSICSDLQYWPVFIQSRGFKTLKSRTRRLQSTSERLAETQNIAPSFVKGFLLRDRGSDVESLDKLMKTKNIPEAHQDAFKTGFAEGFLKAQALTQKTNDSLRRTRLILFVLLLFGIYGLLKNPFLSVRFRTTTGLDSAVDPVQMKNVTFEHVKGVEEAKQELQEVVEFLKNPQKFTILGGKLPKGILLVGPPGTGKTLLARAVAGEADVPFYYASGSEFDEMFVGVGASRIRNLFREAKANAPCVIFIDELDSVGGKRIESPMHPYSRQTINQLLAEMDGFKPNEGVIIIGATNFPEALDNALIRPGRFDMQVTVPRPDVKGRTEILKWYLNKIKFDQSVDPEIIARGTVGFSGAELENLVNQAALKAAVDGKEMVTMKELEFSKDKILMGPERRSVEIDNKNKTITAYHESGHAIIAYYTKDAMPINKATIMPRGPTLGHVSLLPENDRWNETRAQLLAQMDVSMGGRVAEELIFGTDHITTGASSDFDNATKIAKRMVTKFGMSEKLGVMTYSDTGKLSPETQSAIEQEIRILLRDSYERAKHILKTHAKEHKNLAEALLTYETLDAKEIQIVLEGKKLEVR

SEQ ID NO: 9978 - protein, 775 aa, Homo sapiens
MMEDNKQLALRIDGAVQSASQEVTNLRAELTATNRRLAELSGGGGPGPGPGAAASASAAGDSAATNMENPQLGAQVLLREEVSRLQEEVHLLRQMKEMLAKDLEESQGGKSSEVLSATELRVQLAQKEQELARAKEALQAMKADRKRLKGEKTDLVSQMQQLYATLESREEQLRDFIRNYEQHRKESEDAVKALAKEKDLLEREKWELRRQAKEATDHATALRSQLDLKDNRMKELEAELAMAKQSLATLTKDVPKRHSLAMPGETVLNGNQEWVVQADLPLTAAIRQSQQTLYHSHPPHPADRQAVRVSPCHSRQPSVISDASAAEGDRSSTPSDINSPRHRTHSLCNGDSPGPVQKNLHNPIVQSLEDLEDQKRKKKKEKMGFGSISRVFARGKQRKSLDPGLFDDSDSQCSPTRQSLSLSEGEEQMDRLQQVELVRTTPMSHWKAGTVQAWLEVVMAMPMYVKACTENVKSGKVLLSLSDEDLQLGLGVCSSLHRRKLRLAIEDYRDAEAGRSLSKAAELDHHWVAKAWLNDIGLSQYSQAFQNHLVDGRMLNSLMKRDLEKHLNVSKKFHQVSILLGIELLYQVNFSREALQERRARCETQNIDPVVWTNQRVLKWVRDIDLKEYADNLTNSGVHGAVLVLEPTFNAEAMATALGIPSGKHILRRHLAEEMSAVFHPANSTGIREAERFGTPPGRASSVTRAGKEENSSGLKYKAGRLPLGKIGRGFSSKDPDFHDDYGSLQNEDCGDDDPQSRLEQCRLEGYNSLEVTNV

SEQ ID NO: 9979 - protein, 1262 aa, Homo sapiens
MATAATEEPFPFHGLLPKKETGAASFLCRYPEYDGRGVLIAVLDTGVDPGAPGMQVTTDGKPKIVDIIDTTGSGDVNTATEVEPKDGEIVGLSGRVLKIPASWTNPSGKYHIGIKNGYDFYPKALKERIQKERKEKIWDPVHRVALAEACRKQEEFDVANNGSSQANKLIKEELQSQVELLNSFEKKYSDPGPVYDCLVWHDGEVWRACIDSNEDGDLSKSTVLRNYKEAQEYGSFGTAEMLNYSVNIYDDGNLLSIVTSGGAHGTHVASIAAGHFPEEPERNGVAPGAQILSIKIGDTRLSTMETGTGLIRAMIEVINHKCDLVNYSYGEATHWPNSGRICEVINEAVWKHNIIYVSSAGNNGPCLSTVGCPGGTTSSVIGVGAYVSPDMMVAEYSLREKLPANQYTWSSRGPSADGALGVSISAPGGAIASVPNWTLRGTQLMNGTSMSSPNACGGIALILSGLKANNIDYTVHSVRRALENTAVKADNIEVFAQGHGIIQVDKAYDYLVQNTSFANKLGFTVTVGNNRGIYLRDPVQVAAPSDHGVGIEPVFPENTENSEKISLQLHLALTSNSSWVQCPSHLELMNQCRHINIRVDPRGLREGLHYTEVCGYDIASPNAGPLFRVPITAVIAAKVNESSHYDLAFTDVHFKPGQIRRHFIEVPEGATWAEVTVCSCSSEVSAKFVLHAVQLVKQRAYRSHEFYKFCSLPEKGTLTEAFPVLGGKAIEFCIARWWASLSDVNIDYTISFHGIVCTAPQLNIHASEGINRFDVQSSLKYEDLAPCITLKNWVQTLRPVSAKTKPLGSRDVLPNNRQLYEMVLTYNFHQPKSGEVTPSCPLLCELLYESEFDSQLWIIFDQNKRQMGSGDAYPHQYSLKLEKGDYTIRLQIRHEQISDLERLKDLPFIVSHRLSNTLSLDIHENHSFALLGKKKSSNLTLPPKYNQPFFVTSLPDDKIPKGAGPGCYLAGSLTLSKTELGKKAGQSAAKRQGKFKKDVIPVHYYLIPPPTKTKNGSKDKEKDSEKEKDLKEEFTEALRDLKIQWMTKLDSSDIYNELKETYPNYLPLYVARLHQLDAEKERMKRLNEIVDAANAVISHIDQTALAVYIAMKTDPRPDAATIKNDMDKQKSTLVDALCRKGCALADHLLHTQAQDGAISTDAEGKEEEGESPLDSLAETFWETTKWTDLFDNKVLTFAYKHALVNKMYGRGLKFATKLVEEKPTKENWKNCIQLMKLLGWTHCASFTENWLPIMYPPDYCVF

SEQ ID NO: 9980 - protein, 845 aa, Homo sapiens
MSDDIDWLRSHRGVCKVDLYNPEGQQDQDRKVICFVDVSTLNVEDKDYKDAASSSSEGNLNLGSLEEKEIIVIKDTEKKDQSKTEGSVCLFKQAPSDPVSVLNWLLSDLQKYALGFQHALSPSTSTCKHKVGDTEGEYHRASSENCYSVYADQVNIDYLMNRPQNLRLEMTAAKNTNNNQSPSAPPAKPPSTQRAVISPDGECSIDDLSFYVNRLSSLVIQMAHKEIKEKLEGKSKCLHHSICPSPGNKERISPRTPASKIASEMAYEAVELTAAEMRGTGEESREGGQKSFLYSELSNKSKSGDKQMSQRESKEFADSISKGLMVYANQVASDMMVSLMKTLKVHSSGKPIPASVVLKRVLLRHTKEIVSDLIDSCMKNLHNITGVLMTDSDFVSAVKRNLFNQWKQNATDIMEAMLKRLVSALIGEEKETKSQSLSYASLKAGSHDPKCRNQSLEFSTMKAEMKERDKGKMKSDPCKSLTSAEKVGEHILKEGLTIWNQKQGNSCKVATKACSNKDEKGEKINASTDSLAKDLIVSALKLIQYHLTQQTKGKDTCEEDCPGSTMGYMAQSTQYEKCGGGQSAKALSVKQLESHRAPGPSTCQKENQHLDSQKMDMSNIVLMLIQKLLNENPFKCEDPCEGENKCSEPRASKAASMSNRSDKAEEQCQEHQELDCTSGMKQANGQFIDKLVESVMKLCLIMAKYSNDGAALAELEEQAASANKPNFRGTRCIHSGAMPQNYQDSLGHEVIVNNQCSTNSLQKQLQAVLQWIAASQFNVPMLYFMGDKDGQLEKLPQVSAKAAEKGYSVGGLLQEVMKFAKERQPDEAVGKVARKQLLDWLLANL

SEQ ID NO: 9981 - protein, 1249 aa, Homo sapiens
MATAATEEPFPFHGLLPKKETGAASFLCRYPEYDGRGVLIAVLDTGVDPGAPGMQVTTDGKPKIVDIIDTTGSGDVNTATEVEPKDGEIVGLSGRVLKIPASWTNPSGKYHIGIKNGYDFYPKALKERIQKERKEKIWDPVHRVALAEACRKQEEFDVANNGSSQANKLIKEELQSQVELLNSFEKKYSDPGPVYDCLVWHDGEVWRACIDSNEDGDLSKSTVLRNYKEAQEYGSFGTAEMLNYSVNIYDDGNLLSIVTSGGAHGTHVASIAAGHFPEEPERNGVAPGAQILSIKIGDTRLSTMETGTGLIRAMIEVINHKCDLVNYSYGEATHWPNSGRICEVINEAVWKHNIIYVSSAGNNGPCLSTVGCPGGTTSSVIGVGAYVSPDMMVAEYSLREKLPANQYTWSSRGPSADGALGVSISAPGGAIASVPNWTLRGTQLMNGTSMSSPNACGGIALILSGLKANNIDYTVHSVRRALENTAVKADNIEVFAQGHGIIQVDKAYDYLVQNTSFANKLGFTVTVGNNRGIYLRDPVQVAAPSDHGVGIEPVFPENTENSEKISLQLHLALTSNSSWVQCPSHLELMNQCRHINIRVDPRGLREGLHYTEVCGYDIASPNAGPLFRVPITAVIAAKVNESSHYDLAFTDVHFKPGQIRRHFIEVPEGATWAEVTVCSCSSEVSAKFVLHAVQLVKQRAYRSHEFYKFCSLPEKGTLTEAFPVLGGKAIEFCIARWWASLSDVNIDYTISFHGIVCTAPQLNIHASEGINRFDVQSSLKYEDLAPCITLKNWVQTLRPVSAKTKPLGSRDVLPNNRQLYEMVLTYNFHQPKSGEVTPSCPLLCELLYESEFDSQLWIIFDQNKRQMGSGDAYPHQYSLKLEKGDYTIRLQIRHEQISDLERLKDLPFIVSHRLSNTLSLDIHENHSFALLGKKKSSNLTLPPKYNQPFFVTSLPDDKIPKGAGPGCYLAGSLTLSKTELGKKADVIPVHYYLIPPPTKTKNGSKDKEKDSEKEKDLKEEFTEALRDLKIQWMTKLDSSDIYNELKETYPNYLPLYVARLHQLDAEKERMKRLNEIVDAANAVISHIDQTALAVYIAMKTDPRPDAATIKNDMDKQKSTLVDALCRKGCALADHLLHTQAQDGAISTDAEGKEEEGESPLDSLAETFWETTKWTDLFDNKVLTFAYKHALVNKMYGRGLKFATKLVEEKPTKENWKNCIQLMKLLGWTHCASFTENWLPIMYPPDYCVF

SEQ ID NO: 9982 - protein, 1186 aa, Homo sapiens
MSKLKVIPEKSLTNNSRIVGLLAQLEKINAEPSESDTARYVTSKILHLAQSQEKTRREMTAKGSTGMEILLSTLENTKDLQTTLNILSILVELVSAGGGRRVSFLVTKGGSQILLQLLMNASKESPPHEDLMVQIHSILAKIGPKDKKFGVKARINGALNITLNLVKQNLQNHRLVLPCLQLLRVYSANSVNSVSLGKNGVVELMFKIIGPFSKKNSSLIKVALDTLAALLKSKTNARRAVDRGYVQVLLTIYVDWHRHDNRHRNMLIRKGILQSLKSVTNIKLGRKAFIDANGMKILYNTSQLPVIPVTGPVAQLYSLPPEVDDVVDESDDNDDIDVEAENETENEDDLDQNFKNDDIETDINKLKPQQEPGRTIEDLKMYEHLFPELVDDFQDYDLISKEPKPFVFEGKVRGPIVVPTAGEETSGNSGNLRKVVMKENISSKGDEGEKKSTFMDLAKEDIKDNDRTLQQQPGDQNRTISSVHGLNNDIVKALDRITLQNIPSQTAPGFTAEMKKDCSLPLTVLTCAKACPHMATCGNVLFEGRTVQLGKLCCTGVETEDDEDTESNSSVEQASVEVPDGPTLHDPDLYIEIVKNTKSVPEYSEVAYPDYFGHIPPPFKEPILERPYGVQRTKIAQDIERLIHQSDIIDRVVYDLDNPNYTIPEEGDILKFNSKFESGNLRKVIQIRKNEYDLILNSDINSNHYHQWFYFEVSGMRPGVAYRFNIINCEKSNSQFNYGMQPLMYSVQEALNARPWWIRMGTDICYYKNHFSRSSVAAGGQKGKSYYTITFTVNFPHKDDVCYFAYHYPYTYSTLQMHLQKLESAHNPQQIYFRKDVLCETLSGNSCPLVTITAMPESNYYEHICHFRNRPYVFLSARVHPGETNASWVMKGTLEYLMSNNPTAQSLRESYIFKIVPMLNPDGVINGNHRCSLSGEDLNRQWQSPSPDLHPTIYHAKGLLQYLAAVKRLPLVYCDYHGHSRKKNVFMYGCSIKETVWHTNDNATSCDVVEDTGYRTLPKILSHIAPAFCMSSCSFVVEKSKESTARVVVWREIGVQRSYTMESTLCGCDQGKYKGLQIGTRELEEMGAKFCVGLLRLKRLTSPLEYNLPSSLLDFENDLIESSCKVTSPTTYVLDEDEPRFLEEVDYSAESNDELDIELAENVGDYEPSAQEEVLSDSELSRTYLP

SEQ ID NO: 9983 - protein, 294 aa, Homo sapiens
MRPRAPACAAAALGLCSLLLLLAPGHACPAGCACTDPHTVDCRDRGLPSVPDPFPLDVRKLLVAGNRIQRIPEDFFIFYGDLVYLDFRNNSLRSLEEGTFSGSAKLVFLDLSYNNLTQLGAGAFRSAGRLVKLSLANNNLVGVHEDAFETLESLQVLELNDNNLRSLSVAALAALPALRSLRLDGNPWLCDCDFAHLFSWIQENASKLPKGLDEIQCSLPMESRRISLRELSEASFSECRFSLSLTDLCIIIFSGVAVSIAAIISSFFLATVVQCLQRCAPNKDAEDEDEDKDD

SEQ ID NO: 9984 - protein, 1710 aa, Homo sapiens
MKKIFSKKGESPLGSFARRQRSSAGGGGEPGEGAYSQPGYHVRDRDLGKIHKAASAGNVAKVQQILLLRKNGLNDRDKMNRTALHLACANGHPEVVTLLVDRKCQLNVCDNENRTALMKAVQCQEEKCATILLEHGADPNLADVHGNTALHYAVYNEDISVATKLLLYDANIEAKNKDDLTPLLLAVSGKKQQMVEFLIKKKANVNAVDKLESSHQLISEYKEERIPKHSSQNSNSVDESSEDSLSRLSGKPGVDDSWPTSDDEDLNFDTKNVPKPSLAKLMTASQQSRKNLEATYGTVRTGNRTLFEDRDSDSQDEVVVESLPTTSIKVQCFSHPTYQSPDLLPKPSHKSLANPGLMKEEPTKPGIAKKENGIDIIESAPLEQTNNDNLTYVDEVHKNNRSDMMSALGLGQEEDIESPWDSESISENFPQKYVDPLAGAADGKEKNIGNEQAEDVFYIPSCMSGSRNFKMAKLEDTRNVGMPVAHMESPERYLHLKPTIEMKDSVPNKAGGMKDVQTSKAAEHDLEVASEEEQEREGSENNQPQVEEERKKHRNNEMEVSANIHDGATDDAEDDDDDDGLIQKRKSGETDHQQFPRKENKEYASSGPALQMKEVKSTEKEKRTSKESVNSPVFGKASLLTGGLLQVDDDSSLSEIDEDEGRPTKKTSNEKNKVKNQIQSMDDVDDLTQSSETASEDCELPHSSYKNFMLLIEQLGMECKDSVSLLKIQDAALSCERLLELKKNHCELLTVKIKKMEDKVNVLQRELSETKEIKSQLEHQKVEWERELCSLRFSLNQEEEKRRNADTLYEKIREQLRRKEEQYRKEVEVKQQLELSLQTLEMELRTVKSNLNQVVQERNDAQRQLSREQNARMLQDGILTNHLSKQKEIEMAQKKMNSENSHSHEEEKDLSHKNSMLQEEIAMLRLEIDTIKNQNQEKEKKCFEDLKIVKEKNEDLQKTIKQNEETLTQTISQYNGRLSVLTAENAMLNSKLENEKQSKERLEAEVESYHSRLAAAIHDRDQSETSKRELELAFQRARDECSRLQDKMNFDVSNLKDNNEILSQQLFKTESKLNSLEIEFHHTRDALREKTLGLERVQKDLSQTQCQMKEMEQKYQNEQVKVNKYIGKQESVEERLSQLQSENMLLRQQLDDAHNKADNKEKTVINIQDQFHAIVQKLQAESEKQSLLLEERNKELISECNHLKERQYQYENEKAEREVVVRQLQQELADTLKKQSMSEASLEVTSRYRINLEDETQDLKKKLGQIRNQLQEAQDRHTEAVRCAEKMQDHKQKLEKDNAKLKVTVKKQMDKIEELQKNLLNANLSEDEKEQLKKLMELKQSLECNLDQEMKKNVELEREITGFKNLLKMTRKKLNEYENGEFSFHGDLKTSQFEMDIQINKLKHKIDDLTAELETAGSKCLHLDTKNQILQEELLSMKTVQKKCEKLQKNKKKLEQEVINLRSHIERNMVELGQVKQYKQEIEERARQEIAEKLKEVNLFLQAQAASQENLEQFRENNFASMKSQMELRIKDLESELSKIKTSQEDFNKTELEKYKQLYLEELKVRKSLSSKLTKTNERLAEVNTKLLVEKQQSRSLFTTLTTRPVMEPPCVGNLNNSLDLNRKLIPRENLVISTSNPRASNNSMENYLSKMQQELEKNITRELKEAAAELESGSIASPLGSTDESNLNQDLVWKASREYVQVLKKNYMI

SEQ ID NO: 9985 - protein, 816 aa, Homo sapiens
MAMWQGAMDNRGFQQGSFSSFQNSSSDEDLMDIPATAMDFSMRDDVPPLDREVGEDKSYNGGGIGSSNRIMDFLEEPIPGVGTYDDFNTIDWVREKSRDRDRHREITNKSKESTWALIHSVSDAFSGWLLMLLIGLLSGSLAGLIDISAHWMTDLKEGICTGGFWFNHEHCCWNSEHVTFEERDKCPEWNSWSQLIISTDEGAFAYIVNYFMYVLWALLFAFLAVSLVKVFAPYACGSGIPEIKTILSGFIIRGYLGKWTLVIKTITLVLAVSSGLSLGKEGPLVHVACCCGNILCHCFNKYRKNEAKRREVLSAAAAAGVSVAFGAPIGGVLFSLEEVSYYFPLKTLWRSFFAALVAAFTLRSINPFGNSRLVLFYVEFHTPWHLFELVPFILLGIFGGLWGALFIRTNIAWCRKRKTTQLGKYPVIEVLVVTAITAILAFPNEYTRMSTSELISELFNDCGLLDSSKLCDYENRFNTSKGGELPDRPAGVGVYSAMWQLALTLILKIVITIFTFGMKIPSGLFIPSMAVGAIAGRLLGVGMEQLAYYHQEWTVFNSWCSQGADCITPGLYAMVGAAACLGGVTRMTVSLVVIMFELTGGLEYIVPLMAAAMTSKWVADALGREGIYDAHIRLNGYPFLEAKEEFAHKTLAMDVMKPRRNDPLLTVLTQDSMTVEDVETIISETTYSGFPVVVSRESQRLVGFVLRRDLIISIENARKKQDGVVSTSIIYFTEHSPPLPPYTPPTLKLRNILDLSPFTVTDLTPMEIVVDIFRKLGLRQCLVTHNGRLLGIITKKDVLKHIAQMANQDPDSILFN

SEQ ID NO: 9986 - protein, 351 aa, Homo sapiens
MSIVTVQLGQCGNQIGFEVFDALLSDSHSSQGLCSMRENEAYQASCKERFFSEEENGVPIARAVLVDMEPKVINQMLSKAAQSGQWKYGQHACFCQKQGSGNNWAYGYSVHGPRHEESIMNIIRKEVEKCDSFSGFFIIMSMAGGTGSGLGAFVTQNLEDQYSNSLKMNQIIWPYGTGEVIVQNYNSILTLSHLYRSSDALLLHENDAIHKICAKLMNIKQISFSDINQVLAHQLGSVFQPTYSAESSFHYRRNPLEGFKDPALYTSWLKPVNAFNVWKTQRAFSKYEKSAVLVSNSQFLVKPLDMIVGKAWNMFASKAYIHQYTKFGIEEEDFLDSFTSLEQVVASYCNL

SEQ ID NO: 9987 - protein, 975 aa, Homo sapiens
MGIFKSSLFQALLDIQEFYEVTLLNSQKSCEQKIEEANQVLQKWEKTSLLAPCHDRLQKSSELTDCSGSKENASCIEQNKENQSFENETDETTTQNQGRCPAQNCSVEAPAWMPVHHCTKYRYQDEDAPHDHSLPRLTHEVRGPELVHVSEKNLSQIENVHGYVLQSHISPLKASPAPIIVNTDTLDTIPYVNGTEIEYEFEEITLERGNSGLGFSIAGGTDNPHIGDDPGIFITKIIPGGAAAEDGRLRVNDCILRVNEVDVSEVSHSKAVEALKEAGSIVRLYVRRRRPILETVVEIKLFKGPKGLGFSIAGGVGNQHIPGDNSIYVTKIIDGGAAQKDGRLQVGDRLLMVNNYSLEEVTHEEAVAILKNTSEVVYLKVGKPTTIYMTDPYGPPDITHSYSPPMENHLLSGNNGTLEYKTSLPPISPGRYSPIPKHMLVDDDYTRPPEPVYSTVNKLCDKPASPRHYSPVECDKSFLLSAPYSHYHLGLLPDSEMTSHSQHSTATRQPSMTLQRAVSLEGEPRKVVLHKGSTGLGFNIVGGEDGEGIFVSFILAGGPADLSGELQRGDQILSVNGIDLRGASHEQAAAALKGAGQTVTIIAQYQPEDYARFEAKIHDLREQMMNHSMSSGSGSLRTNQKRSLYVRAMFDYDKSKDSGLPSQGLSFKYGDILHVINASDDEWWQARRVMLEGDSEEMGVIPSKRRVERKERARLKTVKFNAKPGVIDSKGSFNDKRKKSFIFSRKFPFYKNKEQSEQETSDPERGQEDLILSYEPVTRQEINYTRPVIILGPMKDRINDDLISEFPDKFGSCVPHTTRPKRDYEVDGRDYHFVISREQMEKDIQEHKFIEAGQYNDNLYGTSVQSVRFVAERGKHCILDVSGNAIKRLQVAQLYPIAIFIKPRSLEPLMEMNKRLTEEQAKKTYDRAIKLEQEFGEYFTAIVQGDTLEDIYNQCKLVIEEQSGPFIWIPSKEKL

SEQ ID NO: 9988 - protein, 426 aa, Homo sapiens
MAVQAALLSTHPFVPFGFGGSPDGLGGAFGALDKGCCFEDDETGAPAGALLSGAEGGDVREATRDLLSFIDSASSNIKLALDKPGKSKRKVNHRKYLQKQIKRCSGLMGAAPPGPPSPSAADTPAKRPLAAPSAPTVAAPAHGKAAPRREASQAAAAASLQSRSLAALFDSLRHVPGGAEPAGGEVAAPAAGLGGAGTGGAGGDVAGPAGATAIPGARKVPLRARNLPPSFFTEPSRAGGGGCGPSGPDVSLGDLEKGAEAVEFFELLGPDYGAGTEAAVLLAAEPLDVFPAGASVLRGPPELEPGLFEPPPAVVGNLLYPEPWSVPGCSPTKKSPLTAPRGGLTLNEPLSPLYPAAADSPGGEDGRGHLASFAPFFPDCALPPPPPPHQVSYDYSAGYSRTAYSSLWRSDGVWEGAPGEEGAHRD

SEQ ID NO: 9989 - protein, 252 aa, Homo sapiens
MVKPVPLFRRTDFKLLLCNHKDLFFLRVSKLLDCFSPKSMWFLWNIFSKGTHMLQCLCGKSLKKNKNPTDPQLKGIVTRLYCRQGYYLQMHPDGALDGTKDDSTNSTLFNLIPVGLRVVAIQGVKTGLYIAMNGEGYLYPSELFTPECKFKESVFENYYVIYSSMLYRQQESGRAWFLGLNKEGQAMKGNRVKKTKPAAHFLPKPLEVAMYREPSLHDVGETVPKPGVTPSKSTSASAIMNGGKPVNKSKTT

SEQ ID NO: 9990 - protein, 467 aa, Homo sapiens
MAALTIATGTGNWFSALALGVTLLKCLLIPTYHSTDFEVHRNWLAITHSLPISQWYYEATSEWTLDYPPFFAWFEYILSHVAKYFDQEMLNVHNLNYSSSRTLLFQRFSVIFMDVLFVYAVRECCKCIDGKKVGKELTEKPKFILSVLLLWNFGLLIVDHIHFQYNGFLFGLMLLSIARLFQKRHMEGAFLFAVLLHFKHIYLYVAPAYGVYLLRSYCFTANKPDGSIRWKSFSFVRVISLGLVVFLVSALSLGPFLALNQLPQVFSRLFPFKRGLCHAYWAPNFWALYNALDKVLSVIGLKLKFLDPNNIPKASMTSGLVQQFQHTVLPSVTPLATLICTLIAILPSIFCLWFKPQGPRGFLRCLTLCALSSFMFGWHVHEKAILLAILPMSLLSVGKAGDASIFLILTTTGHYSLFPLLFTAPELPIKILLMLLFTIYSISSLKTLFRRSFTLVAQAGVQWHDLS

SEQ ID NO: 9991 - protein, 401 aa, Homo sapiens
MNLVAVMGAFNKGHGKCDCGKCKCDQGWYGDACQYPTNCDLTKKKSNQMCKNSQDIICSNAGTCHCGRCKCDNSDGSGLVYGKFCECDDRECIDDETEEICGGHGKCYCGNCYCKAGWHGDKCEFQCDITPWESKRRCTSPDGKICSNRGTCVCGECTCHDVDPTGDWGDIHGDTCECDERDCRAVYDRYSDDFCSGHGQCNCGRCDCKAGWYGKKCEHPQSCTLSAEESIRKCQGSSDLPCSGRGKCECGKCTCYPPGDRRVYGKTCECDDRRCEDLDGVVCGGHGTCSCGRCVCERGWFGKLCQHPRKCNMTEEQSKNLCESADGILCSGKGSCHCGKCICSAEEWYISGEFCDCDDRDCDKHDGLICTGNGICSCGNCECWDGWNGNACEIWLGSEYP

SEQ ID NO: 9992 - protein, 494 aa, Homo sapiens
MRPPGFRNFLLLASSLLFAGLSAVPQSFSPSLRSWPGAACRLSRAESERRCRAPGQPPGAALCHGRGRCDCGVCICHVTEPGMFFGPLCECHEWVCETYDGSTCAGHGKCDCGKCKCDQGWYGDACQYPTNCDLTKKKSNQMCKNSQDIICSNAGTCHCGRCKCDNSDGSGLVYGKFCECDDRECIDDETEEICGGHGKCYCGNCYCKAGWHGDKCEFQCDITPWESKRRCTSPDGKICSNRGTCVCGECTCHDVDPTGDWGDIHGDTCECDERDCRAVYDRYSDDFCSGHGQCNCGRCDCKAGWYGKKCEHPQSCTLSAEESIRKCQGSSDLPCSGRGKCECGKCTCYPPGDRRVYGKTCECDDRRCEDLDGVVCGGHGTCSCGRCVCERGWFGKLCQHPRKCNMTEEQSKNLCESADGILCSGKGSCHCGKCICSAEEWYISGEFCDCDDRDCDKHDGLICTGNGICSCGNCECWDGWNGNACEIWLGSEYP

SEQ ID NO: 9993 - protein, 119 aa, Homo sapiens
MVLPLPWLSRYHFLRLLLPSWSLAPQGSHGCCSQNPKASMEEQTSSRGNGKMTSPPRGPGTHRTAELARAEELLEQQLELYQALLEGQEGAWEAQALVLKIQKLKEQMRRHQESLGGGA

SEQ ID NO: 9994 - protein, 441 aa, Homo sapiens
MSPISGASPSWRAAPKASDLLGARGPGGTFQGRDLRGGAHASSSSLNPMPPSQLQLSTVDAHARTPVLQVHPLESPAMISLTPPTTATGVFSLKARPGLPPGINVASLEWVSREPALLCTFPNPSAPRKDSTLSAVPQSSYPLLANGVCKWPGCEKVFEEPEDFLKHCQADHLLDEKGRAQCLLQREMVQSLEQQLVLEKEKLSAMQAHLAGKMALTKASSVASSDKGSCCIVAAGSQGPVVPAWSGPREAPDSLFAVRRHLWGSHGNSTFPEFLHNMDYFKFHNMRPPFTYATLIRWAILEAPEKQRTLNEIYHWFTRMFAFFRNHPATWKVSSSEVAVTGMASSAIAAQSGQAWVWAHRHIGEERDVGCWWWLLASEVDAHLLPVPGLPQNAIRHNLSLHKCFVRVESEKGAVWTVDELEFRKKRSQRPSRCSNPTPGP

SEQ ID NO: 9995 - protein, 293 aa, Homo sapiens
MASNVTNKMDPHSMNSRVFIGNLNTLVVKKSDVEAIFSKYGKIAGCSVHKGFAFVQYDKEKNARAAVAGEDGRMIASQVVDINLAAEPKVNRGNAGVKRSAAEMYGSSFDLDYGFQRDYYDGMYSFPARVPPPPPIALAVVPSKRQRLSGNTSRRGKSGFNSKSGKRGSSKSGKLKGDDLQAIKQELTQIKQKVDSLLENLEKIEKEQSKQEVEVKNAKSEEEQSSSSMKKDETHVKMESEGGAEDSAEEGDPLDDDVNEDQGDDQLELIKDDEKEAEEGEDDRDSTNGQDDS

SEQ ID NO: 9996 - protein, 415 aa, Homo sapiens
MASRWWRWRRGCSWKPAARSPGPGSPGRAGPLGPSAAAEVRAQVHRRKGLDLSQIPYINLVKHLTSACPNVCRISRFHHTTPDSKTHSGEKYTDPFKLGWRDLKGLYEDIRKELLISTSELKEMSEYYFDGKGKAFRPIIVALMARACNIHHNNSRHVQASQRAIALIAEMIHTASLVHDDVIDDASSRRGKHTVNKIWGEKKAVLAGDLILSAASIALARIGNTTVISILTQVIEDLVRGEFLQLGSKENENERFAHYLEKTFKKTASLIANSCKAVSVLGCPDPVVHEIAYQYGKNVGIAFQLIDDVLDFTSCSDQMGKPTSADLKLGLATGPVLFACQQFPEMNAMIMRRFSLPGDVDRARQYVLQSDGVQQTTYLAQQYCHEAIREISKLRPSPERDALIQLSEIVLTRDK

SEQ ID NO: 9997 - protein, 623 aa, Homo sapiens
MLLFLWIETSSEYFNFDWVTFLGTGYWFFWSIFILSLARILTAYSSLLLLLGFLLLWERIELYLHLCHKILILLVILLCVILMFIICKFWKERWLVAGLSMQIFAPYVHLVSITVMVILFWPVAFYVACLEREVRMRRYRMTHSEKKRLKQCNVITRLRGLQVPVGLPFLLILLGLYLMPLGIYSPCIQEKENLGPKPTIFGHRGAPMLGPENTMMSFEKAVEHGAHGLETDIHLSYDHVPFLMHDFDLKRTTNIGEVQPESACENPAFFNWDFLSTLNAGKWFVKPELRPFYNMKPLSEADKERARNQSIPTLADLLTLAEKERKFVIFDLHRPPPKHPLRHTFVRQVVSVILASKIEQHLIFWLPAHDRQYVRSVAPGFQHVGRLVSIETLAKNNISIINVDYKKLFPNGLRDYKAANIHINVYTVNEPWLFSLAWCSRINSVTTDNIGLLSQLDHPHFFMTPKFYVFMWLLADIISVLFIVAIFCFHWRRETEKEKLFETSSTRTDTQSGNLHIAMKPPVRVVEGPWTLAALYPALPKSGKEHQGHFNFAAPSKKLLPIKNAVTPLKPGKHEIQPPMPTVVFELTQAPTRQATSEATFQTTLPTLKVDKPTMPSIEVPYP

SEQ ID NO: 9998 - protein, 407 aa, Homo sapiens
MAVPWLVLLLALPIFFLGVFVWAVFEHFLTTDIPATLQHPAKLRFLHCIFLYLVTLGNIFEKLGICSMPKFIRFLHDSVRIKKDPELVVTDLRFGTIPVRLFQPKAASSRPRRGIIFYHGGATVFGSLDCYHGLCNYLARETESVLLMIGYRKLPDHHSPALFQDCMNASIHFLKALETYGVDPSRVVVCGESVGGAAVAAITQALVGRSDLPRIRAQVLIYPVVQAFCLQLPSFQQNQNVPLLSRKFMVTSLCNYLAIDLSWRDAILNGTCVPPDVWRKYEKWLSPDNIPKKFKNRGYQPWSPGPFNEAAYLEAKHMLDVENSPLIADDEVIAQLPEAFLVSCENDILRDDSLLYKKRLEDQGVRVTWYHLYDGFHGSIIFFDKKALSFPCSLKIVNAVVSYIKGI

SEQ ID NO: 9999 - protein, 366 aa, Homo sapiens
MRVMAPRALLLLLSGGLALTETWACSHSMRYFDTAVSRPGRGEPRFISVGYVDDTQFVRFDSDAASPRGEPRAPWVEQEGPEYWDRETQKYKRQAQADRVSLRNLRGYYNQSEDGSHTLQRMSGCDLGPDGRLLRGYDQSAYDGKDYIALNEDLRSWTAADTAAQITQRKLEAARAAEQLRAYLEGTCVEWLRRYLENGKETLQRAEPPKTHVTHHPLSDHEATLRCWALGFYPAEITLTWQRDGEDQTQDTELVETRPAGDGTFQKWAAVVVPSGQEQRYTCHMQHEGLQEPLTLSWEPSSQPTIPIMGIVAGLAVLVVLAVLGAVVTAMMCRRKSSGGKGGSCSQAACSNSAQGSDESLITCKA

SEQ ID NO: 10000 - protein, 640 aa, Homo sapiens
MAEAALVITPQIPMVTEEFVKPSQGHVTFEDIAVYFSQEEWGLLDEAQRCLYHDVMLENFSLMASVGCLHGIEAEEAPSEQTLSAQGVSQARTPKLGPSIPNAHSCEMCILVMKDILYLSEHQGTLPWQKPYTSVASGKWFSFGSNLQQHQNQDSGEKHIRKEESSALLLNSCKIPLSDNLFPCKDVEKDFPTILGLLQHQTTHSRQEYAHRSRETFQQRRYKCEQVFNEKVHVTEHQRVHTGEKAYKRREYGKSLNSKYLFVEHQRTHNAEKPYVCNICGKSFLHKQTLVGHQQRIHTRERSYVCIECGKSLSSKYSLVEHQRTHNGEKPYVCNVCGKSFRHKQTFVGHQQRIHTGERPYVCMECGKSFIHSYDRIRHQRVHTGEGAYQCSECGKSFIYKQSLLDHHRIHTGERPYECKECGKAFIHKKRLLEHQRIHTGEKPYVCIICGKSFIRSSDYMRHQRIHTGERAYECSDCGKAFISKQTLLKHHKIHTRERPYECSECGKGFYLEVKLLQHQRIHTREQLCECNECGKVFSHQKRLLEHQKVHTGEKPCECSECGKCFRHRTSLIQHQKVHSGERPYNCTACEKAFIYKNKLVEHQRIHTGEKPYECGKCGKAFNKRYSLVRHQKVHITEEP

SEQ ID NO: 10001 - protein, 741 aa, Homo sapiens
MAVLDTDLDHILPSSVLPPFWAKLVVGSVAIVCFARSYDGDFVFDDSEAIVNNKDLQAETPLGDLWHHDFWGSRLSSNTSHKSYRPLTVLTFRINYYLSGGFHPVGFHVVNILLHSGISVLMVDVFSVLFGGLQYTSKGRRLHLAPRASLLAALLFAVHPVHTECVAGVVGRADLLCALFFLLSFLGYCKAFRESNKEGAHSSTFWVLLSIFLGAVAMLCKEQGITVLGLNAVFDILVIGKFNVLEIVQKVLHKDKSLENLGMLRNGGLLFRMTLLTSGGAGMLYVRWRIMGTGPPAFTEVDNPASFADSMLVRAVNYNYYYSLNAWLLLCPWWLCFDWSMGCIPLIKSISDWRVIALAALWFCLIGLICQALCSEDGHKRRILTLGLGFLVIPFLPASNLFFRVGFVVAERVLYLPSVGYCVLLTFGFGALSKHTKKKKLIAAVVLGILFINTLRCVLRSGEWRSEEQLFRSALSVCPLNAKVHYNIGKNLADKGNQTAAIRYYREAVRLNPKYVHAMNNLGNILKERNELQEAEELLSLAVQIQPDFAAAWMNLGIVQNSLKRFEAAEQSYRTAIKHRRKYPDCYYNLGRLYADLNRHVDALNAWRNATVLKPEHSLAWNNMIILLDNTGNLAQAEAVGREALELIPNDHSLMFSLANVLGKSQKYKESEALFLKAIKANPNAASYHGNLAVLYHRWGHLDLAKKHYEISLQLDPTASGTKENYGLLRRKLELMQKKAV

SEQ ID NO: 10002 - protein, 630 aa, Homo sapiens
MAVLDTDLDHILPSSVLPPFWAKLVVGSVAIVCFARSYDGDFVFDDSEAIVNNKVAGVVGRADLLCALFFLLSFLGYCKAFRESNKEGAHSSTFWVLLSIFLGAVAMLCKEQGITVLGLNAVFDILVIGKFNVLEIVQKVLHKDKSLENLGMLRNGGLLFRMTLLTSGGAGMLYVRWRIMGTGPPAFTEVDNPASFADSMLVRAVNYNYYYSLNAWLLLCPWWLCFDWSMGCIPLIKSISDWRVIALAALWFCLIGLICQALCSEDGHKRRILTLGLGFLVIPFLPASNLFFRVGFVVAERVLYLPSVGYCVLLTFGFGALSKHTKKKKLIAAVVLGILFINTLRCVLRSGEWRSEEQLFRSALSVCPLNAKVHYNIGKNLADKGNQTAAIRYYREAVRLNPKYVHAMNNLGNILKERNELQEAEELLSLAVQIQPDFAAAWMNLGIVQNSLKRFEAAEQSYRTAIKHRRKYPDCYYNLGRLYADLNRHVDALNAWRNATVLKPEHSLAWNNMIILLDNTGNLAQAEAVGREALELIPNDHSLMFSLANVLGKSQKYKESEALFLKAIKANPNAASYHGNLAVLYHRWGHLDLAKKHYEISLQLDPTASGTKENYGLLRRKLELMQKKAV

SEQ ID NO: 10003 - protein, 666 aa, Homo sapiens
MGESSEDIDQMFSTLLGEMDLLTQSLGVDTLPPPDPNPPRAEFNYSVGFKDLNESLNALEDQDLDALMADLVADISEAEQRTIQAQKESLQNQHHSASLQASIFSGAASLGYGTNVAATGISQYEDDLPPPPADPVLDLPLPPPPPEPLSQEEEEAQAKADKIKLALEKLKEAKVKKLVVKVHMNDNSTKSLMVDERQLARDVLDNLFEKTHCDCNVDWCLYEIYPELQIERFFEDHENVVEVLSDWTRDTENKILFLEKEEKYAVFKNPQNFYLDNRGKKESKETNEKMNAKNKESLLEESFCGTSIIVPELEGALYLKEDGKKSWKRRYFLLRASGIYYVPKGKTKTSRDLACFIQFENVNIYYGTQHKMKYKAPTDYCFVLKHPQIQKESQYIKYLCCDDTRTLNQWVMGIRIAKYGKTLYDNYQRAVAKAGLASRWTNLGTVNAAAPAQPSTGPKTGTTQPNGQIPQATHSVSAVLQEAQRHAETSKDKKPALGNHHDPAVPRAPHAPKSSLPPPPPVRRSSDTSGSPATPLKAKGTGGGGLPAPPDDFLPPPPPPPPLDDPELPPPPPDFMEPPPDFVPPPPPSYAGIAGSELPPPPPPPPAPAPAPVPDSARPPPAVAKRPPVPPKRQENPGHPGGAGGGEQDFMSDLMKALQKKRGNVS

SEQ ID NO: 10004 - protein, 131 aa, Homo sapiens
MRVMAPRALLLLLSGGLALTETWACSHSMRYFDTAVSRPGRGEPRFISVGYVDDTQFVRFDSDAASPRGEPRAPWVEQEGPEYWDRETQKYKRQAQADRVSLRNLRGYYNQSEDEDVWLRPGARRAPPPRV

SEQ ID NO: 10005 - protein, 691 aa, Homo sapiens
MELRSTAAPRAEGYSNVGFQNEENFLENENTSGNNSIRSRAVQSREHTNTKQDEEQVTVEQDSPRNREHMEDDDEEMQQKGCLERRYDTVCGFCRKHKTTLRHIIWGILLAGYLVMVISACVLNFHRALPLFVITVAAIFFVVWDHLMAKYEHRIDEMLSPGRRLLNSHWFWLKWVIWSSLVLAVIFWLAFDTAKLGQQQLVSFGGLIMYIVLLFLFSKYPTRVYWRPVLWGIGLQFLLGLLILRTDPGFIAFDWLGRQVQTFLEYTDAGASFVFGEKYKDHFFAFKVLPIVVFFSTVMSMLYYLGLMQWIIRKVGWIMLVTTGSSPIESVVASGNIFVGQTESPLLVRPYLPYITKSELHAIMTAGFSTIAGSVLGAYISFGVPSSHLLTASVMSAPASLAAAKLFWPETEKPKITLKNAMKMESGDSGNLLEAATQGASSSISLVANIAVNLIAFLALLSFMNSALSWFGNMFDYPQLSFELICSYIFMPFSFMMGVEWQDSFMVARLIGYKTFFNEFVAYEHLSKWIHLRKEGGPKFVNGVQQYISIRSEIIATYALCGFANIGSLGIVIGGLTSMAPSRKRDIASGAVRALIAGTVACFMTACIAGILSSTPVDINCHHVLENAFNSTFPGNTTKVIACCQSLLSSTVAKGPGEVIPGGNHSLYSLKGCCTLLNPSTFNCNGISNTF

SEQ ID NO: 10006 - protein, 1912 aa, Homo sapiens
MSESEGGKGERILPSLQTLGASIVEWKPFDILILLTIFANCVALGVYIPFPEDDSNTANHNLEQVEYVFLVIFTVETVLKIVAYGLVLHPSAYIRNGWNLLDFIIVVVGLFSVLLEQGPGRPGDAPHTGGKPGGFDVKALRAFRVLRPLRLVSGVPSLHIVLNSIMKALVPLLHIALLVLFVIIIYAIIGLELFLGRMHKTCYFLGSDMEAEEDPSPCASSGSGRACTLNQTECRGRWPGPNGGITNFDNFFFAMLTVFQCVTMEGWTDVLYWMQDAMGYELPWVYFVSLVIFGSFFVLNLVLGVLSGEFSKEREKAKARGDFQKQREKQQMEEDLRGYLDWITQAEELDMEDPSADDNLGSMAEEGRAGHRPQLAELTNRRRGRLRWFSHSTRSTHSTSSHASLPASDTGSMTETQGDEDEEEGALASCTRCLNKIMKTRVCRRLRRANRVLRARCRRAVKSNACYWAVLLLVFLNTLTIASEHHGQPVWLTQIQEYANKVLLCLFTVEMLLKLYGLGPSAYVSSFFNRFDCFVVCGGILETTLVEVGAMQPLGISVLRCVRLLRIFKVTRHWASLSNLVASLLNSMKSIASLLLLLFLFIIIFSLLGMQLFGGKFNFDQTHTKRSTFDTFPQALLTVFQILTGEDWNVVMYDGIMAYGGPFFPGMLVCIYFIILFICGNYILLNVFLAIAVDNLASGDAGTAKDKGGEKSNEKDLPQENEGLVPGVEKEEEEGARREGADMEEEEEEEEEEEEEEEEEGAGGVELLQEVVPKEKVVPIPEGSAFFCLSQTNPLRKGCHTLIHHHVFTNLILVFIILSSVSLAAEDPIRAHSFRNHILGYFDYAFTSIFTVEILLKMTVFGAFLHRGSFCRSWFNMLDLLVVSVSLISFGIHSSAISVVKILRVLRVLRPLRAINRAKGLKHVVQCVFVAIRTIGNIMIVTTLLQFMFACIGVQLFKGKFYTCTDEAKHTPQECKGSFLVYPDGDVSRPLVRERLWVNSDFNFDNVLSAMMALFTVSTFEGWPALLYKAIDAYAEDHGPIYNYRVEISVFFIVYIIIIAFFMMNIFVGFVIITFRAQGEQEYQNCELDKNQRQCVEYALKAQPLRRYIPKNPHQYRVWATVNSAAFEYLMFLLILLNTVALAMQHYEQTAPFNYAMDILNMVFTGLFTIEMVLKIIAFKPKHYFTDAWNTFDALIVVGSIVDIAVTEVNNGGHLGESSEDSSRISITFFRLFRVMRLVKLLSKGEGIRTLLWTFIKSFQALPYVALLIAMIFFIYAVIGMQMFGKVALQDGTQINRNNNFQTFPQAVLLLFRCATGEAWQEIMLASLPGNRCDPESDFGPGEEFTCGSNFAIAYFISFFMLCAFLIINLFVAVIMDNFDYLTRDWSILGPHHLDEFKRIWSEYDPGAKGRIKHLDVVALLRRIQPPLGFGKLCPHRVACKRLVAMNMPLNSDGTVTFNATLFALVRTSLKIKTEGNLEQANQELRIVIKKIWKRMKQKLLDEVIPPPDEEEVTVGKFYATFLIQDYFRKFRRRKEKGLLGNDAAPSTSSALQAGLRSLQDLGPEMRQALTCDTEEEEEEGQEGVEEEDEKDLETNKATMVSQPSARRGSGISVSLPVGDRLPDSLSFGPSDDDRGTPTSSQPSVPQAGSNTHRRGSGALIFTIPEEGNSQPKGTKGQNKQDEDEEVPDRLSYLDEQAGTPPCSVLLPPHRAQRYMDGHLVPRRRLLPPTPAGRKPSFTIQCLQRQGSCEDLPIPGTYHRGRNSGPNRAQGSWATPPQRGRLLYAPLLLVEEGAAGEGYLGRSSGPLRTFTCLHVPGTHSDPSHGKRGSADSLVEAVLISEGLGLFARDPRFVALAKQEIADACRLTLDEMDNAASDLLAQGTSSLYSDEESILSRFDEEDLGDEMACVHAL

SEQ ID NO: 10007 - protein, 345 aa, Homo sapiens
MLPCFQLLRIGGGRGGDLYTFHPPAGAGCTYRLGHRADLCDVALRPQQEPGLISGIHAELHAEPRGDDWRVSLEDHSSQGTLVNNVRLPRGHRLELSDGDLLTFGPEGPPGTSPSEFYFMFQQVRVKPQDFAAITIPRSRGEARVGAGFRPMLPSQGAPQRPLSTFSPAPKATLILNSIGSLSKLRPQPLTFSPSWGGPKSLPVPAPPGEMGTTPSAPPQRNRRKSVHRVLAELDDESEPPENPPPVLMEPRKKLRVDKAPLTPTGNRRGRPRKYPVSAPMAPPAVGGGEPCAAPCCCLPQEETVAWVQCDGCDVWFHVACVGCSIQAAREADFRCPGCRAGIQT

SEQ ID NO: 10008 - protein, 464 aa, Homo sapiens
METEQPEETFPNTETNGEFGKRPAEDMEEEQAFKRSRNTDEMVELRILLQSKNAGAVIGKGGKNIKALRTDYNASVSVPDSSGPERILSISADIETIGEILKKIIPTLEEGLQLPSPTATSQLPLESDAVECLNYQHYKGSDFDCELRLLIHQSLAGGIIGVKGAKIKELRENTQTTIKLFQECCPHSTDRVVLIGGKPDRVVECIKIILDLISESPIKGRAQPYDPNFYDETYDYGGFTMMFDDRRGRPVGFPMRGRGGFDRMPPGRGGRPMPPSRRDYDDMSPRRGPPPPPPGRGGRGGSRARNLPLPPPPPPRGGDLMAYDRRGRPGDRYDGMVGFSADETWDSAIDTWSPSEWQMAYEPQGGSGYDYSYAGGRGSYGDLGGPIITTQVTIPKDLAGSIIGKGGQRIKQIRHESGASIKIDEPLEGSEDRIITITGTQDQIQNAQYLLQNSVKQYADVEGF

SEQ ID NO: 10009 - protein, 1977 aa, Homo sapiens
MSESEGGKDTTPEPSPANGAGPGPEWGLCPGPPAVEGESSGASGLGTPKRRNQHSKHKTVAVASAQRSPRALFCLTLANPLRRSCISIVEWKPFDILILLTIFANCVALGVYIPFPEDDSNTANHNLEQVEYVFLVIFTVETVLKIVAYGLVLHPSAYIRNGWNLLDFIIVVVGLFSVLLEQGPGRPGDAPHTGGKPGGFDVKALRAFRVLRPLRLVSGVPSLHIVLNSIMKALVPLLHIALLVLFVIIIYAIIGLELFLGRMHKTCYFLGSDMEAEEDPSPCASSGSGRACTLNQTECRGRWPGPNGGITNFDNFFFAMLTVFQCVTMEGWTDVLYWMQDAMGYELPWVYFVSLVIFGSFFVLNLVLGVLSGEFSKEREKAKARGDFQKQREKQQMEEDLRGYLDWITQAEELDMEDPSADDNLGSMAEEGRAGHRPQLAELTNRRRGRLRWFSHSTRSTHSTSSHASLPASDTGSMTETQGDEDEEEGALASCTRCLNKIMKTRVCRRLRRANRVLRARCRRAVKSNACYWAVLLLVFLNTLTIASEHHGQPVWLTQIQEYANKVLLCLFTVEMLLKLYGLGPSAYVSSFFNRFDCFVVCGGILETTLVEVGAMQPLGISVLRCVRLLRIFKVTRHWASLSNLVASLLNSMKSIASLLLLLFLFIIIFSLLGMQLFGGKFNFDQTHTKRSTFDTFPQALLTVFQILTGEDWNVVMYDGIMAYGGPFFPGMLVCIYFIILFICGNYILLNVFLAIAVDNLASGDAGTAKDKGGEKSNEKDLPQENEGLVPGVEKEEEEGARREGADMEEEEEEEEEEEEEEEEEGAGGVELLQEVVPKEKVVPIPEGSAFFCLSQTNPLRKGCHTLIHHHVFTNLILVFIILSSVSLAAEDPIRAHSFRNHILGYFDYAFTSIFTVEILLKMTVFGAFLHRGSFCRSWFNMLDLLVVSVSLISFGIHSSAISVVKILRVLRVLRPLRAINRAKGLKHVVQCVFVAIRTIGNIMIVTTLLQFMFACIGVQLFKGKFYTCTDEAKHTPQECKGSFLVYPDGDVSRPLVRERLWVNSDFNFDNVLSAMMALFTVSTFEGWPALLYKAIDAYAEDHGPIYNYRVEISVFFIVYIIIIAFFMMNIFVGFVIITFRAQGEQEYQNCELDKNQRQCVEYALKAQPLRRYIPKNPHQYRVWATVNSAAFEYLMFLLILLNTVALAMQHYEQTAPFNYAMDILNMVFTGLFTIEMVLKIIAFKPKHYFTDAWNTFDALIVVGSIVDIAVTEVNNGGHLGESSEDSSRISITFFRLFRVMRLVKLLSKGEGIRTLLWTFIKSFQALPYVALLIAMIFFIYAVIGMQMFGKVALQDGTQINRNNNFQTFPQAVLLLFRCATGEAWQEIMLASLPGNRCDPESDFGPGEEFTCGSNFAIAYFISFFMLCAFLIINLFVAVIMDNFDYLTRDWSILGPHHLDEFKRIWSEYDPGAKGRIKHLDVVALLRRIQPPLGFGKLCPHRVACKRLVAMNMPLNSDGTVTFNATLFALVRTSLKIKTEGNLEQANQELRIVIKKIWKRMKQKLLDEVIPPPDEEEVTVGKFYATFLIQDYFRKFRRRKEKGLLGNDAAPSTSSALQAGLRSLQDLGPEMRQALTCDTEEEEEEGQEGVEEEDEKDLETNKATMVSQPSARRGSGISVSLPVGDRLPDSLSFGPSDDDRGTPTSSQPSVPQAGSNTHRRGSGALIFTIPEEGNSQPKGTKGQNKQDEDEEVPDRLSYLDEQAGTPPCSVLLPPHRAQRYMDGHLVPRRRLLPPTPAGRKPSFTIQCLQRQGSCEDLPIPGTYHRGRNSGPNRAQGSWATPPQRGRLLYAPLLLVEEGAAGEGYLGRSSGPLRTFTCLHVPGTHSDPSHGKRGSADSLVEAVLISEGLGLFARDPRFVALAKQEIADACRLTLDEMDNAASDLLAQGTSSLYSDEESILSRFDEEDLGDEMACVHAL

SEQ ID NO: 10010 - protein, 782 aa, Homo sapiens
MFPPSGSTGLIPPSHFQARPLSTLPRMAPTWLSDIPLVQPPGHQDVSERRLDTQRPQVTMWERDVSSDRQEPGRRGRSWGLEGSQALSQQAEVIVRQLQELRRLEEEVRLLRETSLQQKMRLEAQAMELEALARAEKAGRAEAEGLRAALAGAEVVRKNLEEGSQRELEEVQRLHQEQLSSLTQAHEEALSSLTSKAEGLEKSLSSLETRRAGEAKELAEAQREAELLRKQLSKTQEDLEAQVTLVENLRKYVGEQVPSEVHSQTWELERQKLLETMQHLQEDRDSLHATAELLQVRVQSLTHILALQEEELTRKVQPSDSLEPEFTRKCQSLLNRWREKVFALMVQLKAQELEHSDSVKQLKGQVASLQEKVTSQSQEQAILQRSLQDKAAEVEVERMGAKGLQLELSRAQEARRRWQQQTASAEEQLRLVVNAVSSSQIWLETTMAKVEGAAAQLPSLNNRLSYAVRKVHTIRGLIARKLALAQLRQESCPLPPPVTDVSLELQQLREERNRLDAELQLSARLIQQEVGRAREQGEAERQQLSKVAQQLEQELQQTQESLASLGLQLEVARQGQQESTEEAASLRQELTQQQELYGQALQEKVAEVETRLREQLSDTERRLNEARREHAKAVVSLRQIQRRAAQEKERSQELRRLQEEARKEEGQRLARRLQELERDKNLMLATLQQEGLLSRYKQQRLLTVLPSLLDKKKSVVSSPRPPECSASAPVAAAVPTRESIKGSLSVLLDDLQDLSEAISKEEAVCQGDNLDRCSSSNPQMSS

SEQ ID NO: 10011 - protein, 496 aa, Homo sapiens
MAANCTSSWSLGESCNSPGSEPPQSMPSPATQLGNHDSDPETCHVNFRMFSCPKESDPIQALRKLTELCHLWLRPDLHTKEQILDMLVMEQFMISMPQELQVLVMMNGVQSCKDLEDLLRNNRRPKKWSVVSFLGKEYLMQESDVEMAEAPASVRDDPRHVSSQRTSSVNQMCPEEGQASQELQTLPRVPALFRRQEEDFLLPETTVMKGDPKALRPKPTLEKDLEEDREENPGLTSPEPQLPNSPTGVVGAKEGKEPQKRASVENVDADTPSACVVEREASTHSGSRGDALNLRGLKRSKPDATSISQEEPQGEATPVGNRESPGQAEINPVHSPGPAGPVSHPSGQEVKELLPFACEVCGKRFKYRGKLAVHTRSHTGERLFQCNLCGKRFMQRIGLQFHQRTHTGERPYTCDICQKQFTQKSYLKCHKRSHTGEKPFECKDCKKVFTYKANLKEHQRIHSGEKPHKCSKCPRAFGRPATLRRHQKTHREATSQ

SEQ ID NO: 10012 - protein, 681 aa, Homo sapiens
MAGFWVGTAPLVAAGRRGRWPPQQLMLSAALRTLKHVLYYSRQCLMVSRNLGSVGYDPNEKTFDKILVANRGEIACRVIRTCKKMGIKTVAIHSDVDASSVHVKMADEAVCVGPAPTSKSYLNMDAIMEAIKKTRAQAVHPGYGFLSENKEFARCLAAEDVVFIGPDTHAIQAMGDKIESKLLAKKAEVNTIPGFDGVVKDAEEAVRIAREIGYPVMIKASAGGGGKGMRIAWDDEETRDGFRLSSQEAASSFGDDRLLIEKFIDNPRHIEIQVLGDKHGNALWLNERECSIQRRNQKVVEEAPSIFLDAETRRAMGEQAVALARAVKYSSAGTVEFLVDSKKNFYFLEMNTRLQVEHPVTECITGLDLVQEMIRVAKGYPLRHKQADIRINGWAVECRVYAEDPYKSFGLPSIGRLSQYQEPLHLPGVRVDSGIQPGSDISIYYDPMISKLITYGSDRTEALKRMADALDNYVIRGVTHNIALLREVIINSRFVKGDISTKFLSDVYPDGFKGHMLTKSEKNQLLAIASSLFVAFQLRAQHFQENSRMPVIKPDIANWELSVKLHDKVHTVVASNNGSVFSVEVDGSKLNVTSTWNLASPLLSVSVDGTQRTVQCLSREAGGNMSIQFLGTVVAEGQEICVIEAMKMQNSMTAGKTGTVKSVHCQAGDTVGEGDLLVELE

SEQ ID NO: 10013 - protein, 728 aa, Homo sapiens
MAGFWVGTAPLVAAGRRGRWPPQQLMLSAALRTLKHVLYYSRQCLMVSRNLGSVGYDPNEKTFDKILVANRGEIACRVIRTCKKMGIKTVAIHSDVDASSVHVKMADEAVCVGPAPTSKSYLNMDAIMEAIKKTRAQAVHPGYGFLSENKEFARCLAAEDVVFIGPDTHAIQAMGDKIESKLLAKKAEVNTIPGFDGVVKDAEEAVRIAREIGYPVMIKASAGGGGKGMRIAWDDEETRDGFRLSSQEAASSFGDDRLLIEKFIDNPRHIEIQVLGDKHGNALWLNERECSIQRRNQKVVEEAPSIFLDAETRRAMGEQAVALARAVKYSSAGTVEFLVDSKKNFYFLEMNTRLQVEHPVTECITGLDLVQEMIRVAKGYPLRHKQADIRINGWAVECRVYAEDPYKSFGLPSIGRLSQYQEPLHLPGVRVDSGIQPGSDISIYYDPMISKLITYGSDRTEALKRMADALDNYVIRGVTHNIALLREVIINSRFVKGDISTKFLSDVYPDGFKGHMLTKSEKNQLLAIASSLFVAFQLRAQHFQENSRMPVIKPDIANWELSVKLHDKVHTVVASNNGSVFSVEVDGSKLNVTSTWNLASPLLSVSVDGTQRTVQCLSREAGGNMSIQFLGTVYKVNILTRLAAELNKFMLEKVTEDTSSVLRSPMPGVVVAVSVKPGDAVAEGQEICVIEAMKMQNSMTAGKTGTVKSVHCQAGDTVGEGDLLVELE

SEQ ID NO: 10014 - protein, 702 aa, Homo sapiens
MAGFWVGTAPLVAAGRRGRWPPQQLMLSAALRTLKTFDKILVANRGEIACRVIRTCKKMGIKTVAIHSDVDASSVHVKMADEAVCVGPAPTSKSYLNMDAIMEAIKKTRAQAVHPGYGFLSENKEFARCLAAEDVVFIGPDTHAIQAMGDKIESKLLAKKAEVNTIPGFDGVVKDAEEAVRIAREIGYPVMIKASAGGGGKGMRIAWDDEETRDGFRLSSQEAASSFGDDRLLIEKFIDNPRHIEIQVLGDKHGNALWLNERECSIQRRNQKVVEEAPSIFLDAETRRAMGEQAVALARAVKYSSAGTVEFLVDSKKNFYFLEMNTRLQVEHPVTECITGLDLVQEMIRVAKGYPLRHKQADIRINGWAVECRVYAEDPYKSFGLPSIGRLSQYQEPLHLPGVRVDSGIQPGSDISIYYDPMISKLITYGSDRTEALKRMADALDNYVIRGVTHNIALLREVIINSRFVKGDISTKFLSDVYPDGFKGHMLTKSEKNQLLAIASSLFVAFQLRAQHFQENSRMPVIKPDIANWELSVKLHDKVHTVVASNNGSVFSVEVDGSKLNVTSTWNLASPLLSVSVDGTQRTVQCLSREAGGNMSIQFLGTVYKVNILTRLAAELNKFMLEKVTEDTSSVLRSPMPGVVVAVSVKPGDAVAEGQEICVIEAMKMQNSMTAGKTGTVKSVHCQAGDTVGEGDLLVELE

SEQ ID NO: 10015 - protein, 529 aa, Homo sapiens
MGSSRAPWMGRVGGHGMMALLLAGLLLPGTLAKSIGTFSDPCKDPTRITSPNDPCLTGKGDSSGFSSYSGSSSSGSSISSARSSGGGSSGSSSGSSIAQGGSAGSFKPGTGYSQVSYSSGSGSSLQGASGSSQLGSSSSHSGNSGSHSGSSSSHSSSSSSFQFSSSSFQVGNGSALPTNDNSYRGILNPSQPGQSSSSSQTFGVSSSGQSVSSNQRPCSSDIPDSPCSGGPIVSHSGPYIPSSHSVSGGQRPVVVVVDQHGSGAPGVVQGPPCSNGGLPGKPCPPITSVDKSYGGYEVVGGSSDSYLVPGMTYSKGKIYPVGYFTKENPVKGSPGVPSFAAGPPISEGKYFSSNPIIPSQSAASSAIAFQPVGTGGVQLCGGGSTGSKGPCSPSSSRVPSSSSISSSSGLPYHPCGSASQSPCSPPGTGSFSSSSSSQSSGKIILQPCGSKSSSSGHPCMSVSSLTLTGGPDGSPHPDPSAGAKPCGSSSAGKIPCRSIRDILAQVKPLGPQLADPEVFLPQGELLNSP

SEQ ID NO: 10016 - protein, 566 aa, Homo sapiens
MKMQKGNVLLMFGLLLHLEAATNSNETSTSANTGSSVISSGASTATNSGSSVTSSGVSTATISGSSVTSNGVSIVTNSEFHTTSSGISTATNSEFSTVSSGISIATNSESSTTSSGASTATNSESSTPSSGASTATNSDSSTTSSGASTATNSDSSTTSSEASTATNSESSTTSSGASTATNSESSTVSSRASTATNSESSTTSSGASTATNSESRTTSNGAGTATNSESSTTSSGASTATNSESSTPSSGAGTATNSESSTTSSGAGTATNSESSTVSSGISTVTNSESSTPSSGANTATNSESSTTSSGANTATNSDSSTTSSGASTATNSESSTTSSGASTATNSESSTTSSGASTATNSGSSTTSSGTSTATNSESSTVSSGASTATTSESSTTSSGASTATNSESSTVSSGASTATNSESSTTSSGANTATNSGSSVTSAGSGTAALTGMHTTSHSASTAVSEAKPGGSLVPWEIFLITLVSVVAAVGLFAGLFFCVRNSLSLRNTFNTAVYHPHGLNHGLGPGPGGNHGAPHRPRWSPNWFWRRPVSSIAMEMSGRNSGP

SEQ ID NO: 10017 - protein, 631 aa, Homo sapiens
MGLPRGPEGQGLPEVETREDEEQNVKLTEILELLVAAGYFRARIKGLSPFDKVVGGMTWCITTCNFDVDVDLLFQENSTIGQKIALSEKIVSVLPRMKCPHQLEPHQIQGMDFIHIFPVVQWLVKRAIETKEEMGDYIRSYSVSQFQKTYSLPEDDDFIKRKEKAIKTVVDLSEVYKPRRKYKRHQGAEELLDEESRIHATLLEYGRRYGFSRQSKMEKAEDKKTALPAGLSATEKADAHEEDELRAAEEQRIQSLMTKMTAMANEESRLTASSVGQIVGLCSAEIKQIVSEYAEKQSELSAEESPEKLGTSQLHRRKVISLNKQIAQKTKHLEELRASHTSLQARYNEAKKTLTELKTYSEKLDKEQAALEKIESKADPSILQNLRALVAMNENLKSQEQEFKAHCREEMTRLQQEIENLKAERAPRGDEKTLSSGEPPGTLTSAMTHDEDLDRRYNMEKEKLYKIRLLQARRNREIAILHRKIDEVPSRAELIQYQKRFIELYRQISAVHKETKQFFTLYNTLDDKKVYLEKEISLLNSIHENFSQAMASPAARDQFLRQMEQIVEGIKQSRMKMEKKKQENKMRRDQLNDQYLELLEKQRLYFKTVKEFKEEGRKNEMLLSKVKAKAS

SEQ ID NO: 10018 - protein, 84 aa, Homo sapiens
MKLLYLFLAILLAIEEPVISGKRHILRCMGNSGICRASCKKNEQPYLYCRNCQSCCLQSYMRISISGKEENTDWSYEKQWPRLP

SEQ ID NO: 10019 - protein, 1115 aa, Homo sapiens
MAGAGGGLGVWGNLVLLGLCSWTGARAPAPNPGRNLTVETQTTSSISLSWEVPDGLDSQNSNYWVQCTGDGGTTETRNTTATNVTVDGLGPGSLYTCSVWVEKDGVNSSVGTVTTATAPNPVRNLRVEAQTNSSIALTWEVPDGPDPQNSTYGVEYTGDGGRAGTRSTAHTNITVDGLEPGCLYAFSMWVGKNGINSSRETRNATTAHNPVRNLRVEAQTTSSISLSWEVPDGTDPQNSTYCVQCTGDGGRTETRNTTDTRVTVDGLGPGSLYTCSVWVEKDGVNSSVEIVTSATAPNPVRNLTVEAQTNSSIALTWEVPDGPDPQNSTYGVEYTGDGGRAGTRSTAHTNITVDRLEPGCLYVFSVWVGKNGINSSRETRNATTAPNPVRNLHMETQTNSSIALCWEVPDGPYPQDYTYWVEYTGDGGGTETRNTTNTSVTAERLEPGTLYTFSVWAEKNGARGSRQNVSISTVPNAVTSLSKQDWTNSTIALRWTAPQGPGQSSYSYWVSWVREGMTDPRTQSTSGTDITLKELEAGSLYHLTVWAERNEVRGYNSTLTAATAPNEVTDLQNETQTKNSVMLWWKAPGDPHSQLYVYWVQWASKGHPRRGQDPQANWVNQTSRTNETWYKVEALEPGTLYNFTVWAERNDVASSTQSLCASTYPDTVTITSCVSTSAGYGVNLIWSCPQGGYEAFELEVGGQRGSQDRSSCGEAVSVLGLGPARSYPATITTIWDGMKVVSHSVVCHTESAGVIAGAFVGILLFLILVGLLIFFLKRRNKKKQQKPELRDLVFSSPGDIPAEDFADHVRKNERDSNCGFADEYQQLSLVGHSQSQMVASASENNAKNRYRNVLPYDWSRVPLKPIHEEPGSDYINASFMPGLWSPQEFIATQGPLPQTVGDFWRLVWEQQSHTLVMLTNCMEAGRVKCEHYWPLDSQPCTHGHLRVTLVGEEVMENWTVRELLLLQVEEQKTLSVRQFHYQAWPDHGVPSSPDTLLAFWRMLRQWLDQTMEGGPPIVHCSAGVGRTGTLIALDVLLRQLQSEGLLGPFSFVRKMRESRPLMVQTEAQYVFLHQCILRFLQQSAQAPAEKEVPYEDVENLIYENVAAIQAHKLEV

SEQ ID NO: 10020 - protein, 1215 aa, Homo sapiens
MGAMAYPLLLCLLLAQLGLGAVGASRDPQGRPDSPRERTPKGKPHAQQPGRASASDSSAPWSRSTDGTILAQKLAEEVPMDVASYLYTGDSHQLKRANCSGRYELAGLPGKWPALASAHPSLHRALDTLTHATNFLNVMLQSNKSREQNLQDDLDWYQALVWSLLEGEPSISRAAITFSTDSLSAPAPQVFLQATREESRILLQDLSSSAPHLANATLETEWFHGLRRKWRPHLHRRGPNQGPRGLGHSWRRKDGLGGDKSHFKWSPPYLECENGSYKPGWLVTLSSAIYGLQPNLVPEFRGVMKVDINLQKVDIDQCSSDGWFSGTHKCHLNNSECMPIKGLGFVLGAYECICKAGFYHPGVLPVNNFRRRGPDQHISGSTKDVSEEAYVCLPCREGCPFCADDSPCFVQEDKYLRLAIISFQALCMLLDFVSMLVVYHFRKAKSIRASGLILLETILFGSLLLYFPVVILYFEPSTFRCILLRWARLLGFATVYGTVTLKLHRVLKVFLSRTAQRIPYMTGGRVMRMLAVILLVVFWFLIGWTSSVCQNLEKQISLIGQGKTSDHLIFNMCLIDRWDYMTAVAEFLFLLWGVYLCYAVRTVPSAFHEPRYMAVAVHNELIISAIFHTIRFVLASRLQSDWMLMLYFAHTHLTVTVTIGLLLIPKFSHSSNNPRDDIATEAYEDELDMGRSGSYLNSSINSAWSEHSLDPEDIRDELKKLYAQLEIYKRKKMITNNPHLQKKRCSKKGLGRSIMRRITEIPETVSRQCSKEDKEGADHGTAKGTALIRKNPPESSGNTGKSKEETLKNRVFSLKKSHSTYDHVRDQTEESSSLPTESQEEETTENSTLESLSGKKLTQKLKEDSEAESTESVPLVCKSASAHNLSSEKKTGHPRTSMLQKSLSVIASAKEKTLGLAGKTQTAGVEERTKSQKPLPKDKETNRNHSNSDNTETKDPAPQNSNPAEEPRKPQKSGIMKQQRVNPTTANSDLNPGTTQMKDNFDIGEVCPWEVYDLTPGPVPSESKVQKHVSIVASEMEKNPTFSLKEKSHHKPKAAEVCQQSNQKRIDKAEVCLWESQGQSILEDEKLLISKTPVLPERAKEENGGQPRAANVCAGQSEELPPKAVASKTENENLNQIGHQEKKTSSSEENVRGSYNSSNNFQQPLTSRAEVCPWEFETPAQPNAGRSVALPASSALSANKIAGPRKEEIWDSFKV

SEQ ID NO: 10021 - protein, 371 aa, Homo sapiens
MTQQPLRGVTSLRFNQDQSCFCCAMETGVRIYNVEPLMEKGHLDHEQVGSMGLVEMLHRSNLLALVGGGSSPKFSEISVLIWDDAREGKDSKEKLVLEFTFTKPVLSVRMRHDKIVIVLKNRIYVYSFPDNPRKLFEFDTRDNPKAAHPTPHLHTLGLCDLCPSLEKQLLVFPGHKCGSLQLVDLASTKPGTSSAPFTINAHQSDIACVSLNQPGTVVASASQKGTLIRLFDTQSKEKLVELRRGTDPATLYCINFSHDSSFLCASSDKGTVHIFALKDTRLNRRSALARVGKVGPMIGQYVDSQWSLASFTVPAESACICAFGRNTSKNVNSVIAICVDGTFHKYVFTPDGNCNREAFDVYLDICDDDDF

SEQ ID NO: 10022 - protein, 360 aa, Homo sapiens
MTQQPLRGVTSLRFNQDQSCFCCAMETGVRIYNVEPLMEKGHLDHEQVGSMGLVEMLHRSNLLALVGGGSSPKFSEISVLIWDDAREGKDSKEKLVLEFTFTKPVLSVRMRHDKIVIVLKNRIYVYSFPDNPRKLFEFDTRDNPKGLCDLCPSLEKQLLVFPGHKCGSLQLVDLASTKPGTSSAPFTINAHQSDIACVSLNQPGTVVASASQKGTLIRLFDTQSKEKLVELRRGTDPATLYCINFSHDSSFLCASSDKGTVHIFALKDTRLNRRSALARVGKVGPMIGQYVDSQWSLASFTVPAESACICAFGRNTSKNVNSVIAICVDGTFHKYVFTPDGNCNREAFDVYLDICDDDDF

SEQ ID NO: 10023 - protein, 663 aa, Homo sapiens
MSARLPVLSPPRWPRLLLLSLLLLGAVPGPRRSGAFYLPGLAPVNFCDEEKKSDECKAEIELFVNRLDSVESVLPYEYTAFDFCQASEGKRPSENLGQVLFGERIEPSPYKFTFNKKETCKLVCTKTYHTEKAEDKQKLEFLKKSMLLNYQHHWIVDNMPVTWCYDVEDGQRFCNPGFPIGCYITDKGHAKDACVISSDFHERDTFYIFNHVDIKIYYHVVETGSMGARLVAAKLEPKSFKHTHIDKPDCSGPPMDISNKASGEIKIAYTYSVSFEEDDKIRWASRWDYILESMPHTHIQWFSIMNSLVIVLFLSGMVAMIMLRTLHKDIARYNQMDSTEDAQEEFGWKLVHGDIFRPPRKGMLLSVFLGSGTQILIMTFVTLFFACLGFLSPANRGALMTCAVVLWVLLGTPAGYVAARFYKSFGGEKWKTNVLLTSFLCPGIVFADFFIMNLILWGEGSSAAIPFGTLVAILALWFCISVPLTFIGAYFGFKKNAIEHPVRTNQIPRQIPEQSFYTKPLPGIIMGGILPFGCIFIQLFFILNSIWSHQMYYMFGFLFLVFIILVITCSEATILLCYFHLCAEDYHWQWRSFLTSGFTAVYFLIYAVHYFFSKLQITGTASTILYFGYTMIMVLIFFLFTGTIGFFACFWFVTKIYSVVKVD

SEQ ID NO: 10024 - protein, 2089 aa, Homo sapiens
MEDTQAIDWDVEEEEETEQSSESLRCNVEPVGRLHIFSGAHGPEKDFPLHLGKNVVGRMPDCSVALPFPSISKQHAEIEILAWDKAPILRDCGSLNGTQILRPPKVLSPGVSHRLRDQELILFADLLCQYHRLDVSLPFVSRGPLTVEETPRVQGETQPQRLLLAEDSEEEVDFLSERRMVKKSRTTSSSVIVPESDEEGHSPVLGGLGPPFAFNLNSDTDVEEGQQPATEEASSAARRGATVEAKQSEAEVVTEIQLEKDQPLVKERDNDTKVKRGAGNGVVPAGVILERSQPPGEDSDTDVDDDSRPPGRPAEVHLERAQPFGFIDSDTDAEEERIPATPVVIPMKKRKIFHGVGTRGPGAPGLAHLQESQAGSDTDVEEGKAPQAVPLEKSQASMVINSDTDDEEEVSAALTLAHLKESQPAIWNRDAEEDMPQRVVLLQRSQTTTERDSDTDVEEEELPVENREAVLKDHTKIRALVRAHSEKDQPPFGDSDDSVEADKSSPGIHLERSQASTTVDINTQVEKEVPPGSAIIHIKKHQVSVEGTNQTDVKAVGGPAKLLVVSLEEAWPLHGDCETDAEEGTSLTASVVADVRKSQLPAEGDAGAEWAAAVLKQERAHEVGAQGGPPVAQVEQDLPISRENLTDLVVDTDTLGESTQPQREGAQVPTGREREQHVGGTKDSEDNYGDSEDLDLQATQCFLENQGLEAVQSMEDEPTQAFMLTPPQELGPSHCSFQTTGTLDEPWEVLATQPFCLRESEDSETQPFDTHLEAYGPCLSPPRAIPGDQHPESPVHTEPMGIQGRGRQTVDKVMGIPKETAERVGPERGPLERETEKLLPERQTDVTGEEELTKGKQDREQKQLLARDTQRQESDKNGESASPERDRESLKVEIETSEEIQEKQVQKQTLPSKAFEREVERPVANRECDPAELEEKVPKVILERDTQRGEPEGGSQDQKGQASSPTPEPGVGAGDLPGPTSAPVPSGSQSGGRGSPVSPRRHQKGLLNCKMPPAEKASRIRAAEKVSRGDQESPDACLPPTVPEAPAPPQKPLNSQSQKHLAPPPLLSPLLPSIKPTVRKTRQDGSQEAPEAPLSSELEPFHPKPKIRTRKSSRMTPFPATSAAPEPHPSTSTAQPVTPKPTSQATRSRTNRSSVKTPEPVVPTAPELQPSTSTDQPVTSEPTSQVTRGRKSRSSVKTPETVVPTALELQPSTSTDRPVTSEPTSQATRGRKNRSSVKTPEPVVPTAPELQPSTSTDQPVTSEPTYQATRGRKNRSSVKTPEPVVPTAPELRPSTSTDRPVTPKPTSRTTRSRTNMSSVKTPETVVPTAPELQISTSTDQPVTPKPTSRTTRSRTNMSSVKNPESTVPIAPELPPSTSTEQPVTPEPTSRATRGRKNRSSGKTPETLVPTAPKLEPSTSTDQPVTPEPTSQATRGRTNRSSVKTPETVVPTAPELQPSTSTDQPVTPEPTSQATRGRTDRSSVKTPETVVPTAPELQASASTDQPVTSEPTSRTTRGRKNRSSVKTPETVVPAAPELQPSTSTDQPVTPEPTSRATRGRTNRSSVKTPESIVPIAPELQPSTSRNQLVTPEPTSRATRCRTNRSSVKTPEPVVPTAPEPHPTTSTDQPVTPKLTSRATRRKTNRSSVKTPKPVEPAASDLEPFTPTDQSVTPEAIAQGGQSKTLRSSTVRAMPVPTTPEFQSPVTTDQPISPEPITQPSCIKRQRAAGNPGSLAAPIDHKPCSAPLEPKSQASRNQRWGAVRAAESLTAIPEPASPQLLETPIHASQIQKVEPAGRSRFTPELQPKASQSRKRSLATMDSPPHQKQPQRGEVSQKTVIIKEEEEDTAEKPGKEEDVVTPKPGKRKRDQAEEEPNRIPSRSLRRTKLNQESTAPKVLFTGVVDARGERAVLALGGSLAGSAAEASHLVTDRIRRTVKFLCALGRGIPILSLDWLHQSRKAGFFLPPDEYVVTDPEQEKNFGFSLQDALSRARERRLLEGYEIYVTPGVQPPPPQMGEIISCCGGTYLPSMPRSYKPQRVVITCPQDFPHCSIPLRVGLPLLSPEFLLTGVLKQEAKPEAFVLSPLEMSST

SEQ ID NO: 10025 - protein, 362 aa, Homo sapiens
MVFRRGQSPPVAEFNLLLKAHTLETYGVDPHPCKDSTGTTTFLGFTAAGFVVFQGNKRIHLIKWPDVCKLKFEGKTFYVIGTQKEKKAMLAFHTSTPAACKHLWKCGVENQAFYKYAKSSQIKTVSSSKIFFKGSRFRYSGKVAKEVVEASSKIQREPPEVHRANITQSRSSHSLNKQLIINMEPLQPLLPSPSEQEEELPLGEGVPLPKEENISAPLISSSPVKAAREYEDPPSEEEDKIKEEPLTISELVYNPSASLLPTPVDDDEIDMLFDCPSRLELEREDTDSFEDLEADENAFLIAEEEELKEARRALSWSYDILTGHIRVNPLVKSFSRLLVVGLGLLLFVFPLLLLLLESVSMQ

SEQ ID NO: 10026 - protein, 556 aa, Homo sapiens
MFASCHCVPRGRRTMKMIHFRSSSVKSLSQEMRCTIRLLDDSEISCHIQRETKGQFLIDHICNYYSLLEKDYFGIRYVDPEKQRHWLEPNKSIFKQMKTHPPYTMCFRVKFYPHEPLKIKEELTRYLLYLQIKRDIFHGRLLCSFSDAAYLGACIVQAELGDYDPDEHPENYISEFEIFPKQSQKLERKIVEIHKNELRGQSPPVAEFNLLLKAHTLETYGVDPHPCKDSTGTTTFLGFTAAGFVVFQGNKRIHLIKWPDVCKLKFEGKTFYVIGTQKEKKAMLAFHTSTPAACKHLWKCGVENQAFYKYAKSSQIKTVSSSKIFFKGSRFRYSGKVAKEVVEASSKIQREPPEVHRANITQSRSSHSLNKQLIINMEPLQPLLPSPSEQEEELPLGEGVPLPKEENISAPLISSSPVKAAREYEDPPSEEEDKIKEEPLTISELVYNPSASLLPTPVDDDEIDMLFDCPSRLELEREDTDSFEDLEADENAFLIAEEEELKEARRALSWSYDILTGHIRVNPLVKSFSRLLVVGLGLLLFVFPLLLLLLESVSMQ

SEQ ID NO: 10027 - protein, 1041 aa, Homo sapiens
MATPAGLERWVQDELHSVLGLSERHVAQFLIGTAQRCTSAEEFVQRLRDTDTLDLSGPARDFALRLWNKVPRKAVVEKPARAAEREARALLEKNRSYRLLEDSEESSEETVSRAGSSLQKKRKKRKHLRKKREEEEEEEASEKGKKKTGGSKQQTEKPESEDEWERTERERLQDLEERDAFAERVRQRDKDRTRNVLERSDKKAYEEAQKRLKMAEEDRKAMVPELRKKSRREYLAKREREKLEDLEAELADEEFLFGDVELSRHERQELKYKRRVRDLAREYRAAGEQEKLEATNRYHMPKETRGQPARAVDLVEEESGAPGEEQRRWEEARLGAASLKFGARDAASQEPKYQLVLEEEETIEFVRATQLQGDEEPSAPPTSTQAQQKESIQAVRRSLPVFPFREELLAAIANHQVLIIEGETGSGKTTQIPQYLFEEGYTNKGMKIACTQPRRVAAMSVAARVAREMGVKLGNEVGYSIRFEDCTSERTVLRYMTDGMLLREFLSEPDLASYSVVMVDEAHERTLHTDILFGLIKDVARFRPELKVLVASATMDTARFSTFFDDAPVFRIPGRRFPVDIFYTKAPEADYLEACVVSVLQIHVTQPPGDILVFLTGQEEIEAACEMLQDRCRRLGSKIRELLVLPIYANLPSDMQARIFQPTPPGARKVVVATNIAETSLTIEGIIYVLDPGFCKQKSYNPRTGMESLTVTPCSKASANQRAGRAGRVAAGKCFRLYTAWAYQHELEETTVPEIQRTSLGNVVLLLKSLGIHDLMHFDFLDPPPYETLLLALEQLYALGALNHLGELTTSGRKMAELPVDPMLSKMILASEKYSCSEEILTVAAMLSVNNSIFYRPKDKVVHADNARVNFFLPGGDHLVLLNVYTQWAESGYSSQWCYENFVQFRSMRRARDVREQLEGLLERVEVGLSSCQGDYIRVRKAITAGYFYHTARLTRSGYRTVKQQQTVFIHPNSSLFEQQPRWLLYHELVLTTKEFMRQVLEIESSWLLEVAPHYYKAKELEDPHAKKMPKKIGKTREELG

SEQ ID NO: 10028 - protein, 740 aa, Homo sapiens
MEADGDGEELARLRSVFAACDANRSGRLEREEFRALCTELRVRPADAEAVFQRLDADRDGAITFQEFARGFLGSLRGGRRRDWGPLDPAPAVSEAGPETHDSEEDEGDEDAAAALATSCGPASPGRAWQDFQARLGDEAKFIPREEQVSTLYQNINLVEPRLIQPYEHVIKNFIREIRLQSTEMENLAIAVKRAQDKAAMQLSELEEEMDQRIQAAEHKTRKDEKRKAEEALSDLRRQYETEVGDLQVTIKKLRKLEEQSKRVSQKEDVAALKKQIYDLSMENQKVKKDLLEAQTNIAFLQSELDALKSDYADQSLNTERDLEIIRAYTEDRNSLERQIEILQTANRKLHDSNDGLRSALENSYSKFNRSLHINNISPGNTISRSSPKFIGHSPQPLGYDRSSRSSYVDEDCDSLALCDPLQRTNCEVDSLPESCFDSGLSTLRDPNEYDSEVEYKHQRGFQRSHGVQESFGGDASDTDVPDIRDEETFGLEDVASVLDWKPQGSVSEGSIVSSSRKPISALSPQTDLVDDNAKSFSSQKAYKIVLAGDAAVGKSSFLMRLCKNEFRENISATLGVDFQMKTLIVDGERTVLQLWDTAGQERFRSIAKSYFRKADGVLLLYDVTCEKSFLNIREWVDMIEDAAHETVPIMLVGNKADIRDTAATEGQKCVPGHFGEKLAMTYGALFCETSAKDGSNIVEAVLHLAREVKKRTDKDDSRSITNLTGTNSKKSPQMKNCCNG

SEQ ID NO: 10029 - protein, 1465 aa, Homo sapiens
MQRELVYARGDGPGAPRPGSTAHPPHAIPNSPPSTPVPHSMPPSPSRIPYGGTRSMVVPGNATIPRDRISSLPVSRPISPSPSAILERRDVKPDEDMSGKNIAMYRNEGFYADPYLYHEGRMSIASSHGGHPLDVPDHIIAYHRTAIRSASAYCNPSMQAEMHMEQSLYRQKSRKYPDSHLPTLGSKTPPASPHRVSDLRMIDMHAHYNAHGPPHTMQPDRASPSRQAFKKEPGTLVYIEKPRSAAGLSSLVDLGPPLMEKQVFAYSTATIPKDRETSEKMMKTTANRNHTDSAGTPHVSGGKMLSALESTVPPSQPPPVGTSAIHMSLLEMRRSVAELRLQLQQMRQLQLQNQELLRAMMKKAELEISGKVMETMKRLEDPVQRQRVLVEQERQKYLHEEEKIVKKLCELEDFVEDLKKDSTAASRLVTLKDVEDGAFLLRQVGEAVATLKGEFPTLQNKMRAILRIEVEAVRFLKEEPHKLDSLLKRVRSMTDVLTMLRRHVTDGLLKGTDAAQAAQYMAMEKATAAEVLKSQEEAAHTSGQPFHSTGAPGDAKSEVVPLSGMMVRHAQSSPVVIQPSQHSVALLNPAQNLPHVASSPAVPQEATSTLQMSQAPQSPQIPMNGSAMQSLFIEEIHSVSAKNRAVSIEKAEKKWEEKRQNLDHYNGKEFEKLLEEAQANIMKSIPNLEMPPATGPLPRGDAPVDKVELSEDSPNSEQDLEKLGGKSPPPPPPPPRRSYLPGSGLTTTRSGDVVYTGRKENITAKASSEDAGPSPQTRATKYPAEEPASAWTPSPPPVTTSSSKDEEEEEEEGDKIMAELQAFQKCSFMDVNSNSHAEPSRADSHVKDTRSGATVPPKEKKNLEFFHEDVRKSDVEYENGPQMEFQKVTTGAVRPSDPPKWERGMENSISDASRTSEYKTEIIMKENSISNMSLLRDSRNYSQETVPKASFGFSGISPLEDEINKGSKISGLQYSIPDTENQTLNYGKTKEMEKQNTDKCHVSSHTRLTESSVHDFKTEDQEVITTDFGQVVLRPKEARHANVNPNEDGESSSSSPTEENAATDNIAFMITETTVQVLSSGEVHDIVSQKGEDIQTVNIDARKEMTPRQEGTDNEDPVVCLDKKPVIIIFDEPMDIRSAYKRLSTIFEECDEELERMMMEEKIEEEEEEENGDSVVQNNNTSQMSHKKVAPGNLRTGQQVETKSQPHSLATETRNPGGQEMNRTELNKFSHVDSPNSECKGEDATDDQFESPKKKFKFKFPKKQLAALTQAIRTGTKTGKKTLQVVVYEEEEEDGTLKQHKEAKRFEIARSQPEDTPENTVRRQEQPSIESTSPISRTDEIRKNTYRTLDSLEQTIKQLENTISEMSPKALVDTSCSSNRDSVASSSHIAQEASPRPLLVPDEGPTALEPPTSIPSASRKGSSGAPQTSRMPVPMSAKNRPGTLDKPGKQSKLQDPRQYRQVVLP

SEQ ID NO: 10030 - protein, 1374 aa, Homo sapiens
MEENESQKCEPCLPYSADRRQMQEQGKGNLHVTSPEDAECRRTKERLSNGNSRGSVSKSSRNIPRRHTLGGPRSSKEILGMQTSEMDRKREAFLEHLKQKYPHHASAIMGHQERLRDQTRSPKLSHSPQPPSLGDPVEHLSETSADSLEAMSEGDAPTPFSRGSRTRASLPVVRSTNQTKERSLGVLYLQYGDETKQLRMPNEITSADTIRALFVSAFPQQLTMKMLESPSVAIYIKDESRNVYYELNDVRNIQDRSLLKVYNKDPAHAFNHTPKTMNGDMRMQRELVYARGDGPGAPRPGSTAHPPHAIPNSPPSTPVPHSMPPSPSRIPYGGTRSMVVPGNATIPRDRISSLPVSRPISPSPSAILERRDVKPDEDMSGKNIAMYRNEGFYADPYLYHEGRMSIASSHGGHPLDVPDHIIAYHRTAIRSASAYCNPSMQAEMHMEQSLYRQKSRKYPDSHLPTLGSKTPPASPHRVSDLRMIDMHAHYNAHGPPHTMQPDRASPSRQAFKKEPGTLVYIEKPRSAAGLSSLVDLGPPLMEKQVFAYSTATIPKDRETSEKMMKTTANRNHTDSAGTPHVSGGKMLSALESTVPPSQPPPVGTSAIHMSLLEMRRSVAELRLQLQQMRQLQLQNQELLRAMMKKAELEISGKVMETMKRLEDPVQRQRVLVEQERQKYLHEEEKIVKKLCELEDFVEDLKKDSTAASRLVTLKDVEDGAFLLRQVGEAVATLKGEFPTLQNKMRAILRIEVEAVRFLKEEPHKLDSLLKRVRSMTDVLTMLRRHVTDGLLKGTDAAQAAQYMAMEKATAAEVLKSQEEAAHTSGQPFHSTGAPGDAKSEVVPLSGMMVRHAQSSPVVIQPSQHSVALLNPAQNLPHVASSPAVPQEATSTLQMSQAPQSPQIPMNGSAMQSLFIEEIHSVSAKNRAVSIEKAEKKWEEKRQNLDHYNGKEFEKLLEEAQANIMKSIPNLEMPPATGPLPRGDAPVDKVELSDSPNSEQDLEKLGGKSPPPPPPPPRRSYLPGSGLTTTRSGDVVYTGRKENITAKASSEDAGPSPQTRATKYPAEEPASAWTPSPPPVTTSSSKDEEEEEEEGDKIMAELQAFQKCSFMDVNSNSHAEPSRADSHVKDTRSGATVPPKEKKNLEFFHEDVRKSDVEYENGPQMEFQKGSSGAPQTSRMPVPMSAKNRPGTLDKPGKQSKLQDPRQYRQANGSAKKSGGDFKPTSPSLPASKIPALSPSSGKSSSLPSSSGDSSNLPNPPATKPSIASNPLSPQTGPPAHSASLIPSVSNGSLKFQSLTHTGKGHHLSFSPQSQNGRAPPPLSFSSSPPSPASSVSLNQGAKGTRTIHTPSLTSYKAQNGSSSKATPSTAKETS

SEQ ID NO: 10031 - protein, 1943 aa, Homo sapiens
MEENESQKCEPCLPYSADRRQMQEQGKGNLHVTSPEDAECRRTKERLSNGNSRGSVSKSSRNIPRRHTLGGPRSSKEILGMQTSEMDRKREAFLEHLKQKYPHHASAIMGHQERLRDQTRSPKLSHSPQPPSLGDPVEHLSETSADSLEAMSEGDAPTPFSRGSRTRASLPVVRSTNQTKERSLGVLYLQYGDETKQLRMPNEITSADTIRALFVSAFPQQLTMKMLESPSVAIYIKDESRNVYYELNDVRNIQDRSLLKVYNKDPAHAFNHTPKTMNGDMRMQRELVYARGDGPGAPRPGSTAHPPHAIPNSPPSTPVPHSMPPSPSRIPYGGTRSMVVPGNATIPRDRISSLPVSRPISPSPSAILERRDVKPDEDMSGKNIAMYRNEGFYADPYLYHEGRMSIASSHGGHPLDVPDHIIAYHRTAIRSASAYCNPSMQAEMHMEQSLYRQKSRKYPDSHLPTLGSKTPPASPHRVSDLRMIDMHAHYNAHGPPHTMQPDRASPSRQAFKKEPGTLVYIEKPRSAAGLSSLVDLGPPLMEKQVFAYSTATIPKDRETRERMQAMEKQIASLTGLVQSALFKGPITSYSKDASSEKMMKTTANRNHTDSAGTPHVSGGKMLSALESTVPPSQPPPVGTSAIHMSLLEMRRSVAELRLQLQQMRQLQLQNQELLRAMMKKAELEISGKVMETMKRLEDPVQRQRVLVEQERQKYLHEEEKIVKKLCELEDFVEDLKKDSTAASRLVTLKDVEDGAFLLRQVGEAVATLKGEFPTLQNKMRAILRIEVEAVRFLKEEPHKLDSLLKRVRSMTDVLTMLRRHVTDGLLKGTDAAQAAQYMAMEKATAAEVLKSQEEAAHTSGQPFHSTGAPGDAKSEVVPLSGMMVRHAQSSPVVIQPSQHSVALLNPAQNLPHVASSPAVPQEATSTLQMSQAPQSPQIPMNGSAMQSLFIEEIHSVSAKNRAVSIEKAEKKWEEKRQNLDHYNGKEFEKLLEEAQANIMKSIPNLEMPPATGPLPRGDAPVDKVELSEDSPNSEQDLEKLGGKSPPPPPPPPRRSYLPGSGLTTTRSGDVVYTGRKENITAKASSEDAGPSPQTRATKYPAEEPASAWTPSPPPVTTSSSKDEEEEEEEGDKIMAELQAFQKCSFMDVNSNSHAEPSRADSHVKDTRSGATVPPKEKKNLEFFHEDVRKSDVEYENGPQMEFQKVTTGAVRPSDPPKWERGMENSISDASRTSEYKTEIIMKENSISNMSLLRDSRNYSQETVPKASFGFSGISPLEDEINKGSKISGLQYSIPDTENQTLNYGKTKEMEKQNTDKCHVSSHTRLTESSVHDFKTEDQEVITTDFGQVVLRPKEARHANVNPNEDGESSSSSPTEENAATDNIAFMITETTVQVLSSGEVHDIVSQKGEDIQTVNIDARKEMTPRQEGTDNEDPVVCLDKKPVIIIFDEPMDIRSAYKRLSTIFEECDEELERMMMEEKIEEEEEEENGDSVVQNNNTSQMSHKKVAPGNLRTGQQVETKSQPHSLATETRNPGGQEMNRTELNKFSHVDSPNSECKGEDATDDQFESPKKKFKFKFPKKQLAALTQAIRTGTKTGKKTLQVVVYEEEEEDGTLKQHKEAKRFEIARSQPEDTPENTVRRQEQPSIESTSPISRTDEIRKNTYRTLDSLEQTIKQLENTISEMSPKALVDTSCSSNRDSVASSSHIAQEASPRPLLVPDEGPTALEPPTSIPSASRKGSSGAPQTSRMPVPMSAKNRPGTLDKPGKQSKLQDPRQYRQANGSAKKSGGDFKPTSPSLPASKIPALSPSSGKSSSLPSSSGDSSNLPNPPATKPSIASNPLSPQTGPPAHSASLIPSVSNGSLKFQSLTHTGKGHHLSFSPQSQNGRAPPPLSFSSSPPSPASSVSLNQGAKGTRTIHTPSLTSYKAQNGSSSKATPSTAKETS

SEQ ID NO: 10032 - protein, 933 aa, Homo sapiens
MEENESQKCEPCLPYSADRRQMQEQGKGNLHVTSPEDAECRRTKERLSNGNSRGSVSKSSRNIPRRHTLGGPRSSKEILGMQTSEMDRKREAFLEHLKQKYPHHASAIMGHQERLRDQTRSPKLSHSPQPPSLGDPVEHLSETSADSLEAMSEGDAPTPFSRGSRTRASLPVVRSTNQTKERSLGVLYLQYGDETKQLRMPNEITSADTIRALFVSAFPQQLTMKMLESPSVAIYIKDESRNVYYELNDVRNIQDRSLLKVYNKDPAHAFNHTPKTMNGDMRMQRELVYARGDGPGAPRPGSTAHPPHAIPNSPPSTPVPHSMPPSPSRIPYGGTRSMVVPGNATIPRDRISSLPVSRPISPSPSAILERRDVKPDEDMSGKNIAMYRNEGFYADPYLYHEGRMSIASSHGGHPLDVPDHIIAYHRTAIRSASAYCNPSMQAEMHMEQSLYRQKSRKYPDSHLPTLGSKTPPASPHRVSDLRMIDMHAHYNAHGPPHTMQPDRASPSRQAFKKEPGTLVYIEKPRSAAGLSSLVDLGPPLMEKQVFAYSTATIPKDRETSEKMMKTTANRNHTDSAGTPHVSGGKMLSALESTVPPSQPPPVGTSAIHMSLLEMRRSVAELRLQLQQMRQLQLQNQELLRAMMKKAELEISGKVMETMKRLEDPVQRQRVLVEQERQKYLHEEEKIVKKLCELEDFVEDLKKDSTAASRLVTLKDVEDGAFLLRQVGEAVATLKGEFPTLQNKMRAILRIEVEAVRFLKEEPHKLDSLLKRVRSMTDVLTMLRRHVTDGLLKGTDAAQAAQYMAMEKATAAEVLKSQEEAAHTSGQPFHSTGAPGDAKSEVVPLSGMMVRHAQSSPVVIQPSQHSVALLNPAQNLPHVASSPAVPQEATSTLQMSQAPQSPQIPMNGSAMQSLFIEEIHSVSAKNRAVSIEKA

SEQ ID NO: 10033 - protein, 2068 aa, Homo sapiens
MQADKCRTSSRSVKKELVIESPLQYKDAAQGEVEAESPGPVPAKPKLIEPLDYENVIVQKKTQILNDCLREMLLFPYDDFQTAILRRQGRYICSTVPAKAEEEAQSLFVTECIKTYNSDWHLVNYKYEDYSGEFRQLPNKVVKLDKLPVHVYEVDEEVDKDEDAASLGSQKGGITKHGWLYKGNMNSAISVTMRSFKRRFFHLIQLGDGSYNLNFYKDEKISKEPKGSIFLDSCMGVVQNNKVRRFAFELKMQDKSSYLLAADSEVEMEEWITILNKILQLNFEAAMQEKRNGDSHEDDEQSKLEGSGSGLDSYLPELAKSAREAEIKLKSESRVKLFYLDPDAQKLDFSSAEPEVKSFEEKFGKRILVKCNDLSFNLQCCVAENEEGPTTNVEPFFVTLSLFDIKYNRKISADFHVDLNHFSVRQMLATTSPALMNGSGQSPSVLKGILHEAAMQYPKQGIFSVTCPHPDIFLVARIEKVLQGSITHCAEPYMKSSDSSKVAQKVLKNAKQACQRLGQYRMPFAWAARTLFKDASGNLDKNARFSAIYRQDSNKLSNDDMLKLLADFRKPEKMAKLPVILGNLDITIDNVSSDFPNYVNSSYIPTKQFETCSKTPITFEVEEFVPCIPKHTQPYTIYTNHLYVYPKYLKYDSQKSFAKARNIAICIEFKDSDEEDSQPLKCIYGRPGGPVFTRSAFAAVLHHHQNPEFYDEIKIELPTQLHEKHHLLLTFFHVSCDNSSKGSTKKRDVVETQVGYSWLPLLKDGRVVTSEQHIPVSANLPSGYLGYQELGMGRHYGPEIKWVDGGKPLLKISTHLVSTVYTQDQHLHNFFQYCQKTESGAQALGNELVKYLKSLHAMEGHVMIAFLPTILNQLFRVLTRATQEEVAVNVTRVIIHVVAQCHEEGLESHLRSYVKYAYKAEPYVASEYKTVHEELTKSMTTILKPSADFLTSNKLLKYSWFFFDVLIKSMAQHLIENSKVKLLRNQRFPASYHHAVETVVNMLMPHITQKFRDNPEASKNANHSLAVFIKRCFTFMDRGFVFKQINNYISCFAPGDPKTLFEYKFEFLRVVCNHEHYIPLNLPMPFGKGRIQRYQDLQLDYSLTDEFCRNHFLVGLLLREVGTALQEFREVRLIAISVLKNLLIKHSFDDRYASRSHQARIATLYLPLFGLLIENVQRINVRDVSPFPVNAGMTVKDESLALPAVNPLVTPQKGSTLDNSLHKDLLGAISGIASPYTTSTPNINSVRNADSRGSLISTDSGNSLPERNSEKSNSLDKHQQSSTLGNSVVRCDKLDQSEIKSLLMCFLYILKSMSDDALFTYWNKASTSELMDFFTISEVCLHQFQYMGKRYIARTGMMHARLQQLGSLDNSLTFNHSYGHSDADVLHQSLLEANIATEVCLTALDTLSLFTLAFKNQLLADHGHNPLMKKVFDVYLCFLQKHQSETALKNVFTALRSLIYKFPSTFYEGRADMCAALCYEILKCCNSKLSSIRTEASQLLYFLMRNNFDYTGKKSFVRTHLQVIISVSQLIADVVGIGGTRFQQSLSIINNCANSDRLIKHTSFSSDVKDLTKRIRTVLMATAQMKEHENDPEMLVDLQYSLAKSYASTPELRKTWLDSMARIHVKNGDLSEAAMCYVHVTALVAEYLTRKEAVQWEPPLLPHSHSACLRRSRGGVFRQGCTAFRVITPNIDEEASMMEDVGMQDVHFNEDVLMELLEQCADGLWKAERYELIADIYKLIIPIYEKRRDFERLAHLYDTLHRAYSKVTEVMHSGRRLLGTYFRVAFFGQAAQYQFTDSETDVEGFFEDEDGKEYIYKEPKLTPLSEISQRLLKLYSDKFGSENVKMIQDSGKVNPKDLDSKYAYIQVTHVIPFFDEKELQERKTEFERSHNIRRFMFEMPFTQTGKRQGGVEEQCKRRTILTAIHCFPYVKKRIPVMYQHHTDLNPIEVAIDEMSKKVAELRQLCSSAEVDMIKLQLKLQGSVSVQVNAGPLAYARAFLDDTNTKRYPDNKVKLLKEVFRQFVEACGQALAVNERLIKEDQLEYQEEMKANYREMAKELSEIMHEQLG

SEQ ID NO: 10034 - protein, 1264 aa, Homo sapiens
MQTSEMDRKREAFLEHLKQKYPHHASAIMGHQERLRDQTRSPKLSHSPQPPSLGDPVEHLSETSADSLEAMSEGDAPTPFSRGSRTRASLPVVRSTNQTKERSLGVLYLQYGDETKQLRMPNEITSADTIRALFVSAFPQQLTMKMLESPSVAIYIKDESRNVYYELNDVRNIQDRSLLKVYNKDPAHAFNHTPKTMNGDMRMQRELVYARGDGPGAPRPGSTAHPPHAIPNSPPSTPVPHSMPPSPSRIPYGGTRSMVVPGNATIPRDRISSLPVSRPISPSPSAILERRDVKPDEDMSGKNIAMYRNEGFYADPYLYHEGRMSIASSHGGHPLDVPDHIIAYHRTAIRSASAYCNPSMQAEMHMEQSLYRQKSRKYPDSHLPTLGSKTPPASPHRVSDLRMIDMHAHYNAHGPPHTMQPDRASPSRQAFKKEPGTLVYIEKPRSAAGLSSLVDLGPPLMEKQVFAYSTATIPKDRETRERMQAMEKQIASLTGLVQSALFKGPITSYSKDASSEKMMKTTANRNHTDSAGTPHVSGGKMLSALESTVPPSQPPPVGTSAIHMSLLEMRRSVAELRLQLQQMRQLQLQNQELLRAMMKKAELEISGKVMETMKRLEDPVQRQRVLVEQERQKYLHEEEKIVKKLCELEDFVEDLKKDSTAASRLVTLKDVEDGAFLLRQVGEAVATLKGEFPTLQNKMRAILRIEVEAVRFLKEEPHKLDSLLKRVRSMTDVLTMLRRHVTDGLLKGTDAAQAAQYMAMEKATAAEVLKSQEEAAHTSGQPFHSTGAPGDAKSEVVPLSGMMVRHAQSSPVVIQPSQHSVALLNPAQNLPHVASSPAVPQEATSTLQMSQAPQSPQIPMNGSAMQSLFIEEIHSVSAKNRAVSIEKAEKKWEEKRQNLDHYNGKEFEKLLEEAQANIMKSIPNLEMPPATGPLPRGDAPVDKVELSEDSPNSEQDLEKLGGKSPPPPPPPPRRSYLPGSGLTTTRSGDVVYTGRKENITAKASSEDAGPSPQTRATKYPAEEPASAWTPSPPPVTTSSSKDEEEEEEEGDKIMAELQGSSGAPQTSRMPVPMSAKNRPGTLDKPGKQSKLQDPRQYRQANGSAKKSGGDFKPTSPSLPASKIPALSPSSGKSSSLPSSSGDSSNLPNPPATKPSIASNPLSPQTGPPAHSASLIPSVSNGSLKFQSLTHTGKGHHLSFSPQSQNGRAPPPLSFSSSPPSPASSVSLNQGAKGTRTIHTPSLTSYKAQNGSSSKATPSTAKETS

SEQ ID NO: 10035 - protein, 134 aa, Homo sapiens
MDPQTAPSRALLLLLFLHLAFLGGRSHPLGSPGSASDLETSGLQEQRNHLQGKLSELQVEQTSLEPLQESPRPTGVWKSREVATEGIRGHRKMVLYTLRAPRSPKMVQGSGCFGRKMDRISSSSGLGCKVLRRH

SEQ ID NO: 10036 - protein, 151 aa, Homo sapiens
MSSFSTTTVSFLLLLAFQLLGQTRANPMYNAVSNADLMDFKNLLDHLEEKMPLEDEVVPPQVLSEPNEEAGAALSPLPEVPPWTGEVSPAQRDGGALGRGPWDSSDRSALLKSKLRALLTAPRSLRRSSCFGGRMDRIGAQSGLGCNSFRY

SEQ ID NO: 10037 - protein, 229 aa, Homo sapiens
MVNEARGNSSLNPCLEGSASSGSESSKDSSRCSTPGLDPERHERLREKMRRRLESGDKWFSLEFFPPRTAEGAVNLISRFDRMAAGGPLYIDVTWHPAGDPGSDKETSSMMIASTAVNYCGLETILHMTCCRQRLEEITGHLHKAKQLGLKNIMALRGDPIGDQWEEEEGGFNYAVDLVKHIRSEFGDYFDICVAGYPKGHPEAGSFEADLKHLKEKVSAGADFIITQL

SEQ ID NO: 10038 - protein, 953 aa, Homo sapiens
MAGCRGSLCCCCRWCCCCGERETRTPEELTILGETQEEEDEILPRKDYESLDYDRCINDPYLEVLETMDNKKGRRYEAVKWMVVFAIGVCTGLVGLFVDFFVRLFTQLKFGVVQTSVEECSQKGCLALSLLELLGFNLTFVFLASLLVLIEPVAAGSGIPEVKCYLNGVKVPGIVRLRTLLCKVLGVLFSVAGGLFVEKEGPMIHSGSVVGAGLPQFQSISLRKIQFNFPYFRSDRDKRDFVSAGAAAGVAAAFGAPIGGTLFSLEEGSSFWNQGLTWKVLFCSMSATFTLNFFRSGIQFGSWGSFQLPGLLNFGEFKCSDSDKKCHLWTAMDLGFFVVMGVIGGLLGATFNCLNKRLAKYRMRNVHPKPKLVRVLESLLVSLVTTVVVFVASMVLGECRQMSSSSQIGNDSFQLQVTEDVNSSIKTFFCPNDTYNDMATLFFNPQESAILQLFHQDGTFSPVTLALFFVLYFLLACWTYGISVPSGLFVPSLLCGAAFGRLVANVLKSYIGLGHIYSGTFALIGAAAFLGGVVRMTISLTVILIESTNEITYGLPIMVTLMVAKWTGDFFNKGIYDIHVGLRGVPLLEWETEVEMDKLRASDIMEPNLTYVYPHTRIQSLVSILRTTVHHAFPVVTENRGNEKEFMKGNQLISNNIKFKKSSILTRAGEQRKRSQSMKSYPSSELRNMCDEHIASEEPAEKEDLLQQMLERRYTPYPNLYPDQSPSEDWTMEERFRPLTFHGLILRSQLVTLLVRGVCYSESQSSASQPRLSYAEMAEDYPRYPDIHDLDLTLLNPRMIVDVTPYMNPSPFTVSPNTHVSQVFNLFRTMGLRHLPVVNAVGEVSEAPALPPPLREDPLARCCLCTQASHQKRRHPTRRGECGPTLALNPARLPCTRDPFPCLPADGTSVPLAVLSSQSRASTRLCLPPEMLLFTPYHWCSLVLHLRRDLRIR

SEQ ID NO: 10039 - protein, 770 aa, Homo sapiens
MFPQSRHPTPHQAAGQPFKFTIPESLDRIKEEFQFLQAQYHSLKLECEKLASEKTEMQRHYVMYYEMSYGLNIEMHKQTEIAKRLNTICAQVIPFLSQEHQQQVAQAVERAKQVTMAELNAIIGQQQLQAQHLSHGHGPPVPLTPHPSGLQPPGIPPLGGSAGLLALSSALSGQSHLAIKDDKKHHDAEHHRDREPGTSNSLLVPDSLRGTDKRRNGPEFSNDIKKRKVDDKDSSHYDSDGDKSDDNLVVDVSNEDPSSPRASPAHSPRENGIDKNRLLKKDASSSPASTASSASSTSLKSKEMSLHEKASTPVLKSSTPTPRSDMPTPGTSATPGLRPGLGKPPAIDPLVNQAAAGLRTPLAVPGPYPAPFGMVPHAGMNGELTSPGAAYASLHNMSPQMSAAAAAAAVVAYGRSPMVGFDPPPHMRVPTIPPNLAGIPGGKPAYSFHVTADGQMQPVPFPPDALIGPGIPRHARQINTLNHGEVVCAVTISNPTRHVYTGGKGCVKVWDISHPGNKSPVSQLDCLNRDNYIRSCKLLPDGCTLIVGGEASTLSIWDLAAPTPRIKAELTSSAPACYALAISPDSKVCFSCCSDGNIAVWDLHNQTLVRQFQGHTDGASCIDISNDGTKLWTGGLDNTVRSWDLREGRQLQQHDFTSQIFSLGYCPTGEWLAVGMESSNVEVLHVNKPDKYQLHLHESCVLSLKFAYCGKWFVSTGKDNLLNAWRTPYGASIFQSKESSSVLSCDISVDDKYIVTGSGDKKATVYEVIY

SEQ ID NO: 10040 - protein, 708 aa, Homo sapiens
MGMSKSHSFFGYPLSIFFIVVNEFCERFSYYGMRAILILYFTNFISWDDNLSTAIYHTFVALCYLTPILGALIADSWLGKFKTIVSLSIVYTIGQAVTSVSSINDLTDHNHDGTPDSLPVHVVLSLIGLALIALGTGGIKPCVSAFGGDQFEEGQEKQRNRFFSIFYLAINAGSLLSTIITPMLRVQQCGIHSKQACYPLAFGVPAALMAVALIVFVLGSGMYKKFKPQGNIMGKVAKCIGFAIKNRFRHRSKAFPKREHWLDWAKEKYDERLISQIKMVTRVMFLYIPLPMFWALFDQQGSRWTLQATTMSGKIGALEIQPDQMQTVNAILIVIMVPIFDAVLYPLIAKCGFNFTSLKKMAVGMVLASMAFVVAAIVQVEIDKTLPVFPKGNEVQIKVLNIGNNTMNISLPGEMVTLGPMSQTNAFMTFDVNKLTRINISSPGSPVTAVTDDFKQGQRHTLLVWAPNHYQVVKDGLNQKPEKGENGIRFVNTFNELITITMSGKVYANISSYNASTYQFFPSGIKGFTISSTEIPPQCQPNFNTFYLEFGSAYTYIVQRKNDSCPEVKVFEDISANTVNMALQIPQYFLLTCGEVVFSVTGLEFSYSQAPSNMKSVLQAGWLLTVAVGNIIVLIVAGAGQFSKQWAEYILFAALLLVVCVIFAIMARFYTYINPAEIEAQFDEDEKKNRLEKSNPYFMSGANSQKQM

SEQ ID NO: 10041 - protein, 940 aa, Homo sapiens
MGSGPIDPKELLKGLDSFLNRDGEVKSVDGISKIFSLMKEARKMVSRCTYLNILLQTRSPEILVKFIDVGGYKLLNNWLTYSKTTNNIPLLQQILLTLQHLPLTVDHLKQNNTAKLVKQLSKSSEDEELRKLASVLVSDWMAVIRSQSSTQPAEKDKKKRKDEGKSRTTLPERPLTEVKAETRAEEAPEKKREKPKSLRTTAPSHAKFRSTGLELETPSLVPVKKNASTVVVSDKYNLKPIPLKRQSNVAAPGDATPPAEKKYKPLNTTPNATKEIKVKIIPPQPMEGLGFLDALNSAPVPGIKIKKKKKVLSPTAAKPSPFEGKTSTEPSTAKPSSPEPAPPSEAMDADRPGTPVPPVEVPELMDTASLEPGALDAKPVESPGDPNQLTRKGRKRKSVTWPEEGKLREYFYFELDETERVNVNKIKDFGEAAKREILSDRHAFETARRLSHDNMEEKVPWVCPRPLVLPSPLVTPGSNSQERYIQAEREKGILQELFLNKESPHEPDPEPYEPIPPKLIPLDEECSMDETPYVETLEPGGSGGSPDGAGGSKLPPVLANLMGSMGAGKGPQGPGGGGINVQEILTSIMGSPNSHPSEELLKQPDYSDKIKQMLVPHGLLGPGPIANGFPPGGPGGPKGMQHFPPGPGGPMPGPHGGPGGPVGPRLLGPPPPPRGGDPFWDGPGDPMRGGPMRGGPGPGPGPYHRGRGGRGGNEPPPPPPPFRGARGGRSGGGPPNGRGGPGGGMVGGGGHRPHEGPGGGMGNSSGHRPHEGPGGGMGSGHRPHEGPGGSMGGGGGHRPHEGPGGGISGGSGHRPHEGPGGGMGAGGGHRPHEGPGGSMGGSGGHRPHEGPGHGGPHGHRPHDVPGHRGHDHRGPPPHEHRGHDGPGHGGGGHRGHDGGHSHGGDMSNRPVCRHFMMKGNCRYENNCAFYHPGVNGPPLP

SEQ ID NO: 10042 - protein, 837 aa, Homo sapiens
MAANVGDQRSTDWSSQYSMVAGAGRENGMETPMHENPEWEKARQALASISKSGAAGGSAKSSSNGPVASAQYVSQAEASALQQQQYYQWYQQYNYAYPYSYYYPMPPVPGMDESMSYQAPPQQLPSAQPPQPSNPPHGAHTLNSGPQPGTAPATQHSQAGPATGQAYGPHTYTEPAKPKKGQQLWNRMKPAPGTGGLKFNIQKRPFAVTTQSFGSNAEGQHSGFGPQPNPEKVQNHSGSSARGNLSGKPDDWPQDMKEYVERCFTACESEEDKDRTEKLLKEVLQARLQDGSAYTIDWSREPLPGLTREPVAESPKKKRWEAASSLHPPRGAGSATRGGGAPSQRGTPGAGGAGRARGNSFTKFGNRNVFMKDNSSSSSTDSRSRSSSRSPTRHFRRSDSHSDSDSSYSGNECHPVGRRNPPPKGRGGRGAHMDRGRGRAQRGKRHDLAPTKRSRKKMAALECEDPERELKKQKRAARFQHGHSRRLRLEPLVLQMSSLESSGADPDWQELQIVGTCPDITKHYLRLTCAPDPSTVRPVAVLKKSLCMVKCHWKEKQDYAFACEQMKSIRQDLTVQGIRTEFTVEVYETHARIALEKGDHEEFNQCQTQLKSLYAENLPGNVGEFTAYRILYYIFTKNSGDITTELAYLTRELKADPCVAHALALRTAWALGNYHRFFRLYCHAPCMSGYLVDKFADRERKVALKAMIKTYVVPSSLLPLLFPSFRLAPPLRPAPGRRPPPAPNPCPGPCFPIIFLHSALPSPVPLALLVGHLCVPGHSSPSPHCSQLTASGASSPPHLCVSSSCSLLPGPPSSLLALGFLRTLRSLLSQLVAVLPP

SEQ ID NO: 10043 - protein, 393 aa, Homo sapiens
MAAVGAGGSTAAPGPGAVSAGALEPGTASAAHRRLKYISLAVLVVQNASLILSIRYARTLPGDRFFATTAVVMAEVLKGLTCLLLLFAQKRGNVKHLVLFLHEAVLVQYVDTLKLAVPSLIYTLQNNLQYVAISNLPAATFQVTYQLKILTTALFSVLMLNRSLSRLQWASLLLLFTGVAIVQAQQAGGGGPRPLDQNPGAGLAAVVASCLSSGFAGVYFEKILKGSSGSVWLRNLQLGLFGTALGLVGLWWAEGTAVATRGFFFGYTPAVWGVVLNQAFGGLLVAVVVKYADNILKGFATSLSIVLSTVASIRLFGFHVDPLFALGAGLVIGAVYLYSLPRGAAKAIASASASASGPCVHQQPPGQPPPPQLSSHRGDLITEPFLPKSVLVK

SEQ ID NO: 10044 - protein, 609 aa, Homo sapiens
MDTMVQIQQTGGLKKLLSFAENSTIPDIQKNAAKAITKAAYDPENRKLFHEQEVEKCLVALLGSENDGTKIAASQAISAMCENSGSKDFFNNQGIPQLIQLLKSDNEEVREAAALALANLTTCNPANANAAAEADGIDPLINLLSSKRDGAIANAATVLTNMAMQEPLRLNIQNHDIMHAIISPLRSANTVVQSKAALAVTATACDVEARTELRNSGGLEPLVELLRSKNDEVRKHASWAVMVCAGDELTANELCRLGALDILEEVNVSGTRKNKFSEAAYNKLLNNNLSLKYSQTGYLSSSNIINDGFYDYGRINPGTKLLPLKELCLQEPSDLRAVLLINSKSYVSPPSSMEDKSDVGYGRSISSSSSLRRSSKEKNKKNSYHFSAGFGSPIEDKSEPASGRNTVLSKSATKEKGWRKSKGKKEEEKVKEEEEVMVVPKFVGEGSSDKEWCPPSDPDFSMYVYEVTKSILPITNIKEQIEDLAKYVAEKMGGKIPKEKLPDFSWELHISELKFQLKSNVIPIGHVKKGIFYHRALLFKALADRIGIGCSLVRGEYGRAWNEVMLQNDSRKGVIGGLPAPEMYVIDLMFHPGGLMKLRSREADLYRFI

SEQ ID NO: 10045 - protein, 450 aa, Homo sapiens
MGAPPGYRPSAWVHLLHQLPRADFQLRPVPSVFAPQEQEYQQALLLVAALAGLGLGLSLIFIAVYLIRFCCCRPPEPPGSKIPSPGGGCVTWSCIVALLAGCTGIGIGFYGNSETSDGVSQLSSALLHANHTLSTIDHLVLETVERLGEAVRTELTTLEEVLEPRTELVAAARGARRQAEAAAQQLQGLAFWQGVPLSPLQVAENVSFVEEYRWLAYVLLLLLELLVCLFTLLGLAKQSKWLVIVMTVMSLLVLVLSWGSMGLEAATAVGLSDFCSNPDPYVLNLTQEETGLSSDILSYYLLCNRAVSNPFQQRLTLSQRALANIHSQLLGLEREAVPQFPSAQKPLLSLEETLNVTEGNFHQLVALLHCRSLHKDYGAALRGLCEDALEGLLFLLLFSLLSAGALATALCSLPRAWALFPPSDDYDDTDDDDPFNPQESKRFVQWQSSI

SEQ ID NO: 10046 - protein, 460 aa, Homo sapiens
MGAPPGYRPSAWVHLLHQLPRADFQLRPVPSVFAPQEQEYQQALLLVAALAGLGLGLSLIFIAVYLIRFCCCRPPEPPGSKIPSPGGGCVTWSCIVALLAGCTGIGIGFYGNSETSDGVSQLSSALLHANHTLSTIDHLVLETVERLGEAVRTELTTLEEVLEPRTELVAAARGARRQAEAAAQQLQGLAFWQGVPLSPLQVAENVSFVEEYRWLAYVLLLLLELLVCLFTLLGLAKQSKWLVIVMTVMSLLVLVLSWGSMGLEAATAVGLSDFCSNPDPYVLNLTQEETGLSSDILSYYLLCNRAVSNPFQQRLTLSQRALANIHSQLLGLEREAVPQFPSAQKPLLSLEETLNVTEGNFHQLVALLHCRSLHKDYGAALRGLCEDALEGLLFLLLFSLLSAGALATALCSLPRAWALFPPRNPSALCSGSRLSEPLLPAGLEPGSPLRSFPGCRRRPH

SEQ ID NO: 10047 - protein, 805 aa, Homo sapiens
MIRDLSKMYPQTRHPAPHQPAQPFKFTISESCDRIKEEFQFLQAQYHSLKLECEKLASEKTEMQRHYVMYYEMSYGLNIEMHKQAEIVKRLNAICAQVIPFLSQEHQQQVVQAVERAKQVTMAELNAIIGQQLQAQHLSHGHGLPVPLTPHPSGLQPPAIPPIGSSAGLLALSSALGGQSHLPIKDEKKHHDNDHQRDRDSIKSSSVSPSASFRGAEKHRNSADYSSESKKQKTEEKEIAARYDSDGEKSDDNLVVDVSNEDPSSPRGSPAHSPRENGLDKTRLLKKDAPISPASIASSSSTPSSKSKELSLKRDMGKLSETRLSEDEQCTLGLQRWFCRLWFMNEKSTTPVSKSNTPTPRTDAPTPGSNSTPGLRPVPGKPPGVDPLASSLRTPMAVPCPYPTPFGIVPHAGMNGELTSPGAAYAGLHNISPQMSAAAAAAAAAAAYGRSPVVGFDPHHHMRVPAIPPNLTGIPGGKPAYSFHVSADGQMQPVPFPPDALIGPGIPRHARQINTLNHGEVVCAVTISNPTRHVYTGGKGCVKVWDISHPGNKSPVSQLDCLNRDNYIRSCRLLPDGRTLIVGGEASTLSIWDLAAPTPRIKAELTSSAPACYALAISPDSKVCFSCCSDGNIAVWDLHNQTLVRQFQGHTDGASCIDISNDGTKLWTGGLDNTVRSWDLREGRQLQQHDFTSQIFSLGYCPTGEWLAVGMENSNVEVLHVTKPDKYQLHLHESCVLSLKFAHCGKWFVSTGKDNLLNAWRTPYGASIFQSKESSSVLSCDISVDDKYIVTGSGDKKATVYEVIY

SEQ ID NO: 10048 - protein, 704 aa, Homo sapiens
MIRDLSKMYPQTRHPAPHQPAQPFKFTISESCDRIKEEFQFLQAQYHSLKLECEKLASEKTEMQRHYVMYYEMSYGLNIEMHKQAEIVKRLNAICAQVIPFLSQEHQQQVVQAVERAKQVTMAELNAIIGQQLQAQHLSHGHGLPVPLTPHPSGLQPPAIPPIGSSAGLLALSSALGGQSHLPIKDEKKHHDNDHQRDRDSIKSSSVSPSASFRGAEKHRNSADYSSESKKQKTEEKEIAARYNEKSTTPVSKSNTPTPRTDAPTPGSNSTPGLRPVPGKPPGVDPLASSLRTPMAVPCPYPTPFGIVPHAGMNGELTSPGAAYAGLHNISPQMSAAAAAAAAAAAYGRSPVVGFDPHHHMRVPAIPPNLTGIPGGKPAYSFHVSADGQMQPVPFPPDALIGPGIPRHARQINTLNHGEVVCAVTISNPTRHVYTGGKGCVKVWDISHPGNKSPVSQLDCLNRDNYIRSCRLLPDGRTLIVGGEASTLSIWDLAAPTPRIKAELTSSAPACYALAISPDSKVCFSCCSDGNIAVWDLHNQTLVRQFQGHTDGASCIDISNDGTKLWTGGLDNTVRSWDLREGRQLQQHDFTSQIFSLGYCPTGEWLAVGMENSNVEVLHVTKPDKYQLHLHESCVLSLKFAHCGKWFVSTGKDNLLNAWRTPYGASIFQSKESSSVLSCDISVDDKYIVTGSGDKKATVYEVIY

SEQ ID NO: 10049 - protein, 443 aa, Homo sapiens
MDSRAQLWGLALNKRRATLPHPGGSTNLKADPEELFTKLEKIGKGSFGEVFKGIDNRTQKVVAIKIIDLEEAEDEIEDIQQEITVLSQCDSPYVTKYYGSYLKDTKLWIIMEYLGGGSALDLLEPGPLDETQIATILREILKGLDYLHSEKKIHRDIKAANVLLSEHGEVKLADFGVAGQLTDTQIKRNTFVGTPFWMAPEVIKQSAYDSKADIWSLGITAIELARGEPPHSELHPMKVLFLIPKNNPPTLEGNYSKPLKEFVEACLNKEPSFRPTAKELLKHKFILRNAKKTSYLTELIDRYKRWKAEQSHDDSSSEDSDAETDGQASGGSDSGDWIFTIREKDPKNLENGALQPSDLDRNKMKDIPKRPFSQCLSTIISPLFAELKEKSQACGGNLGSIEELRGAIYLAEEACPGISDTMVAQLVQRLQRYSLSGGGTSSH

SEQ ID NO: 10050 - protein, 639 aa, Homo sapiens
MVASARVQKLVRRYKLAIATALAILLLQGLVVWSFSGLEEDEAGEKGRQRKPRPLDPGEGSKDTDSSAGRRGSTGRRHGRWRGRAESPGVPVAKVVRAVTSRQRASRRVPPAPPPEAPGRQNLSGAAAGEALVGAAGFPPHGDTGSVEGAPQPTDNGFTPKCEIVGKDALSALARASTKQCQQEIANVVCLHQAGSLMPKAVPRHCQLTGKMSPGIQWDESQAQQPMDGPPVRIAYMLVVHGRAIRQLKRLLKAVYHEQHFFYIHVDKRSDYLHREVVELAQGYDNVRVTPWRMVTIWGGASLLRMYLRSMRDLLEVPGWAWDFFINLSATDYPTRTNEELVAFLSKNRDKNFLKSHGRDNSRFIKKQGLDRLFHECDSHMWRLGERQIPAGIVVDGGSDWFVLTRSFVEYVVYTDDPLVAQLRQFYTYTLLPAESFFHTVLENSLACETLVDNNLRVTNWNRKLGCKCQYKHIVDWCGCSPNDFKPQDFLRLQQVSRPTFFARKFESTVNQEVLEILDFHLYGSYPPGTPALKAYWENTYDAADGPSGLSDVMLTAYTAFARLSLHHAATAAPPMGTPLCRLALIGTPKSVFSGTLGGYWGRWTSLWPCSAGPGAPTSQPQWSGSTQPMWWPHLMTSQ

SEQ ID NO: 10051 - protein, 773 aa, Homo sapiens
MIRDLSKMYPQTRHPAPHQPAQPFKFTISESCDRIKEEFQFLQAQYHSLKLECEKLASEKTEMQRHYVMYYEMSYGLNIEMHKQAEIVKRLNAICAQVIPFLSQEHQQQVVQAVERAKQVTMAELNAIIGQQLQAQHLSHGHGLPVPLTPHPSGLQPPAIPPIGSSAGLLALSSALGGQSHLPIKDEKKHHDNDHQRDRDSIKSSSVSPSASFRGAEKHRNSADYSSESKKQKTEEKEIAARYDSDGEKSDDNLVVDVSNEDPSSPRGSPAHSPRENGLDKTRLLKKDAPISPASIASSSSTPSSKSKELSLNEKSTTPVSKSNTPTPRTDAPTPGSNSTPGLRPVPGKPPGVDPLASSLRTPMAVPCPYPTPFGIVPHAGMNGELTSPGAAYAGLHNISPQMSAAAAAAAAAAAYGRSPVVGFDPHHHMRVPAIPPNLTGIPGGKPAYSFHVSADGQMQPVPFPPDALIGPGIPRHARQINTLNHGEVVCAVTISNPTRHVYTGGKGCVKVWDISHPGNKSPVSQLDCLNRDNYIRSCRLLPDGRTLIVGGEASTLSIWDLAAPTPRIKAELTSSAPACYALAISPDSKVCFSCCSDGNIAVWDLHNQTLVRQFQGHTDGASCIDISNDGTKLWTGGLDNTVRSWDLREGRQLQQHDFTSQIFSLGYCPTGEWLAVGMENSNVEVLHVTKPDKYQLHLHESCVLSLKFAHCGKWFVSTGKDNLLNAWRTPYGASIFQSKESSSVLSCDISVDDKYIVTGSGDKKATVYEVIY

SEQ ID NO: 10052 - protein, 634 aa, Homo sapiens
MWKASAGHAVSIAQDDAGADDWETDPDFVNDVSEKEQRWGAKTVQGSGHQEHINIHKLRENVFQEHQTLKEKELETGPKASHGYGGKFGVEQDRMDKSAVGHEYQSKLSKHCSQVDSVRGFGGKFGVQMDRVDQSAVGFEYQGKTEKHASQKDYSSGFGGKYGVQADRVDKSAVGFDYQGKTEKHESQRDYSKGFGGKYGIDKDKVDKSAVGFEYQGKTEKHESQKDYVKGFGGKFGVQTDRQDKCALGWDHQEKLQLHESQKDYSKGFGGKYGVQKDRMDKNASTFEDVTQVSSAYQKTVPVEAVTSKTSNIRANFENLAKEKEQEDRRKAEAERAQRMAKERQEQEEARRKLEEQARAKTQTPPVSPAPQPTEERLPSSPVYEDAASFKAELSYRGPVSGTEPEPVYSMEAADYREASSQQGLAYATEAVYESAEAPGHYPAEDSTYDEYENDLGITAVALYDYQAAGDDEISFDPDDIITNIEMIDDGWWRGVCKGRFRELAFSCVRVALVPIKCSRDLPGQARGLRSALWRVGRKDCPRRGASSRVSLLGRRGLGLMEVNPELSHPEHRSCHVRWEICLCHTVTARRIRKLISFLRSREAGPVPSCSQVGGVSFQKVTWKCLGTWVPECP

SEQ ID NO: 10053 - protein, 876 aa, Homo sapiens
MGPEALSSLLLLLLVASGDADMKGHFDPAKCRYALGMQDRTIPDSDISASSSWSDSTAARHSRLESSDGDGAWCPAGSVFPKEEEYLQVDLQRLHLVALVGTQGRHAGGLGKEFSRSYRLRYSRDGRRWMGWKDRWGQEVISGNEDPEGVVLKDLGPPMVARLVRFYPRADRVMSVCLRVELYGCLWRDGLLSYTAPVGQTMYLSEAVYLNDSTYDGHTVGGLQYGGLGQLADGVVGLDDFRKSQELRVWPGYDYVGWSNHSFSSGYVEMEFEFDRLRAFQAMQVHCNNMHTLGARLPGGVECRFRRGPAMAWEGEPMRHNLGGNLGDPRARAVSVPLGGRVARFLQCRFLFAGPWLLFSEISFISDVVNNSSPALGGTFPPAPWWPPGPPPTNFSSLELEPRGQQPVAKAEGSPTAILIGCLVAIILLLLLIIALMLWRLHWRRLLSKAERRVLEEELTVHLSVPGDTILINNRPGPREPPPYQEPRPRGNPPHSAPCVPNGSAYSGDYMEPEKPGAPLLPPPPQNSVPHYAEADIVTLQGVTGGNTYAVPALPPGAVGDGPPRVDFPRSRLRFKEKLGEGQFGEVHLCEVDSPQDLVSLDFPLNVRKGHPLLVAVKILRPDATKNARNDFLKEVKIMSRLKDPNIIRLLGVCVQDDPLCMITDYMENGDLNQFLSAHQLEDKAAEGAPGDGQAAQGPTISYPMLLHVAAQIASGMRYLATLNFVHRDLATRNCLVGENFTIKIADFGMSRNLYAGDYYRVQGRAVLPIRWMAWECILMGKFTTASDVWAFGVTLWEVLMLCRAQPFGQLTDEQVIENAGEFFRDQGRQVYLSRPPACPQGLYELMLRCWSRESEQRPPFSQLHRFLAEDALNTV

SEQ ID NO: 10054 - protein, 406 aa, Homo sapiens
MATPGNLGSSVLASKTKTKKKHFVAQKVKLFRASDPLLSVLMWGVNHSINELSHVQIPVMLMPDDFKAYSKIKVDNHLFNKENMPSHFKFKEYCPMVFRNLRERFGIDDQDFQNSLTRSAPLPNDSQARSGARFHTSYDKRYIIKTITSEDVAEMHNILKKYHQYIVECHGITLLPQFLGMYRLNVDGVEIYVIVTRNVFSHRLSVYRKYDLKGSTVAREASDKEKAKELPTLKDNDFINEGQKIYIDDNNKKVFLEKLKKDVEFLAQLKLMDYSLLVGIHDVERAEQEEVECEENDGEEEGESDGTHPVGTPPDSPGNTLNSSPPLAPGEFDPNIDVYGIKCHENSPRKEVYFMAIIDILTHYDAKKKAAHAAKTVKHGAGAEISTVNPEQYSKRFLDFIGHILT

SEQ ID NO: 10055 - protein, 667 aa, Homo sapiens
MWLQQRLKGLPGLLSSSWARRLLCLLGLLLLLLWFGGSGARRAAGGLHLLPWSRGEPGAAEPSACLEAATRAWRGLRERGEVVPLGPGVPALVANGFLALDVAANRLWVTPGEREPAVAPDFVPFVQLRPLSALAEAGEAVLLLREGLLRRVRCLQLGSPGPGPVAAGPGPASVSGLAAGSGRDCVLLQEDFLAHRGRPHVYLQRIQLNNPTERVAALQTVGPTAGPAPKAFTSTLEKVGDHQFLLYSGRSPPTPTGLVHLVVVAAKKLVNRLQVAPKTQLDETVLWVVHVSGPINPQVLKSKAAKELKALQDLARKEMLELLDMPAAELLQDHQLLWAQLFSPGVEMKKITDTHTPSGLTVNLTLYYMLSCSPAPLLSPSLSHRERDQMESTLNYEDHCFSGHATMHAENLWPGRLSSVQQILQLSDLWRLTLQKRGCKGLVKVGAPGILQGMVLSFGGLQFTENHLQFQADPDVLHNSYALHGIRYKNDHINLAVLADAEGKPYLHVSVESRGQPVKIYACKAGCLDEPVELTSAPTGHTFSVMVTQPITPLLYISTDLTHLQDLRHTLHLKAILAHDEHMAQQDPGLPFLFWFSVASLITLFHLFLFKLIYNEYCGPGAKPLFRSKVGSRHLVETRGLGLALSPVSRKGLAWRGGVRPGQEWVS

SEQ ID NO: 10056 - protein, 697 aa, Homo sapiens
MDHRKARVLPAGHYCPSLGIWASQVGSVRSSVPPSISRNPAMVNEARGNSSLNPCLEGSASSGSESSKDSSRCSTPGLDPERHERLREKMRRRLESGDKWFSLEFFPPRTAEGAVNLISRFDRMAAGGPLYIDVTWHPAGDPGSDKETSSMMIASTAVNYCGLETILHMTCCRQRLEEITGHLHKAKQLGLKNIMALRGDPIGDQWEEEEGGFNYAVDLVKHIRSEFGDYFDICVAGYPKGHPEAGSFEADLKHLKEKVSAGADFIITQLFFEADTFFRFVKACTDMGITCPIVPGIFPIQGYHSLRQLVKLSKLEVPQEIKDVIEPIKDNDAAIRNYGIELAVSLCQELLASGLVPGLHFYTLNREMATTEVLKRLGMWTEDPRRPLPWALSAHPKRREEDVRPIFWASRPKSYIYRTQEWDEFPNGRWGNSSSPAFGELKDYYLFYLKSKSPKEELLKMWGEELTSEESVFEVFVLYLSGEPNRNGHKVTCLPWNDEPLAAETSLLKEELLRVNRQGILTINSQPNINGKPSSDPIVGWGPSGGYVFQKAYLEFFTSRETAEALLQVLKKYELRVNYHLVNVKGENITNAPELQPNAVTWGIFPGREIIQPTVVDPVSFMFWKDEAFALWIERWGKLYEEESPSRTIIQYIHDNYFLVNLVDNDFPLDNCLWQVVEDTLELLNRPTQNARETEAP

SEQ ID NO: 10057 - protein, 656 aa, Homo sapiens [sequence omitted]

SEQ ID NO: 10058 - protein, 722 aa, Homo sapiens
MIDSVKLRRDSAADFFSHYEYLCALQNSVPLPAVRACLREGVLDFNADRLRGVDWAPLLSTLKINKDLPLVSIKSFFQPWLGDTGSDMNKFCRSRVPAIRYKDVTFQLCKALKGCLSISSVLKNLELNGLILRERDLTILAKGLNKSASLVHLSLANCPIGDGGLEIICQGIKSSITLKTVNFTGCNLTWQGADHMAKILKYQTMRRHEETWAESLRYRRPDLDCMAGLRRITLNCNTLIGDLGACAFADSLSEDLWLRALDLQQCGLTNEGAKALLEALETNTTLVVLDIRKNPLIDHSMMKAVIKKVLQNGRSAKSEYQWITSPSVKEPSKTAKQKRRTIILGSGHKGKATIRIVGLATKKPVSSGRKHSLGKEYYAPAPLPPGVSGFLPWRTAERAKRHRGFPLIKTRDICNQLQQPGFPVTVTVESPSSSEVEEVDDSSESVHEVPEKTSIEQEALQEKLEECLKQLKEERVIRLKVDKRVSELEHENAQLRNINFSLSEALHAQSLTNMILDDEGVLGSIENSFQKFHAFLDLLKDAGLGQLATMAGIDQSDFQLLGHPQMTSTVSNPPKEEKKALEDEKPEPKQNALGQMQNIQVSICMQSAYNEGTLMKFQKITGDARIPLPLDSFPVPVSTPEGLGTSSNNLGVPATEQRQESFEGFIARMCSPSPDATSGTGSQRKEEELSRNSRSSSEKKTKTGEYTKKHSDKQHPGKDLHS

SEQ ID NO: 10059 - protein, 711 aa, Homo sapiens
MIDSVKLRRDSAADFFSHYEYLCALQNSVPLPAVRACLREGVLDFNADRLRGVDWAPLLSTLKINKDLPLVSIKSFFQPWLGDTGSDMNKFCRSRVPAIRYKDVTFQLCKALKGCLSISSVLKNLELNGLILRERDLTILAKGLNKSASLVHLSLANCPIGDGGLEIICQGIKSSITLKTVNFTGCNLTWQGADHMAKILKYQTMRRHEETWAESLRYRRPDLDCMAGLRRITLNCNTLIGDLGACAFADSLSEDLWLRALDLQQCGLTNEGAKALLEALETNTTLVVLDIRKNPLIDHSMMKAVIKKVLQNGRSAKSEYQWITSPSVKEPSKTAKQKRRTIILGSGHKGKATIRIVIWRHRGLATKKPVSSGRKHSLGKEYYAPAPLPPGVSGFLPWRTAERAKRHRGFPLIKTRDICNQLQQPGFPVTVTVESPSSSEVEEVDDSSESVHEVPEKTSIEQEALQEKLEECLKQLKEERVIRLKVDKRVSELEHENAQLRNINFSLSEALHAQSLTNMILDDEGVLGSIENSFQKFHAFLDLLKDAGLGQLATMAGIDQSDFQLLGHPQMTSTVSNPPKEEKKALEDEKPEPKQNALGQMQNIQVSICMQSAYNEGTLMKFQKITGDARIPLPLDSFPVPVSTPEGLGTSSNNLGVPATEQRQESFEGFIARMCSPSPDATSGTGSQRKEEELSRNSRSSSEKKTKTESH

SEQ ID NO: 10060 - protein, 484 aa, Homo sapiens
MVAELATRPQNIETLQNAGVMSLLRTLLLDVVPTIQQTAALALGRLANYNDDLAEAVVKCDILPQLVYSLAEQNRFYKKAAAFVLRAVGKHSPQLAQAIVDCGALDTLVICLEDFDPGVKEAAAWALRYIARHNAELSQAVVDAGAVPLLVLCIQEPEIALKRIAASALSDIAKHSPELAQTVVDAGAVAHLAQMILNPDAKLKHQILSALSQVSKHSVDLAEMVVEAEIFPVVLTCLKDKDEYVKKNASTLIREIAKHTPELSQLVVNAGGVAAVIDCIGSCKGNTRLPGIMMLGYVAAHSENLAMAVIISKGVPQLSVCLSEEPEDHIKAAAAWALGQIGRHTPEHARAVAVTNTLPVLLSLYMSTESSEDLQVKSKKAIKNILQKCTYLPALEPFLYDAPPNILKHVVGQFSKVLPHDSKARRLFVTSGGLKKVQEIKAEPGSLLQEYINSINSCYPEEIVSKFFPELQVCALFRKFMRTP

SEQ ID NO: 10061 - protein, 756 aa, Homo sapiens
MAEAHQAVAFQFTVTPDGIDLRLSHEALRQIYLSGLHSWKKKFIRFKNGIITGVYPASPSSWLIVVVGVMTTMYAKIDPSLGIIAKINRTLETANCMSSQTKNVVSGVLFGTGLWVALIVTMRYSLKVLLSYHGWMFTEHGKMSRATKIWMGMVKIFSGRKPMLYSFQTSLPRLPVPAVKDTVNRYLQSVRPLMKEEDFKRMTALAQDFAVGLGPRLQWYLKLKSWWATNYVSDWWEEYIYLRGRGPLMVNSNYYAMDLLYILPTHIQAARAGNAIHAILLYRRKLDREEIKPIRLLGSTIPLCSAQWERMFNTSRIPGEETDTIQHMRDSKHIVVYHRGRYFKVWLYHDGRLLKPREMEQQMQRILDNTSEPQPGEARLAALTAGDRVPWARCRQAYFGRGKNKQSLDAVEKAAFFVTLDETEEGYRSEDPDTSMDSYAKSLLHGRCYDRWFDKSFTFVVFKNGKMGLNAEHSWADAPIVAHLWEYVMSIDSLQLGYAEDGHCKGDINPNIPYPTRLQWDIPGECQEVIETSLNTANLLANDVDFHSFPFVAFGKGIIKKCRTSPDAFVQLALQLAHYKDMGKFCLTYEASMTRLFREGRTETVRSCTTESCDFVRAMVDPAQTVEQRLKLFKLASEKHQHMYRLAMTGSGIDRHLFCLYVVSKYLAVESPFLKEVLSEPWRLSTSQTPQQQVELFDLENNPEYVSSGGGFGPVADDGYGVSYILVGENLINFHISSKFSCPETGIISQGPSSDT

SEQ ID NO: 10062 - protein, 607 aa, Homo sapiens
MPRKKPFSVKQKKKQLQDKRERKRGLQDGLRSSSNSRSGSRERREEQTDTSDGESVTHHIRRLNQQPSQGLGPRGYDPNRYRLHFERDSREEVERRKRAAREQVLQPVSAELLELDIREVYQPGSVLDFPRRPPWSYEMSKEQLMSQEERSFQDYLGKIHGAYSSEKLSYFEHNLETWRQLWRVLEMSDIVLLITDIRHPVVNFPPALYEYVTGELGLALVLVLNKVDLAPPALVVAWKHYFHQHYPQLHVVLFTSFPRDPRTPQDPSSVLKKSRRRGRGWTRALGPEQLLRACEAITVGKVDLSSWREKIARDVAGATWGNGSGEEEEEEDGPAVLVEQQTDSAMEPTGPTQERYKDGVVTIGCVGFPNVGKSSLINGLVGRKVVSVSRTPGHTRYFQTYFLTPSVKLCDCPGLIFPSLLPRQLQVLAGIYPIAQIQEPYTAVGYLASRIPVQALLHLRHPEAEDPSAEHPWCAWDICEAWAEKRGYKTAKAARNDVYRAANSLLRLAVDGRLSLCFHPPGYSEQKGTWESHPETTELVVLQGRVGPAGDEEEEEEEELSSSCEEEGEEDRDADEEGEGDEETPTSAPGSSLAGRNPYALLGEDEC

SEQ ID NO: 10063 - protein, 509 aa, Homo sapiens
MSQRQVLQVFEQYQKARTQFVQMVAELATRPQNIETLQNAGVMSLLRTLLLDVVPTIQQTAALALGRLANYNDDLAEAVVKCDILPQLVYSLAEQNRFYKKAAAFVLRAVGKHSPQLAQAIVDCGALDTLVICLEDFDPGVKEAAAWALRYIARHNAELSQAVVDAGAVPLLVLCIQEPEIALKRIAASALSDIAKHSPELAQTVVDAGAVAHLAQMILNPDAKLKHQILSALSQVSKHSVDLAEMVVEAEIFPVVLTCLKDKDEYVKKNASTLIREIAKHTPELSQLVVNAGGVAAVIDCIGSCKGNTRLPGIMMLGYVAAHSENLAMAVIISKGVPQLSVCLSEEPEDHIKAAAAWALGQIGRHTPEHARAVAVTNTLPVLLSLYMSTESSEDLQVKSKKAIKNILQKCTYLPALEPFLYDAPPNILKHVVGQFSKVLPHDSKARRLFVTSGGLKKVQEIKAEPGSLLQEYINSINSCYPEEIVRYYSPGYSDTLLQRVDSYQPLNN

SEQ ID NO: 10064 - protein, 3135 aa, Homo sapiens
MVFESVVVDVLNRFLGDYVVDLDTSQLSLGIWKGAVALKNLQIKENALSQLDVPFKVKVGHIGNLKLIIPWKNLYTQPVEAVLEEIYLLIVPSSRIKYDPLKEEKQLMEAKQQELKRIEEAKQKVVDQEQHLPEKQDTFAEKLVTQIIKNLQVKISSIHIRYEDDITNRDKPLSFGISLQNLSMQTTDQYWVPCLHDETEKLVRKLIRLDNLFAYWNVKSQMFYLSDYDNSLDDLKNGIVNENIVPEGYDFVFRPISANAKLVMNRRSDFDFSAPKINLEIELHNIAIEFNKPQYFSIMELLESVDMMAQNLPYRKFKPDVPLHHHAREWWAYAIHGVLEVNVCPRLWMWSWKHIRKHRQKVKQYKELYKKKLTSKKPPGELLVSLEELEKTLDVFNITIARQTAEVEVKKAGYKIYKEGVKDPEDNKGWFSWLWSWSEQNTNEQQPDVQPETLEEMLTPEEKALLYEAIGYSETAVDPTLLKTFEALKFFVHLKSMSIVLRENHQKPELVDIVIEEFSTLIVQRPGAQAIKFETKIDSFHITGLPDNSEKPRLLSSLDDAMSLFQITFEINPLDETVSQRCIIEAEPLEIIYDARTVNSIVEFFRPPKEVHLAQLTAATLTKLEEFRSKTATGLLYIIETQKVLDLKINLKASYIIVPQDGIFSPTSNLLLLDLGHLKVTSKSRSELPDVKQGEANLKEIMDRAYDSFDIQLTSVQLLYSRVGDNWREARKLSVSTQHILVPMHFNLELSKAMVFMDVRMPKFKIYGKLPLISLRISDKKLQGIMELIESIPKPEPVTEVSAPVKSFQIQTSTSLGTSQISQKIIPLLELPSVSEDDSEEEFFDAPCSPLEEPLQFPTGVKSIRTRKLQKQDCSVNMTTFKIRFEVPKVLIEFYHLVGDCELSVVEILVLGLGAEIEIRTYDLKANAFLKEFCLKCPEYLDENKKPVYLVTTLDNTMEDLLTLEYVKAEKNVPDLKSTYNNVLQLIKVNFSSLDIHLHTEALLNTINYLHNILPQSEEKSAPVSTTETEDKGDVIKKLGLDSEMIMRPSETEINAKLRNIIVLDSDITAIYKKAVYITGKEVFSFKMVSYMDATAGSAYTDMNVVDIQVNLIVGCIEVVFVTKFLYSILAFIDNFQAAKQALAEATVQAAGMAATGVKELAQRSSRMALDINIKAPVVVIPQSPVSENVFVADFGLITMTNTFHMITESQSSPPPVIDLITIKLSEMRLYRSRFINDAYQEVLDLLLPLNLEVVVERNLCWEWYQEVPCFNVNAQLKPMEFILSQEDITTIFKTLHGNIWYEKDGSASPAVTKDQYSATSGVTTNASHHSGGATVVTAAVVEVHSRALLVKTTLNISFKTDDLTMVLYSPGPKQASFTDVRDPSLKLAEFKLENIISTLKMYTDGSTFSSFSLKNCILDDKRPHVKKATPRMIGLTVGFDKKDMMDIKYRKVRDGCVTDAVFQEMYICASVEFLQTVANVFLEAYTTGTAVETSVQTWTAKEEVPTQESVKWEINVIIKNPEIVFVADMTKNDAPALVITTQCEICYKGNLENSTMTAAIKDLQVRACPFLPVKRKGKITTVLQPCDLFYQTTQKGTDPQVIDMSVKSLTLKVSPVIINTMITITSALYTTKETIPEETASSTAHLWEKKDTKTLKMWFLEESNETEKIAPTTELVPKGEMIKMNIDSIFIVLEAGIGHRTVPMLLAKSRFSGEGKNWSSLINLHCQLELEVHYYNEMFGVWEPLLEPLEIDQTEDFRPWNLGIKMKKKAKMAIVESDPEEENYKVPEYKTVISFHSKDQLNITLSKCGLVMLNNLVKAFTEAATGSSADFVKDLAPFMILNSLGLTISVSPSDSFSVLNIPMAKSYVLKNGESLSMDYIRTKDNDHFNAMTSLSSKLFFILLTPVNHSTADKIPLTKVGRRLYTVRHRESGVERSIVCQIDTVEGSKKVTIRSPVQIRNHFSVPLSVYEGDTLLGTASPENEFNIPLGSYRSFIFLKPEDENYQMCEGIDFEEIIKNDGALLKKKCRSKNPSKESFLINIVPEKDNLTSLSVYSEDGWDLPYIMHLWPPILLRNLLPYKIAYYIEGIENSVFTLSEGHSAQICTAQLGKARLHLKLLDYLNHDWKSEYHIKPNQQDISFVSFTCVTEMEKTDLDIAVHMTYNTGQTVVAFHSPYWMVNKTGRMLQYKADGIHRKHPPNYKKPVLFSFQPNHFFNNNKVQLMVTDSELSNQFSIDTVGSHGAVKCKGLKMDYQVGVTIDLSSFNITRIVTFTPFYMIKNKSKYHISVAEEGNDKWLSLDLEQCIPFWPEYASSKLLIQVERSEDPPKRIYFNKQENCILLRLDNELGGIIAEVNLAEHSTVITFLDYHDGAATFLLINHTKNELVQYNQSSLSEIEDSLPPGKAVFYTWADPVGSRRLKWRCRKSHGEVTQKDDMMMPIDLGEKTIYLVSFFEGLQRIILFTEDPRVFKVTYESEKAELAEQEIAVALQDVGISLVNNYTKQEVAYIGITSSDVVWETKPKKKARWKPMSVKHTEKLEREFKEYTESSPSEDKVIQLDTNVPVRLTPTGHNMKILQPHVIALRRNYLPALKVEYNTSAHQSSFRIQIYRIQIQNQIHGAVFPFVFYPVKPPKSVTMDSAPKPFTDVSIVMRSAGHSQISRIKYFKVLIQEMDLRLDLGFIYALTDLMTEAEVTENTEVELFHKDIEAFKEEYKTASLVDQSQVSLYEYFHISPIKLHLSVSLSSGREEAKDSKQNGGLIPVHSLNLLLKSIGATLTDVQDVVFKLAFFELNYQFHTTSDLQSEVIRHYSKQAIKQMYVLILGLDVLGNPFGLIREFSEGVEAFFYEPYQGAIQGPEEFVEGMALGLKALVGGAVGGLAGAASKITGAMAKGVAAMTMDEDYQQKRREAMNKQPAGFREGITRGGKGLVSGFVSGITGIVTKPIKGAQKGGAAGFFKGVGKGLVGAVARPTGGIIDMASSTFQGIKRATETSEVESLRPPRFFNEDGVIRPYRLRDGTGNQMLQVMENGRFAKYKYFTHVMINKTDMLMITRRGVLFVTKGTFGQLTCEWQYSFDEFTKEPFIVHGRRLRIEAKERVKSVFHAREFGKIINFKTPEDARWILTKLQEAREPSPSL

SEQ ID NO: 10065 - protein, 480 aa, Homo sapiens
MAHVGDCTQTPWLPVLVVSLMCSARAEYSNCGENEYYNQTTGLCQECPPCGPGEEPYLSCGYGTKDEDYGCVPCPAEKFSKGGYQICRRHKDCEGFFRATVLTPGDMENDAECGPCLPGYYMLENRPRNIYGMVCYSCLLAPPNTKECVGATSGASANFPGTSGSSTLSPFQHAHKELSGQGHLATALIIAMSTIFIMAIAIVLIIMFYILKTKPSAPGDGPHAPVPCFLDSPSTPPVGEPGCSLPPLSPACCTSHPGKSVEAQVSKDEEKKEAPDNVVMFSEKDEFEKLTATPAKPTKSENDASSENEQLLSRSVDSDEEPAPDKQGSPELCLLSLVHLAREKSATSNKSAGIQSRRKKILDVYANVCGVVEGLSPTELPFDCLEKTSRMLSSTYNSEKAVVKTWRHLAESFGLKRDEIGGMTDGMQLFDRISTAGYSIPELLTKLVQIERLDAVESLCADILEWAGVVPPASQPHAAS

SEQ ID NO: 10066 - protein, 484 aa, Homo sapiens
MKKGIRYETSRKTSYIFQQPQHGPWQTRMRKISNHGSLRVAKVAYPLGLCVGVFIYVAYIKWHRATATQAFFSITRAAPGARWGQQAHSPLGTAADGHEVFYGIMFDAGSTGTRVHVFQFTRPPRETPTLTHETFKALKPGLSAYADDVEKSAQGIRELLDVAKQDIPFDFWKATPLVLKATAGLRLLPGEKAQKLLQKVKKVFKASPFLVGDDCVSIMNGTDEGVSAWITINFLTGSLKTPGGSSVGMLDLGGGSTQIAFLPRVEGTLQASPPGYLTALRMFNRTYKLYSYSYLGLGLMSARLAILGGVEGQPAKDGKELVSPCLSPSFKGEWEHAEVTYRVSGQKAAASLHELCAARVSEVLQNRVHRTEEVKHVDFYAFSYYYDLAAGVGLIDAEKGGSLVVGDFEIAAKYVCRTLETQPQSSPFSCMDLTYVSLLLQEFGFPRSKVLKLTRKIDNVETSWALGAIFHYIDSLNRQKSPAS

SEQ ID NO: 10067 - protein, 518 aa, Homo sapiens
MAETSLLEAGASAASTAAALENLQVEASCSVCLEYLKEPVIIECGHNFCKACITRWWEDLERDFPCPVCRKTSRYRSLRPNRQLGSMVEIAKQLQAVKRKIRDESLCPQHHEALSLFCYEDQEAVCLICAISHTHRAHTVVPLDDATQEYKEKLQKCLEPLEQKLQEITRCKSSEEKKPGELKRLVESRRQQILREFEELHRRLDEEQQVLLSRLEEEEQDILQRLRENAAHLGDKRRDLAHLAAEVEGKCLQSGFEMLKDVKSTLEKNIPRKFGGSLSTICPRDHKALLGLVKEINRCEKVKTMEVTSVSIELEKNFSNFPRQYFALRKILKQLIADVTLDPETAHPNLVLSEDRKSVKFVETRLRDLPDTPRRFTFYPCVLATEGFTSGRHYWEVEVGDKTHWAVGVCRDSVSRKGELTPLPETGYWRVRLWNGDKYAATTTPFTPLHIKVKPKRVGIFLDYEAGTLSFYNVTDRSHIYTFTDTFTEKLWPLFYPGIRAGRKNAAPLTIRPPTDWE

SEQ ID NO: 10068 - protein, 488 aa, Homo sapiens
MAETSLLEAGASAASTAAALENLQVEASCSVCLEYLKEPVIIECGHNFCKACITRWWEDLERDFPCPVCRKTSRYRSLRPNRQLGSMVEIAKQLQAVKRKIRDESLCPQHHEALSLFCYEDQEAVCLICAISHTHRAHTVVPLDDATQEYKEKLQKCLEPLEQKLQEITRCKSSEEKKPGELKRLVESRRQQILREFEELHRRLDEEQQVLLSRLEEEEQDILQRLRENAAHLGDKRRDLAHLAAEVEGKCLQSGFEMLKDVKSTLEKCEKVKTMEVTSVSIELEKNFSNFPRQYFALRKILKQLIADVTLDPETAHPNLVLSEDRKSVKFVETRLRDLPDTPRRFTFYPCVLATEGFTSGRHYWEVEVGDKTHWAVGVCRDSVSRKGELTPLPETGYWRVRLWNGDKYAATTTPFTPLHIKVKPKRVGIFLDYEAGTLSFYNVTDRSHIYTFTDTFTEKLWPLFYPGIRAGRKNAAPLTIRPPTDWE

SEQ ID NO: 10069 - protein, 334 aa, Homo sapiens
MEFPGLGSLGTSEPLPQFVDPALVSSTPESGVFFPSGPEGLDAAASSTAPSTATAAAAALAYYRDAEAYRHSPVFQVYPLLNCMEGIPGGSPYAGWAYGKTGLYPASTVCPTREDSPPQAVEDLDGKGSTSFLETLKTERLSPDLLTLGPALPSSLPVPNSAYGGPDFSSTFFSPTGSPLNSAAYSSPKLRGTLPLPPCEARECVNCGATATPLWRRDRTGHYLCNACGLYHKMNGQNRPLIRPKKRLIVSKRAGTQCTNCQTTTTTLWRRNASGDPVCNACGLYYKLHQHYCGGSAQLMRAQSMASRGGVVSFSSCSQNSGQPKSLGPRHPLA

SEQ ID NO: 10070 - protein, 294 aa, Homo sapiens
VLKATAGLRLLPGEKAQKLLQKVKKVFKASPFLVGDDCVSIMNGTDEGVSAWITINFLTGSLKTPGGSSVGMLDLGGGSTQIAFLPRVEGTLQASPPGYLTALRMFNRTYKLYSYSYLGLGLMSARLAILGGVEGQPAKDGKELVSPCLSPSFKGEWEHAEVTYRVSGQKAAASLHELCAARVSEVLQNRVHRTEEVKHVDFYAFSYYYDLAAGVGLIDAEKGGSLVVGDFEIAAKYGGSHLEREGTCLIPSVSDPGDTAAEQPLLMHGPHLRQPATPGVRLSQEQSAEAHSEN

SEQ ID NO: 10071 - protein, 413 aa, Homo sapiens
MEFPGLGSLGTSEPLPQFVDPALVSSTPESGVFFPSGPEGLDAAASSTAPSTATAAAAALAYYRDAEAYRHSPVFQVYPLLNCMEGIPGGSPYAGWAYGKTGLYPASTVCPTREDSPPQAVEDLDGKGSTSFLETLKTERLSPDLLTLGPALPSSLPVPNSAYGGPDFSSTFFSPTGSPLNSAAYSSPKLRGTLPLPPCEARECVNCGATATPLWRRDRTGHYLCNACGLYHKMNGQNRPLIRPKKRLIVSKRAGTQCTNCQTTTTTLWRRNASGDPVCNACGLYYKLHQVNRPLTMRKDGIQTRNRKASGKGKKKRGSSLGGTGAAEGPAGGFMVVAGGSGSGNCGEVASGLTLGPPGTAHLYQGLGPVVLSGPVSHLMPFPGPLLGSPTGSFPTGPMPPTTSTTVVAPLSS

SEQ ID NO: 10072 - protein, 465 aa, Homo sapiens [sequence omitted]

SEQ ID NO: 10073 - protein, 502 aa, Homo sapiens
MSGGPMGGRPGGRGAPAVQQNIPSTLLQDHENQRLFEMLGRKCLTLATAVVQLYLALPPGAEHWTKEHCGAVCFVKDNPQKSYFIRLYGLQAGRLLWEQELYSQLVYSTPTPFFHTFAGDDCQAGLNFADEDEAQAFRALVQEKIQKRNQRQSGDRRQLPPPPTPANEERRGGLPPLPLHPGGDQGGPPVGPLSLGLATVDIQNPDITSSRYRGLPAPGPSPADKKRSGKKKISKADIGAPSGFKHVSHVGWDPQNGFDVNNLDPDLRSLFSRAGISEAQLTDAETSKLIYDFIEDQGGLEAVRQEMRRQEPLPPPPPPSRGGNQLPRPPIVGGNKGRSGPLPPVPLGIAPPPPTPRGPPPPGRGGPPPPPPPATGRSGPLPPPPPGAGGPPMPPPPPPPPPPPSSGNGPAPPPLPPALVPAGGLAPGGGRGALLDQIRQGIQLNKTPGAPESSALQPPPQSSEGLVGALMHVMQKRSRAIHSSDEGEDQAGDEDEDDEWDD

SEQ ID NO: 10074 - protein, 471 aa, Homo sapiens
MDERFNKWLLTPVLTLLFVVIMYQYVSPSCTSSCTNFGEQPRAGEAGPPAVPGPARRAQAPPEEWERRPQLPPPPRGPPEGPRGAAAPEEEDEEPGDPREGEEEEEEDEPDPEAPENGSLPRFVPRFNFSLKDLTRFVDFNIKGRDVIVFLHIQKTGGTTFGRHLVKNIRLEQPCSCKAGQKKCTCHRPGKKETWLFSRFSTGWSCGLHADWTELTNCVPAIMEKKDCPRNHSHTRNFYYITMLRDPVSRYLSEWKHVQRGATWKTSLHMCDGRSPTPDELPTCYPGDDWSGVSLREFMDCTYNLANNRQVRMLADLSLVGCYNLTFMNESERNTILLQSAKNNLKNMAFFGLTEFQRKTQFLFERTFNLKFISPFTQFNITRASNVEINEGARQRIEDLNFLDMQLYEYAKDLFQQRYHHTKQLEHQRDRQKRREERRLQREHRDHQWPKEDGAAEGTVTEDYNSQVVRW

SEQ ID NO: 10075 - protein, 239 aa, Homo sapiens
MTGRDSLSDGRTSSRALVPGGSPRGSRPRGFAITDLLGLEAELPAPAGPGQGSGCEGPAVAPCPGPGLDGSSLARGALPLGLGLLCGFGTQPPAAARAPCLLLADVPFLPPRGPEPAAPLAPSRPPPALGRQKRSDSVSTSDEDSQSEDRNDLKASPTLGKRKKRRHRTVFTAHQLEELEKAFSEAHYPDVYAREMLAVKTELPEDRIQVSGVPFLRSKDTTENVSFPHSVSQSAVPSL

SEQ ID NO: 10076 - protein, 365 aa, Homo sapiens
MTGRDSLSDGRTSSRALVPGGSPRGSRPRGFAITDLLGLEAELPAPAGPGQGSGCEGPAVAPCPGPGLDGSSLARGALPLGLGLLCGFGTQPPAAARAPCLLLADVPFLPPRGPEPAAPLAPSRPPPALGRQKRSDSVSTSDEDSQSEDRNDLKASPTLGKRKKRRHRTVFTAHQLEELEKAFSEAHYPDVYAREMLAVKTELPEDRIQVWFQNRRAKWRKREKRWGGSSVMAEYGLYGAMVRHCIPLPDSVLNSAEGGLLGSCAPWLLGMHKKSMGMIRKPGSEDKLAGLWGSDHFKEGSSQSESGSQRGSDKVSPENGLEDVAIDLSSSARQETKKVHPGAGAQGGSNSTALEGPQPGKVGAT

SEQ ID NO: 10077 - protein, 298 aa, Homo sapiens
MEEFLQRAKSKLNRSKRLEKVHVVIGPKSCDLDSLISTFTYAYFLDKVSPPGVLCLPVLNIPRTEFNYFTETRFILEELNISESFHIFRDEINLHQLNDEGKLSITLVGSSVLASEDKTLESAVVKVINPVEQSDANVEFRESSSSLVLKEILQEAPELITEQLAHRLRGSILFKWMTMESEKISEKQEEILSILEEKFPNLPPREDIINVLQETQFSAQGLSIEQTMLKDLKELSDGEIKVAISTVSMNLEMSRIELFPKGTWLVNRDAFQSRNSGSKCMPGTTVLQCTLRSLQRGK

SEQ ID NO: 10078 - protein, 731 aa, Homo sapiens
MMQAQESLTLEDVAVDFTWEEWQFLSPAQKDLYRDVMLENYSNLVAVGYQASKPDALSKLERGEETCTTEDEIYSRICSEIRKIDDPLQHHLQNQSIQKSVKQCHEQNMFGNIVNQNKGHFLLKQDCDTFDLHEKPLKSNLSFENQKRSSGLKNSAEFNRDGKSLFHANHKQFYTEMKFPAIAKPINKSQFIKQQRTHNIENAHVCSECGKAFLKLSQFIDHQRVHTGEKPHVCSMCGKAFSRKSRLMDHQRTHTELKHYECTECDKTFLKKSQLNIHQKTHMGGKPYTCSQCGKAFIKKCRLIYHQRTHTGEKPHGCSVCGKAFSTKFSLTTHQKTHTGEKPYICSECGKGFIEKRRLTAHHRTHTGEKPFICNKCGKGFTLKNSLITHQQTHTGEKLYTCSECGKGFSMKHCLMVHQRTHTGEKPYKCNECGKGFALKSPLIRHQRTHTGEKPYVCTECRKGFTMKSDLIVHQRTHTAEKPYICNDCGKGFTVKSRLIVHQRTHTGEKPYVCGECGKGFPAKIRLMGHQRTHTGEKPYICNECGKGFTEKSHLNVHRRTHTGEKPYVCSECGKGLTGKSMLIAHQRTHTGEKPYICNECGKGFTMKSTLSIHQQTHTGEKPYKCNECDKTFRKKTCLIQHQRFHTGKTSFACTECGKFSLRKNDLITHQRIHTGEKPYKCSDCGKAFTTKSGLNVHQRKHTGERPYGCSDCGKAFAHLSILVKHRRIHR

SEQ ID NO: 10079 - protein, 3088 aa, Homo sapiens
MEEFLQRAKSKLNRSKRLEKVHVVIGPKSCDLDSLISTFTYAYFLDKVSPPGVLCLPVLNIPRTEFNYFTETRFILEELNISESFHIFRDEINLHQLNDEGKLSITLVGSSVLASEDKTLESAVVKVINPVEQSDANVEFRESSSSLVLKEILQEAPELITEQLAHRLRGSILFKWMTMESEKISEKQEEILSILEEKFPNLPPREDIINVLQETQFSAQGLSIEQTMLKDLKELSDGEIKVAISTVSMNLENCLFHSNITSDLKAFTDKFGFDVLILFSSYLSEEQQPRRQIAVYSENMELCSQICCELEECQNPCLELEPFDCGCDEILVYQQEDPSVTCDQVVLVVKEVINRRCPEMVSNSRTSSTEAVAGSAPLSQGSSGIMELYGSDIEPQPSSVNFIENPPDLNDSNQAQVDANVDLVSPDSGLATIRSSRSSKESSVFLSDDSPVGEGAGPHHTLLPGLDSYSPIPEGAVAEEHAWSGEHGEHFDLFNFDPAPMASGQSQQSSHSADYSPADDFFPNSDLSEGQLPAGPEGLDGMGTNMSNYSSSSLLSGAGKDSLVEHDEEFVQRQDSPRDNSERNLSLTDFVGDESPSPERLKNTGKRIPPTPMNSLVESSPSTEEPASLYTEDMTQKATDTGHMGPPQTHARCSSWWGGLEIDSKNIADAWSSSEQESVFQSPESWKEHKPSSIDRRASDSVFQPKSLEFTKSGPWESEFGQPELGSNDIQDKNEESLPFQNLPMEKSPLPNTSPQGTNHLIEDFASLWHSGRSPTAMPEPWGNPTDDGEPAAVAPFPAWSAFGKEDHDEALKNTWNLHPTSSKTPSVRDPNEWAMAKSGFAFSSSELLDNSPSEINNEAAPEIWGKKNNDSRDHIFAPGNPSSDLDHTWTNSKPPKEDQNGLVDPKTRGKVYEKVDSWNLFEENMKKGGSDVLVPWEDSFLSYKCSDYSASNLGEDSVPSPLDTNYSTSDSYTSPTFAGDEKETEHKPFAKEEGFESKDGNSTAEETDIPPQSLQQSSRNRISSGPGNLDMWASPHTDNSSEINTTHNLDENELKTEHTDGKNISMEDDVGESSQSSYDDPSMMQLYNETNRQLTLLHSSTNSRQTAPDSLDLWNRVILEDTQSTATISDMDNDLDWDDCSGGAAIPSDGQTEGYMAEGSEPETRFTVRQLEPWGLEYQEANQVDWELPASDEHTKDSAPSEHHTLNEKSGQLIANSIWDSVMRDKDMSSFMLPGSSHITDSEQRELPPEIPSHSANVKDTHSPDAPAASGTSESEALISHLDKQDTERETLQSDAASLATRLENPGYFPHPDPWKGHGDGQSESEKEAQGATDRGHLDEEEVIASGVENASGISEKGQSDQELSSLVASEHQEICIKSGKISSLAVTFSPQTEEPEEVLEYEEGSYNLDSRDVQTGMSADNLQPKDTHEKHLMSQRNSGETTETSDGMNFTKYVSVPEKDLEKTEECNFLEPENVGGGPPHRVPRSLDFGDVPIDSDVHVSSTCSEITKNLDVKGSENSLPGAGSSGNFDRDTISSEYTHSSASSPELNDSSVALSSWGQQPSSGYQEENQGNWSEQNHQESELITTDGQVEIVTKVKDLEKNRINEFEKSFDRKTPTFLEIWNDSVDGDSFSSLSSPETGKYSEHSGTHQESNLIASYQEKNEHDISATVQPEDARVISTSSGSDDDSVGGEESIEEEIQVANCHVAEDESRAWDSLNESNKFLVTADPKSENIYDYLDSSEPAENENKSNPFCDNQQSSPDPWTFSPLTETEMQITAVEKEKRSSPETGTTGDVAWQISPKASFPKNEDNSQLEMLGFSADSTEWWKASPQEGRLIESPFERELSDSSGVLEINSSVHQNASPWGVPVQGDIEPVETHYTNPFSDNHQSPFLEGNGKNSHEQLWNIQPRQPDPDADKFSQLVKLDQIKEKDSREQTFVSAAGDELTPETPTQEQCQDTMLPVCDHPDTAFTHAEENSCVTSNVSTNEGQETNQWEQEKSYLGEMTNSSIATENFPAVSSPTQLIMKPGSEWDGSTPSEDSRGTFVPDILHGNFQEGGQLASAAPDLWIDAKKPFSLKADGENPDILTHCEHDSNSQASDSPDICHDSEAKQETEKHLSACMGPEVESSELCLTEPEIDEEPIYEPGREFVPSNAELDSENATVLPPIGYQADIKGSSQPASHKGSPEPSEINGDNSTGLQVSEKGASPDMAPILEPVDRRIPRIENVATSIFVTHQEPTPEGDGSWISDSFSPESQPGARALFDGDPHLSTENPALVPDALLASDTCLDISEAAFDHSFSDASGLNTSTGTIDDMSKLTLSEGHPETPVDGDLGKQDICSSEASWGDFEYDVMGQNIDEDLLREPEHFLYGGDPPLEEDSLKQSLAPYTPPFDLSYLTEPAQSAETIEEAGSPEDESLGCRAAEIVLSALPDRRSEGNQAETKNRLPGSQLAVLHIREDPESVYLPVGAGSNILSPSNVDWEVETDNSDLPAGGDIGPPNGASKEISELEEEKTIPTKEPEQIKSEYKEERCTEKNEDRHALHMDYILVNREENSHSKPETCEERESIAELELYVGSKETGLQGTQLASFPDTCQPASLNERKGLSAEKMSSKSDTRSSFESPAQDQSWMFLGHSEVGDPSLDARDSGPGWSGKTVEPFSELGLGEGPQLQILEEMKPLESLALEEASGPVSQSQKSKSRGRAGPDAVTLQAVTHDNEWEMLSPQPVQKNMIPDTEMEEETEFLELGTRISRPNGLLSEDVGMDIPFEEGVLSPSAADMRPEPPNSLDLNDTHPRRIKLTAPNINLSLDQSEGSILSDDNLDSPDEIDINVDELDTPDEADSFEYTGHDPTANKDSGQESESIPEYTAEEEREDNRLWRTVVIGEQEQRIDMKVIEPYRRVISHGGYYGDGLNAIIVFAACFLPDSSRADYHYVMENLFLYVISTLELMVAEDYMIVYLNGATPRRRMPGLGWMKKCYQMIDRRLRKNLKSFIIVHPSWFIRTILAVTRPFISSKFSSKIKYVNSLSELSGLIPMDCIHIPESIIKLDEELREASEAAKTSCLYNDPEMSSMEKDIDLKLKEKP

SEQ ID NO: 10080 - protein, 428 aa, Homo sapiens
MLRTLLRRRLFSYPTKYYFMVLVLSLITFSVLRIHQKPEFVSVRHLELAGENPSSDINCTKVLQGDVNEIQKVKLEILTVKFKKRPRWTPDDYINMTSDCSSFIKRRKYIVEPLSKEEAEFPIAYSIVVHHKIEMLDRLLRAIYMPQNFYCIHVDTKSEDSYLAAVMGIASCFSNVFVASRLESVVYASWSRVQADLNCMKDLYAMSANWKYLINLCGMDFPIKTNLEIVRKLKLLMGENNLETERMPSHKEERWKKRYEVVNGKLTNTGTVKMLPPLETPLFSGSAYFVVSREYVGYVLQNEKIQKLMEWAQDTYSPDEYLWATIQRIPEVPGSLPASHKYDLSDMQAVARFVKWQYFEGDVSKGAPYPPCDGVHVRSVCIFGAGDLNWMLRKHHLFANKFDVDVDLFAIQCLDEHLRHKALETLKH

SEQ ID NO: 10081 - protein, 425 aa, Homo sapiens
MASGQFVNKLQEEVICPICLDILQKPVTIDCGHNFCLKCITQIGETSCGFFKCPLCKTSVRKNAIRFNSLLRNLVEKIQALQASEVQSKRKEATCPRHQEMFHYFCEDDGKFLCFVCRESKDHKSHNVSLIEEAAQNYQGQIQEQIQVLQQKEKETVQVKAQGVHRVDVFTDQVEHEKQRILTEFELLHQVLEEEKNFLLSRIYWLGHEGTEAGKHYVASTEPQLNDLKKLVDSLKTKQNMPPRQLLEDIKVVLCRSEEFQFLNPTPVPLELEKKLSEAKSRHDSITGSLKKFKDQLQADRKKDENRFFKSMNKNDMKSWGLLQKNNHKMNKTSEPGSSSAGGRTTSGPPNHHSSAPSHSLFRASSAGKVTFPVCLLASYDEISGQGASSQDTKTFDVALSEELHAALSEWLTAIRAWFCEVPSS

SEQ ID NO: 10082 - protein, 613 aa, Homo sapiens
MSDPQTSMAATAAVSPSDYLQPAASTTQDSQPSPLALLAATCSKIGPPAVEAAVTPPAPPQPTPRKLVPIKPAPLPLSPGKNSFGILSSKGNILQIQGSQLSASYPGGQLVFAIQNPTMINKGTRSNANIQYQAVPQIQASNSQTIQVQPNLTNQIQIIPGTNQAIITPSPSSHKPVPIKPAPIQKSSTTTTPVQSGANVVKLTGGGGNVTLTLPVNNLVNASDTGAPTQLLTESPPTPLSKTNKKARKKSLPASQPPVAVAEQVETVLIETTADNIIQAGNNLLIVQSPGGGQPAVVQQVQVVPPKAEQQQVVQIPQQALRVVQAASATLPTVPQKPSQNFQIQAAEPTPTQVYIRTPSGEVQTVLVQDSPPATAAATSNTTCSSPASRAPHLSGTSKKHSAAILRKERPLPKIAPAGSIISLNAAQLAAAAQAMQTININGVQVQGVPVTITNTGGQQQLTVQNVSGNNLTISGLSPTQIQLQMEQALAGETQPGEKRRRMACTCPNCKDGEKRSGEQGKKKHVCHIPDCGKTFRKTSLLRAHVRLHTGERPFVCNWFFCGKRFTRSDELQRHARTHTGDKRFECAQCQKRFMRSDHLTKHYKTHLVTKNL

SEQ ID NO: 10083 - protein, 237 aa, Homo sapiens
SNLVLFLNGAPFCWEGAQASEALLLFMGLTYLGSPFGGWLADARLGRARAILLSLALYLLGMLAFPLLAAPATRAALCGSARLLNCTAPGPDAAARCCSPATFAGLVLVGLGVATVKANITPFGADQVKDRGPEATRRFFNWFYWSINLGAILSLGGIAYIQQNVSFVTGYAIPTVCVGLAFVVFLCGQSVFITKPPDGSAFTDMFKILTYSCCSQKRSGERQSNGCRQHMFYRVFI

SEQ ID NO: 10084 - protein, 1516 aa, Homo sapiens
MAPAKATNVVRLLLGSTALWLSQLGSGTVAASKSVTAHLAAKWPETPLLLEASEFMAEESNEKFWQFLETVQELAIYKQTESDYSYYNLILKKAGQFLDNLHINLLKFAFSIRAYSPAIQMFQQIAADEPPPDGCNAFVVIHKKHTCKINEIKKLLKKAASRTRPYLFKGDHKFPTNKENLPVVILYAEMGTRTFSAFHKVLSEKAQNEEILYVLRHYIQKPSSRKMYLSGYGVELAIKSTEYKALDDTQVKTVTNTTVEDETETNEVQGFLFGKLKEIYSDLRDNLTAFQKYLIESNKQMMPLKVWELQDLSFQAASQIMSAPVYDSIKLMKDISQNFPIKARSLTRIAVNQHMREEIKENQKDLQVRFKIQPGDARLFINGLRVDMDVYDAFSILDMLKLEGKMMNGLRNLGINGEDMSKFLKLNSHIWEYTYVLDIRHSSIMWINDLENDDLYITWPTSCQKLLKPVFPGSVPSIRRNFHNLVLFIDPAQEYTLDFIKLADVFYSHEVPLRIGFVFILNTDDEVDGANDAGVALWRAFNYIAEEFDISEAFISIVHMYQKVKKDQNILTVDNVKSVLQNTFPHANIWDILGIHSKYDEERKAGASFYKMTGLGPLPQALYNGEPFKHEEMNIKELKMAVLQRMMDASVYLQREVFLGTLNDRTNAIDFLMDRNNVVPRINTLILRTNQQYLNLISTSVTADVEDFSTFFFLDSQDKSAVIAKNMYYLTQDDESIISAVTLWIIADFDKPSGRKLLFNALKHMKTSVHSRLGIIYNPTSKINEENTAISRGILAAFLTQKNMFLRSFLGQLAKEEIATAIYSGDKIKTFLIEGMDKNAFEKKYNTVGVNIFRTHQLFCQDVLKLRPGEMGIVSNGRFLGPLDEDFYAEDFYLLEKITFSNLGEKIKGIVENMGINANNMSDFIMKVDALMSSVPKRASRYDVTFLRENHSVIKTNPQENDMFFNVIAIVDPLTREAQKMAQLLVVLGKIINMKIKLFMNCRGRLSEAPLESFYRFVLEPELMSGANDVSSLGPVAKFLDIPESPLLILNMITPEGWLVETVHSNCDLDNIHLKDTEKTVTAEYELEYLLLEGQCFDKVTEQPPRGLQFTLGTKNKPAVVDTIVMAHHGYFQLKANPGAWILRLHQGKSEDIYQIVGHEGTDSQADLEDIIVVLNSFKSKILKVKVKKETDKIKEDILTDEDEKTKGLWDSIKSFTVSLHKENKKEKDVLNIFSVASGHLYERFLRIMMLSVLRNTKTPVKFWLLKNYLSPTFKEVIPHMAKEYGFRYELVQYRWPRWLRQQTERQRIIWGYKILFLDVLFPLAVDKIIFVDADQIVRHDLKELRDFDLDGAPYGYTPFCDSRREMDGYRFWKTGYWASHLLRRKYHISALYVVDLKKFRRIGAGDRLRSQYQALSQDPNSLSNLDQDLPNNMIYQVAIKSLPQDWLWCETWCDDESKQRAKTIDLCNNPKTKESKLKAAARIVPEWVEYDAEIRQLLDHLENKKQDTILTHDEL

SEQ ID NO: 10085 - protein, 354 aa, Homo sapiens
MWWRDLTRLRLWLKREAIPGEGRKAAKVNAGVGEKGIYTASSRGGPPSARSKAVTVVAEGAASRSWLSMDAPELGPGLVERLEQLATCPLCGGSFEDPVLLACEHSFCRACLARRWGTPPATGTEASPTACPCCGLPCPRRSLRSNVRLAVEVRISRELREKLAEPGARAGRRRGGRIPTMGCLDLPGEDMRKTWRRFEVPTSKSSNSEDDLPEDYPVVKKMLHRLTADLTLDPGTAHRRLLISADRRSVQLAPPGTPAPPDGPKRFDQLPAVLGAQGFGAGRHCWEVETADAASCRDSSGEDADDEESHYAVGAAGESVQRKGCAPGPLGERIFPLFCTCDPRAPLRIVPAES

SEQ ID NO: 10086 - protein, 913 aa, Homo sapiens
MGWGSRCCCPGRLDLLCVLALLGGCLLPVCRTRVYTNHWAVKIAGGFPEANRIASKYGFINIGQIGALKDYYHFYHSRTIKRSVISSRGTHSFISMEPKVEWIQQQVVKKRTKRDYDFSRAQSTYFNDPKWPSMWYMHCSDNTHPCQSDMNIEGAWKRGYTGKNIVVTILDDGIERTHPDLMQNYDALASCDVNGNDLDPMPRYDASNENKHGTRCAGEVAAAANNSHCTVGIAFNAKIGGVRMLDGDVTDMVEAKSVSFNPQHVHIYSASWGPDDDGKTVDGPAPLTRQAFENGVRMGRRGLGSVFVWASGNGGRSKDHCSCDGYTNSIYTISISSTAESGKKPWYLEECSSTLATTYSSGESYDKKIITTDLRQRCTDNHTGTSASAPMAAGIIALALEANPFLTWRDVQHVIVRTSRAGHLNANDWKTNAAGFKVSHLYGFGLMDAEAMVMEAEKWTTVPRQHVCVESTDRQIKTIRPNSAVRSIYKASGCSDNPNRHVNYLEHVVVRITITHPRRGDLAIYLTSPSGTRSQLLANRLFDHSMEGFKNWEFMTIHCWGERAAGDWVLEVYDTPSQLRNFKTPGKLKEWSLVLYGTSVQPYSPTNEFPKVERFRYSRVEDPTDDYGTEDYAGPCDPECSEVGCDGPGPDHCNDCLHYYYKLKNNTRICVSSCPPGHYHADKKRCRKCAPNCESCFGSHGDQCMSCKYGYFLNEETNSCVTHCPDGSYQDTKKNLCRKCSENCKTCTEFHNCTECRDGLSLQGSRCSVSCEDGRYFNGQDCQPCHRFCATCAGAGADGCINCTEGYFMEDGRCVQSCSISYYFDHSSENGYKSCKKCDISCLTCNGPGFKNCTSCPSGYLLDLGMCQMGAICKDATEESWAEGGFCMLVKKNNLCQRKVLQQLCCKTCTFQG

SEQ ID NO: 10087 - protein, 513 aa, Homo sapiens
MAFPLSPASSPSCTLGLVLPLWSDTQVYLDGDGGFSVTSGGQSRIFKPISIQTMWATLQVLHQACEAALGSGLVPGGSALTWASHYQERLNSEQSCLNEWTAMADLESLRPPSAEPGGSSEQEQMEQAIRAELWKVLDVSDLESVTSKEIRQALELRLGLPLQQYRDFIDNQMLLLVAQRDRASRIFPHLYLGSEWNAANLEELQRNRVTHILNMAREIDNFYPERFTYHNVRLWDEESAQLLPHWKETHRFIEAARAQGTHVLVHCKMGVSRSAATVLAYAMKQYECSLEQALRHVQELRPIARPNPGFLRQLQIYQGILTASRQSHVWEQKVGGVSPEEHPAPEVSTPFPPLPPEPEGGGEEKVVGMEESQAAPKEEPGPRPRINLRGVMRSISLLEPSLELESTSETSDMPEVFSSHESSHEEPLQPFPQLARTKGGQQVDRGPQPALKSRQSVVTLQGSAVVANRTQAFQEQEQGQGQGQGEPCISSTPRFRKVVRQASVHDSGEEGEA

SEQ ID NO: 10088 - protein, 690 aa, Homo sapiens
MGWGSRCCCPGRLDLLCVLALLGGCLLPVCRTRVYTNHWAVKIAGGFPEANRIASKYGFINIGQIGALKDYYHFYHSRTIKRSVISSRGTHSFISMEPKVEWIQQQVVKKRTKRDYDFSRAQSTYFNDPKWPSMWYMHCSDNTHPCQSDMNIEGAWKRGYTGKNIVVTILDDGIERTHPDLMQNYDALASCDVNGNDLDPMPRYDASNENKHGTRCAGEVAAAANNSHCTVGIAFNAKIGGVRMLDGDVTDMVEAKSVSFNPQHVHIYSASWGPDDDGKTVDGPAPLTRQAFENGVRMGRRGLGSVFVWASGNGGRSKDHCSCDGYTNSIYTISISSTAESGKKPWYLEECSSTLATTYSSGESYDKKIITTDLRQRCTDNHTGTSASAPMAAGIIALALEANPFLTWRDVQHVIVRTSRAGHLNANDWKTNAAGFKVSHLYGFGLMDAEAMVMEAEKWTTVPRQHVCVESTDRQIKTIRPNSAVRSIYKASGCSDNPNRHVNYLEHVVVRITITHPRRGDLAIYLTSPSGTRSQLLANRLFDHSMEGFKNWEFMTIHCWGERAAGDWVLEVYDTPSQLRNFKTPGKLKEWSLVLYGTSVQPYSPTNEFPKVERFRYSRVEDPTDDYGTEDYAGELASSGTQAKKRQLMHHPTTWENRMEWNGMKWNGMKWNGMEWNGMEWNRIESNRIE

SEQ ID NO: 10089 - protein, 688 aa, Homo sapiens
MATASGASDLSGSGAPPPGVGAQAAAAAEEEEREVVRVRVKKCESFLPPEFRSFAVDPQITSLDVLQHILIRAFDLSGKKNFGISYLGRDRLGQEVYLSLLSDWDLSTAFATASKPYLQLRVDIRPSEDSPLLEDWDIISPKDVIGSDVLLAEKRSSLTTAALPFTQSILTQVGRTLSKVQQVLSWSYGEDVKPFKPPLSDAEFHTYLNHEGQLSRPEELRLRIYHGGVEPSLRKVVWRYLLNVYPDGLTGRERMDYMKRKSREYEQLKSEWAQRANPEDLEFIRSTVLKDVLRTDRAHPYYAGPEDGPHLRALHDLLTTYAVTHPQVSYCQGMSDLASPILAVMDHEGHAFVCFCGIMKRLAANFHPDGRAMATKFAHLKLLLRHADPDFYQYLQEAGADDLFFCYRWLLLELKREFAFDDALRMLEVTWSSLPPDPPEHEVELVGPPSQVADAGFGGHRGWPVRQRHMLRPAGGGGSTFEDAVDHLATASQGPGGGGRLLRQASLDGLQQLRDNMGSRRDPLVQLPHPAALISSKSLSEPLLNSPDPLLSSFSHPDSPSSSSPPSTQEASPTGDMAVGSPLMQEVGSPKDPGKSLPPVPPMGLPPPQEFGRGNPFMLFLCLAILLEHRDHIMRNGLDYNELAMHFDRLVRKHHLGRVLRRARALFADYLQSEVWDSEEGAEATAAS

SEQ ID NO: 10090 - protein, 299 aa, Homo sapiens
MAVMAPRTLLLLLSGALALTQTWAGSHSMRYFFTSVSRPGRGEPRFIAVGYVDDTQFVRFDSDAASQRMEPRAPWIEQEGPEYWDQETRNVKAQSQTDRVDLGTLRGYYNQSEAGSHTIQIMYGCDVGSDGRFLRGYRQDAYDGKDYIALNEDLRSWTAADMAAQITKRKWEAAHEAEQLRAYLDGTCVEWLRRYLENGKETLQRTDPPKTHMTHHPISDHEATLRCWALGFYPAEITLTWQRDGEDQTQDTELVETRPAGDGTFQKWAAVVVPSGEEQRYTCHVQHEGLPKPLTLRWV

SEQ ID NO: 10091 - protein, 371 aa, Homo sapiens
MAVMAPRTLLLLLSGALALTQTWAGSHSMRYFFTSVSRPGRGEPRFIAVGYVDDTQFVRFDSDAASQRMEPRAPWIEQEGPEYWDQETRNVKAQSQTDRVDLGTLRGYYNQSEAGSHTIQIMYGCDVGSDGRFLRGYRQDAYDGKDYIALNEDLRSWTAADMAAQITKRKWEAAHEAEQLRAYLDGTCVEWLRRYLENGKETLQRTDPPKTHMTHHPISDHEATLRCWALGFYPAEITLTWQRDGEDQTQDTELVETRPAGDGTFQKWAAVVVPSGEEQRYTCHVQHEGLPKPLTLRWELSSQPTIPIVGIIAGLVLLGAVITGAVVAAVMWRRKSSGGEGVKDRKGGSYTQAASSDSAQGSDVSLTACKV

SEQ ID NO: 10092 - protein, 365 aa, Homo sapiens
MAVMAPRTLLLLLSGALALTQTWAGSHSMRYFFTSVSRPGRGEPRFIAVGYVDDTQFVRFDSDAASQRMEPRAPWIEQEGPEYWDQETRNVKAQSQTDRVDLGTLRGYYNQSEAGSHTIQIMYGCDVGSDGRFLRGYRQDAYDGKDYIALNEDLRSWTAADMAAQITKRKWEAAHEAEQLRAYLDGTCVEWLRRYLENGKETLQRTDPPKTHMTHHPISDHEATLRCWALGFYPAEITLTWQRDGEDQTQDTELVETRPAGDGTFQKWAAVVVPSGEEQRYTCHVQHEGLPKPLTLRWELSSQPTIPIVGIIAGLVLLGAVITGAVVAAVMWRRKSSDRKGGSYTQAASSDSAQGSDVSLTACKV

SEQ ID NO: 10093 - protein, 409 aa, Homo sapiens
MQRRRRPPPPTSRLPEGCGGGGGGSEEVEVQFSAGRWGSAAAVSAAAAAATRSTEEEEERLEREHFWKIINAFRYYGTSMHERVNRTERQFRSLPANQQKLLPQFLLHLDKIRKCIDHNQEILLTIVNDCIHMFENKEYGEDGNGKIMPASTFDMDKLKSTLKQFVRDWSETGKAERDACYQPIIKEILKNFPKERWDPSKVNILVPGAGLGRLAWEIAMLGYACQGNEWSFFMLFSSNFVLNRCSEINKYKLYPWIHQFSNNRRSADQIRPIFFPDVDPHSLPPGSNFSMTAGDFQEIYSECNTWDCIATCFFIDTAHNVIDYIDTIWKILKPGGIWINLGPLLYHFENLANELSIELSYEDIKNVVLQYGFKVEVEKESVLSTYTVNDLSMMKYYYECVLFVVRKPQ

SEQ ID NO: 10094 - protein, 754 aa, Homo sapiens
MNFEAVLHYKHQNQARDEKKKLRHASGANITNATTAATTAATATTTASTEGSNSESEAESTENSPTPSPLQKKVTEDLSKTLLMYTVPAVQGFFRSISLSRGNNLQDTLRVLTLWFDYGHWPDVNEALVEGVKAIQIDTWLQVIPQLIARIDTPRPLVGRLIHQLLTDIGRYHPQALIYPLTVASKSTTTARHNAANKILKNMCEHSNTLVQQAMMVSEELIRVAILWHEMWHEGLEEASRLYFGERNVKGMFEVLEPLHAMMERGPQTLKETSFNQAYGRDLMEAQEWCRKYMKSGNVKDLTQAWDLYYHVFRRISKQLPQLTSLELQYVSPKLLMCRDLELAVPGTYDPNQPIIRIQSIAPSLQVITSKQRPRKLTLMGSNGHEFVFLLKGHEDLRQDERVMQLFGLVNTLLANDPTSLRKNLSIQRYAVIPLSTNSGLIGWVPHCDTLHALIRDYREKKKILLNIEHRIMLRMAPDYDHLTLMQKVEVFEHAVNNTAGDDLAKLLWLKSPSSEVWFDRRTNYTRSLAVMSMVGYILGLGDRHPSNLMLDRLSGKILHIDFGDCFEVAMTREKFPEKIPFRLTRMLTNAMEVTGLDGNYRITCHTVMEVLREHKDSVMAVLEAFVYDPLLNWRLMDTNTKGNKRSRTRTDSYSAGQSVEILDGVELGEPAHKKTGTTVPESIHSFIGDGLVKPEALNKKAIQIINRVRDKLTGRDFSHDDTLDVPTQVELLIKQATSHENLCQCYIGWCPFW

SEQ ID NO: 10095 - protein, 822 aa, Homo sapiens
MLLLEVISGERLAKPERGKMRVHKISNVNKALDFIASKGVKLVSIGAEEIVDGNVKMTLGMIWTIILRFAIQDISVEETSAKEGLLLWCQRKTAPYKNVNIQNFHISWKDGLGFCALIHRHRPELIDYGKLRKDDPLTNLNTAFDVAEKYLDIPKMLDAEDIVGTARPDEKAIMTYVSSFYHAFSGAQKAETAANRICKVLAVNQENEQLMEDYEKLASDLLEWIRRTIPWLENRVPENTMHAMQQKLEDFRDYRRLHKPPKVQEKCQLEINFNTLQTKLRLSNRPAFMPSEGRMVSDINNAWGCLEQVEKGYEEWLLNEIRRLERLDHLAEKFRQKASIHEAWTDGKEAMLRQKDYETATLSEIKALLKKHEAFESDLAAHQDRVEQIAAIAQELNELDYYDSPSVNARCQKICDQWDNLGALTQKRREALERTEKLLETIDQLYLEYAKRAAPFNNWMEGAMEDLQDTFIVHTIEEIQGLTTAHEQFKATLPDADKERLAILGIHNEVSKIVQTYHVNMAGTNPYTTITPQEINGKWDHVRQLVPRRDQALTEEHARQQHNERLRKQFGAQANVIGPWIQTKMEEIGRISIEMHGTLEDQLSHLRQYEKSIVNYKPKIDQLEGDHQLIQEALIFDNKHTNYTMEHIRVGWEQLLTTIARTINEVENQILTRDAKGISQEQMNEFRASFNHFDRKKTGMMDTDDFRACLISMGYNMGEAEFARIMSIVDPNRLGVVTFQAFIDFMSRETADTDTADQVMASFKILAGDKNYITMDELRRELPPDQAEYCIARMAPYTGPDSVPGALDYMSFSTALYGESDL

SEQ ID NO: 10096 - protein, 1140 aa, Homo sapiens
MWLKPEEVLLKNALKLWVTQKSSCYFILQRRRGHGEGGGRLTGRLVGALDAVLDSNARVAPFRILLQVPGSQVYSPIACGATLEEINQHWDWLEQNLLHTLSVFDNKDDIASFVKGKVKALIAEETSSRLAEQEEEPEKFREALVKFEARFNFPEAEKLVTYYSCCCWKGRVPRQGWLYLSINHLCFYSFFLGKELKLVVPWVDIQKLERTSNVFLTDTIRITTQNKERDFSMFLNLDEVFKVMEQLADVTLRRLLDNEVFDLDPDLQEPSQITKRDLEARAQNEFFRAFFRLPRKEKLHAVVDCSLWTPFSRCHTTGRMFASDSYICFASREDGCCKIILPLREVVSIEKMEDTSLLPHPIIVSIRSKVAFQFIELRDRDSLVEALLARLKQVHANHPVHYDTSADDDMASLVFHSTSMCSDHRFGDLEMMSSQNSEESEKEKSPLMHPDALVTAFQQSGSQSPDSRMSREQIKISLWNDHFVEYGRTVCMFRTEKIRKLVAMGIPESLRGRLWLLFSDAVTDLASHPGYYGNLVEESLGKCCLVTEEIERDLHRSLPEHPAFQNETGIAALRRVLTAYAHRNPKIGYCQSMNILTSVLLLYTKEEEAFWLLVAVCERMLPDYFNHRVIGAQVDQSVFEELIKGHLPELAEHMNDLSALASVSLSWFLTLFLSIMPLESAVNVVDCFFYDGIKAIFQLGLAVLEANAEDLCSSKDDGQALMILSRFLDHIKNEDSPGPPVGSHHAFFSDDQEPYPVTDISDLIRDSYEKFGDQSVEQIEHLRYKHRIRVLQGHEDTTKQNVLRVVIPEVSILPEDLEELYDLFKREHMMSCYWEQPRPMASRHDPSRPYAEQYRIDARQFAHLFQLVSPWTCGAHTEILAERTFRLLDDNMDQLIEFKAFVSCLDIMYNGEMNEKIKLLYRLHIPPALTENDRDSQSPLRNPLLSTSRPLVFGKPNGDAVDYQKQLKQMIKDLAKEKDKTEKELPKMSQREFIQFCKTLYSMFHEDPEENDLYQAIATVTTLLLQIGEVGQRGSSSGSCSQECGEELRASAPSPEDSVFADTGKTPQDSQAFPEAAERDWTVSLEHILASLLTEQSLVNFFEKPLDMKSKLENAKINQYNLKTFEMSHQSQSELKLSNL

SEQ ID NO: 10097 - protein, 452 aa, Homo sapiens
MAAGEPRSLLFFQKPVTFEDVAVNFTQEEWDCLDASQRVLYQDVMSETFKNLTSVARIFLHKPELITKLEQEEEQWRETRVLQASQAGPPFFCYTCGKCFSRRSYLYSHQFVHNPKLTNSCSQCGKLFRSPKSLSYHRRMHLGERPFCCTLCDKTYCDASGLSRHRRVHLGYRPHSCSVCGKSFRDQSELKRHQKIHQNQEPVDGNQECTLRIPGTQAEFQTPIARSQRSIQGLLDVNHAPVARSQEPIFRTEGPMAQNQASVLKNQAPVTRTQAPITGTLCQDARSNSHPVKPSRLNVFCCPHCSLTFSKKSYLSRHQKAHLTEPPNYCFHCSKSFSSFSRLVRHQQTHWKQKSYLCPICDLSFGEKEGLMDHWRGYKGKDLCQSSHHKCRVILGQWLGFSHDVPTMAGEEWKHGGDQSPPRIHTPRRRGLREKACKGDKTKEAVSILKHK

SEQ ID NO: 10098 - protein, 516 aa, Homo sapiens
MFEQLKPIEPRDCWREARVKKKPVTFEDVAVNFTQEEWDCLDASQRVLYQDVMSETFKNLTSVARIFLHKPELITKLEQEEEQWREFVHLPNTEGLSEGKKKELREQHPSLRDEGTSDDKVFLACRGAGQCPLSAPAGTMDRTRVLQASQAGPPFFCYTCGKCFSRRSYLYSHQFVHNPKLTNSCSQCGKLFRSPKSLSYHRRMHLGERPFCCTLCDKTYCDASGLSRHRRVHLGYRPHSCSVCGKSFRDQSELKRHQKIHQNQEPVDGNQECTLRIPGTQAEFQTPIARSQRSIQGLLDVNHAPVARSQEPIFRTEGPMAQNQASVLKNQAPVTRTQAPITGTLCQDARSNSHPVKPSRLNVFCCPHCSLTFSKKSYLSRHQKAHLTEPPNYCFHCSKSFSSFSRLVRHQQTHWKQKSYLCPICDLSFGEKEGLMDHWRGYKGKDLCQSSHHKCRVILGQWLGFSHDVPTMAGEEWKHGGDQSPPRIHTPRRRGLREKACKGDKTKEAVSILKHK

SEQ ID NO: 10099 - protein, 295 aa, Homo sapiens
MASLSRPSLPSCLCSFLLLLLLQVSSSYAGQFRVIGPRHPIRALVGDEVELPCRISPGKNATGMEVGWYRPPFSRVVHLYRNGKDQDGDQAPEYRGRTELLKDAIGEGKVTLRIRNVRFSDEGGFTCFFRDHSYQEEAAMELKVEDPFYWVSPGVLVLLAVLPVLLLQITVGLIFLCLQYRLRGKLRAEIENLHRTFDPHFLRVPCWKITLFVIVPVLGPLVALIICYNWLHRRLAGQFLEELRKFSSLCYKQRIKSQERETEATRGRGGLLRDHIPRGKEELESLGGGKTPPGR

SEQ ID NO: 10100 - protein, 459 aa, Homo sapiens
MRAQIEVIPCKICGDKSSGIHYGVITCEGCKGFFRRSQQNNASYSCPRQRNCLIDRTNRNRCQHCRLQKCLALGMSRDAVKFGRMSKKQRDSLYAEVQKHQQRLQEQRQQQSGEAEALARVYSSSISNGLSNLNNETSGTYANGHVIDLPKSEGYYNVDSGQPSPDQSGLDMTGIKQIKQEPIYDLTSVPNLFTYSSFNNGQLAPGITMTEIDRIAQNIIKSHLETCQYTMEELHQLAWQTHTYEEIKAYQSKSREALWQQCAIQITHAIQYVVEFAKRITGFMELCQNDQILLLKSGCLEVVLVRMCRAFNPLNNTVLFEGKYGGMQMFKALGSDDLVNEAFDFAKNLCSLQLTEEEIALFSSAVLISPDRAWLIEPRKVQKLQEKIYFALQHVIQKNHLDDETLAKLIAKIPTITAVCNLHGEKLQVFKQSHPEIVNTLFPPLYKELFNPDCATGCK

SEQ ID NO: 10101 - protein, 252 aa, Homo sapiens
MASLSRPSLPSCLCSFLLLLLLQVSSSYAGQFRVIGPRHPIRALVGDEVELPCRISPGKNATGMEVGWYRPPFSRVVHLYRNGKDQDGDQAPEYRGRTELLKDAIGEGKVTLRIRNVRFSDEGGFTCFFRDHSYQEEAAMELKVEDPFYWVSPGVLVLLAVLPVLLLQITVGLIFLCLQYRLRGKLRAEIENLHRTFDPHFLRVPCWKITLFVIVPVLGPLVALIICYNWLHRRLAGQFLEELLFHLEALSG

SEQ ID NO: 10102 - protein, 247 aa, Homo sapiens
MASLSRPSLPSCLCSFLLLLLLQVSSSYAGQFRVIGPRHPIRALVGDEVELPCRISPGKNATGMEVGWYRPPFSRVVHLYRNGKDQDGDQAPEYRGRTELLKDAIGEGKVTLRIRNVRFSDEGGFTCFFRDHSYQEEAAMELKVEDPFYWVSPGVLVLLAVLPVLLLQITVGLIFLCLQYRLRGKLRAEIENLHRTFDPHFLRVPCWKITLFVIVPVLGPLVALIICYNWLHRRLAGQFLEELRNPF

SEQ ID NO: 10103 - protein, 548 aa, Homo sapiens
MQPGLSPGSPGDPRPPTPETDYPESLTSYPEEDYSPVGSFGEPGPTSPLTTPPGWSCHVSQDKQMLYTNHFTQEQWVRLEDPHGKPYFYNPEDSSVRWELPQVPVPAPRSIHKSSQDGDTPAQASPPEEKVPAELDEVGSWEEVSPATAAVRTKTLDKAGVLHRTKTADKGKRLRKKHWSASWTVLEGGVLTFFKDSKTSAAGGLRQPSKFSTPEYTVELRGATLSWAPKDKSSRKNVLELRSRDGSEYLIQHDSEAIISTWHKAIAQGIQELSAELPPEESESSRVDFGSSERLGSWQEKEEDARPNAAAPALGPVGLESDLSKVRHKLRKFLQRRPTLQSLREKGYIKDQVFGCALAALCERERSRVPRFVQQCIRAVEARGLDIDGLYRISGNLATIQKLRYKVDHDERLDLDDGRWEDVHVITGALKLFFRELPEPLFPFSHFRQFIAAIKLQDQARRSRCVRDLVRSLPAPNHDTLRMLFQHLCRVIEHGEQNRMSVQSVAIVFGPTLLRPEVEETSMPMTMVFQNQVVELILQQCADIFPPH

SEQ ID NO: 10104 - protein, 885 aa, Homo sapiens
MAPPSTREPRVLSATSATKSDGEMVLPGFPDADSFVKFALGSVVAVTKASGGLPQFGDEYDFYRSFPGFQAFCETQGDRLLQCMSRVMQYHGCRSNIKDRSKVTELEDKFDLLVDANDVILERVGILLDEASGVNKNQQPVLPAGLQVPKTVVSSWNRKAAEYGKKAKSETFRLLHAKNIIRPQLKFREKIDNSNTPFLPKIFIKPNAQKPLPQALSKERRERPQDRPEDLDVPPALADFIHQQRTQQVEQDMFAHPYQYELNHFTPADAVLQKPQPQLYRPIEETPCHFISSLDELVELNEKLLNCQEFAVDLEHHSYRSFLGLTCLMQISTRTEDFIIDTLELRSDMYILNESLTDPAIVKVFHGADSDIEWLQKDFGLYVVNMFDTHQAARLLNLGRHSLDHLLKLYCNVDSNKQYQLADWRIRPLPEEMLSYARDDTHYLLYIYDKMRLEMWERGNGQPVQLQVVWQRSRDICLKKFIKPIFTDESYLELYRKQKKHLNTQQLTAFQLLFAWRDKTARREDESYGYVLPNHMMLKIAEELPKEPQGIIACCNPVPPLVRQQINEMHLLIQQAREMPLLKSEVAAGVKKSGPLPSAERLENVLFGPHDCSHAPPDGYPIIPTSGSVPVQKQASLFPDEKEDNLLGTTCLIATAVITLFNEPSAEDSKKGPLTVAQKKAQNIMESFENPFRMFLPSLGHRAPVSQAAKFDPSTKIYEISNRWKLAQVQVQKDSKEAVKKKAAEQTAAREQAKEACKAAAEQAISVRQQVVLENAAKKRERATSDPRTTEQKQEKKRLKISKKPKDPEPPEKEFTPYDYSQSDFKAFAGNSKSKVSSQFDPNKQTPSGKKCIAAKKIKQSVGNKSMSFPTGKSDRGFRYNWPQR

SEQ ID NO: 10105 - protein, 620 aa, Homo sapiens
MAKPQGLVTFEDVAVDFTQEEWQYLNPPQRTLYRDVMLETYSNLVFVGQQVTKPNLILKLEVEECPAEGKIPFWNFPEVCQVDEQIERQHQDDQDKCLLMQVGFSDKKTIITKSARDCHEFGNILHLSTNLVASIQRPDKHESFGNNMVDNLDLFSRSSAENKYDNGCAKLFFHTEYEKTNPGMKPYGYKECGKGLRRKKGLSLHQRIKNGEKPFECTACRKTFSKKSHLIVHWRTHTGEKPFGCTECGKAFSQKSQLIIHLRTHTGERPFECPECGKAFREKSTVIIHYRTHTGEKPYECNECGKAFTQKSNLIVHQKTHTGEKTYECTKCGESFIQKLDLIIHHSTHTGKKPHECNECKKTFSDKSTLIIHQRTHTGEKPHKCTECGKSFNEKSTLIVHQRTHTGEKPYECDVCGKTFTQKSNLGVHQRTHSGEKPFECNECEKAFSQKSYLMLHQRGHTGEKPYECNECEKAFSQKSYLIIHQRTHTEEKPYKCNECGKAFREKSKLIIHQRIHTGEKPYECPVCWKAFSQKSQLIIHQRTHTGEKPYACTECGKAFREKSTFTVHQRTHTGEKPYKCTECGKAFTQKSNLIVHQRTHAGKKAHGRGHTRKSKFMAH

SEQ ID NO: 10106 - protein, 440 aa, Homo sapiens
MGGLRLLAVALTCCWWPQGSQGKTLRGSFSSTAAQDAQGQRIGHFEFHGDHALLCVRINNIAVAVGKEAKLYLFQAQEWLKLQQSSHGYSCSEKLSKAQLTMTMNQTEHNLTVSQIPSPQTWHVFYADKYTCQDDKENSQVEDIPFEMVLLNPDAEGNPFDHFSAGESGLHEFFFLLVLVYFVIACIYAQSLWQAIKKGGPMHMILKVLTTALLLQAGSALANYIHFSSYSKDGIGVPFMGSLAEFFDIASQIQMLYLLLSLCMGWTIVRMKKSQSRPLQWDSTPASTGIAVFIVMTQSVLLLWEQFEDISHHSYHSHHNLAGILLIVLRICLALSLGCGLYQIITVERSTLKREFYITFAKGCILWFLCHPVLACISVIFSDYQRDKVITIGVILCQSVSMVILYRLFLSHSLYWEVSSLSSVTLPLTISSGHKSRPHF

SEQ ID NO: 10107 - protein, 728 aa, Homo sapiens
MLSSVCVSSFRGRQGASKQQPAPPPQPPESPPPPPLPPQQQQPAQPGPAASPAGPPAPRGPGDRRAEPCPGLPAAAMGRHGGGGGDSGKIVINVGGVRHETYRSTLRTLPGTRLAGLTEPEAAARFDYDPGADEFFFDRHPGVFAYVLNYYRTGKLHCPADVCGPLFEEELGFWGIDETDVEACCWMTYRQHRDAEEALDSFEAPDPAGAANAANAAGAHDGGLDDEAGAGGGGLDGAGGELKRLCFQDAGGGAGGPPGGAGGAGGTWWRRWQPRVWALFEDPYSSRAARYVAFASLFFILISITTFCLETHEGFIHISNKTVTQASPIPGAPPENITNVEVETEPFLTYVEGVCVVWFTFEFLMRITFCPDKVEFLKSSLNIIDCVAILPFYLEVGLSGLSSKAAKDVLGFLRVVRFVRILRIFKLTRHFVGLRVLGHTLRASTNEFLLLIIFLALGVLIFATMIYYAERIGADPDDILGSNHTYFKNIPIGFWWAVVTMTTLGYGDMYPKTWSGMLVGALCALAGVLTIAMPVPVIVNNFGMYYSLAMAKQKLPKKKNKHIPRPPQPGSPNYCKPDPPPPPPPHPHHGSGGISPPPPITPPSMGVTVAGAYPAGPHTHPGLLRGGAGGLGIMGLPPLPAPGEPCPLAQEEVIEINRADPRPNGDPAAAALAHEDCPAIDQPAMSPEDKSPITPGSRGRYSRDRACFLLTDYAPSPDGSIRKALVTA

SEQ ID NO: 10108 - protein, 1995 aa, Homo sapiens
MAAVTMSVPGRKAPPRPGPVPEAAQPFLFTPRGPSAGGGPGSGTSPQVEWTARRLVWVPSELHGFEAAALRDEGEEEAEVELAESGRRLRLPRDQIQRMNPPKFSKAEDMAELTCLNEASVLHNLRERYYSGLIYTYSGLFCVVINPYKQLPIYTEAIVEMYRGKKRHEVPPHVYAVTEGAYRSMLQDREDQSILCTGESGAGKTENTKKVIQYLAHVASSPKGRKEPGVPGELERQLLQANPILEAFGNAKTVKNDNSSRFGKFIRINFDVAGYIVGANIETYLLEKSRAIRQAKDECSFHIFYQLLGGAGEQLKADLLLEPCSHYRFLTNGPSSSPGQERELFQETLESLRVLGFSHEEIISMLRMVSAVLQFGNIALKRERNTDQATMPDNTAAQKLCRLLGLGVTDFSRALLTPRIKVGRDYVQKAQTKEQADFALEALAKATYERLFRWLVLRLNRALDRSPRQGASFLGILDIAGFEIFQLNSFEQLCINYTNEKLQQLFNHTMFVLEQEEYQREGIPWTFLDFGLDLQPCIDLIERPANPPGLLALLDEECWFPKATDKSFVEKVAQEQGGHPKFQRPRHLRDQADFSVLHYAGKVDYKANEWLMKNMDPLNDNVAALLHQSTDRLTAEIWKDVEGIVGLEQVSSLGDGPPGGRPRRGMFRTVGQLYKESLSRLMATLSNTNPSFVRCIVPNHEKRAGKLEPRLVLDQLRCNGVLEGIRICRQGFPNRILFQEFRQRYEILTPNAIPKGFMDGKQACEKMIQALELDPNLYRVGQSKIFFRAGVLAQLEEERDLKVTDIIVSFQAAARGYLARRAFQKRQQQQSALRVMQRNCAAYLKLRHWQWWRLFTKVKPLLQVTRQDEVLQARAQELQKVQELQQQSAREVGELQGRVAQLEEERARLAEQLRAEAELCAEAEETRGRLAARKQELELVVSELEARVGEEEECSRQMQTEKKRLQQHIQELEAHLEAEEGARQKLQLEKVTTEAKMKKFEEDLLLLEDQNSKLSKERKLLEDRLAEFSSQAAEEEEKVKSLNKLRLKYEATIADMEDRLRKEEKGRQELEKLKRRLDGESSELQEQMVEQQQRAEELRAQLGRKEEELQAALARAEDEGGARAQLLKSLREAQAALAEAQEDLESERVARTKAEKQRRDLGEELEALRGELEDTLDSTNAQQELRSKREQEVTELKKTLEEETRIHEAAVQELRQRHGQALGELAEQLEQARRGKGAWEKTRLALEAEVSELRAELSSLQTARQEGEQRRRRLELQLQEVQGRAGDGERARAEAAEKLQRAQAELENVSGALNEAESKTIRLSKELSSTEAQLHDAQELLQEETRAKLALGSRVRAMEAEAAGLREQLEEEAAARERAGRELQTAQAQLSEWRRRQEEEAGALEAGEEARRRAAREAEALTQRLAEKTETVDRLERGRRRLQQELDDATMDLEQQRQLVSTLEKKQRKFDQLLAEEKAAVLRAVEERERAEAEGREREARALSLTRALEEEQEAREELERQNRALRAELEALLSSKDDVGKSVHELERACRVAEQAANDLRAQVTELEDELTAAEDAKLRLEVTVQALKTQHERDLQGRDEAGEERRRQLAKQLRDAEVERDEERKQRTLAVAARKKLEGELEELKAQMASAGQGKEEAVKQLRKMQAQMKELWREVEETRTSREEIFSQNRESEKRLKGLEAEVLRLQEELAASDRARRQAQQDRDEMADEVANGNLSKAAILEEKRQLEGRLGQLEEELEEEQSNSELLNDRYRKLLLQVESLTTELSAERSFSAKAESGRQQLERQIQELRGRLGEEDAGARARHKMTIAALESKLAQAEEQLEQETRERILSGKLVRRAEKRLKEVVLQVEEERRVADQLRDQLEKGNLRVKQLKRQLEEAEEEASRAQAGRRRLQRELEDVTESAESMNREVTTLRNRLRRGPLTFTTRTVRQVFRLEEGVASDEEAEEAQPGSGPSPEPEGSPPAHPQ

SEQ ID NO: 10109 - protein, 212 aa, Homo sapiens
MPSKKKKYNARFPPARIKKIMQTDEEIGKVAAAVPVIISRALELFLESLLKKACQVTQSRNAKTMTTSHLKQCIELEQQFDFLKDLVASVPDMQGDGEDNHMDGDKGARRWTVPSQRGRKPGSGGRKNGGMGTKSKDKKLSGTDSEQEDESEDTDTDGEEETSQPPPQASHPSAHFQSPPTPFLPFASTLPLPPAPPGPSAPDEEDEEDYDS

SEQ ID NO: 10110 - protein, 823 aa, Homo sapiens
MWGSPALAWAVWLACVQPTVFPWSLSFRSDTDKPSSAAEVLTEASSCWTDTVECFSDYMTLWIPRSHVEGLRRWLARTLHLPGTWRSPDHLDSSLAKCGYFLHLASDGDFLFRVQYSACFVQKEKANYRLEIRIFQKGVMGLERSDRYIMKCPMLRSRLGQESVHCGPMFIQVSRPLPLWRDNRQTPWLLSLRGELVASLEDASLMGLYVDMNATTVTVQSPRQGLLQRWEVLNTSAELLPLWLVSGHHAYSLEAACPPVSFQPESEVLVHIPKQRLGLVKRGSYIEETLSLRFLRVHQSNIFMVTENKDFVVVSIPAAGVLQVQRCQEVGGTPGTQAFYRVDLSLEFAEMAAPVLWTVESFFQCVGSGTESPASTAALRTTPSPPSPGPETPPAGVPPAASSQVWAAGPAAQEWLSRDLLHRPSDALAKKGLGPFLQTAKPARRGQTSASILPRVVQAQRGPQPPPGEAGIPGHPTPPATLPSEPVEGVQASPWRPRPVLPTHPALTLPVSSDASSPSPPAPRPERPESLLVSGPSVTLTEGLGTVRPEQDPAKSPGSPLLLRGLSSGDVAAPEPIMGEPGQASEEFQPLARPWRATLAAEELVSHRSPGEPQETCSGTEVERPRQTGPGLPREGARGHMDLSSSEPSQDIEGPGLSILPARDATFSTPSVRQPDPSAWLSSGPELTGMPRVRLAAPLAVLPMEPLPPEPVRPAALLTPEASSVGGPDQARYLESAPGWPVGQEEWGVAHTSSPPSTQTLSLWAPTGVLLPSLVELEYPFQAGRGASLQQELTEPTLALSAESHRPPELQDSVEGLSERPSR

SEQ ID NO: 10111 - protein, 415 aa, Homo sapiens
MITEGAQAPRLLLPPLLLLLTLPATGSDPVLCFTQYEESSGKCKGLLGGGVSVEDCCLNTAFAYQKRSGGLCQPCRSPRWSLWSTWAPCSVTCSEGSQLRYRRCVGWNGQCSGKVAPGTLEWQLQACEDQQCCPEMGGWSGWGPWEPCSVTCSKGTRTRRRACNHPAPKCGGHCPGQAQESEACDTQQVCPTHGAWATWGPWTPCSASCHGGPHEPKETRSRKCSAPEPSQKPPGKPCPGLAYEQRRCTGLPPCPVAGGWGPWGPVSPCPVTCGLGQTMEQRTCNHPVPQHGGPFCAGDATRTHICNTAVPCPVDGEWDSWGEWSPCIRRNMKSISCQEIPGQQSRGRTCRGRKFDGHRCAGQQQDIRHCYSIQHCPLKGSWSEWSTWGLCMPPCGPNPTRARQRLCTPLLPKYP

SEQ ID NO: 10112 - protein, 424 aa, Homo sapiens
MISFCPDCGKSIQAAFKFCPYCGNSLPVEEHVGSQTFVNPHVSSFQGSGSRPPTPKSSPQKTRKSPQVTRGSPQKTSCSPQKTRQSPQTLKRSRVTTSLEALPTGTVLTDKSGRQWKLKSFQTRDNQGILYEAAPTSTLTCDSGPQKQKFSLKLDAKDGRLFNEQNFFQRAAKPLQVNKWKKLYSTPLLAIPTCMGFGVHQDKYRFLVLPSLGRSLQSALDVSPKHVLSERSVLQVACRLLDALEFLHENEYVHGNVTAENIFVDPEDQSQVTLAGYGFAFRYCPSGKHVAYVEGSRSPHEGDLEFISMDLHKGCGPSRRSDLQSLGYCMLKWLYGFLPWTNCLPNTEDIMKQKQKFVDKPGPFVGPCGHWIRPSETLQKYLKVVMALTYEEKPPYAMLRNNLEALLQDLRVSPYDPIGLPMVP

SEQ ID NO: 10113 - protein, 899 aa, Homo sapiens
MLLLLLLAPLFLRPPGAGGAQTPNATSEGCQIIHPPWEGGIRYRGLTRDQVKAINFLPVDYEIEYVCRGEREVVGPKVRKCLANGSWTDMDTPSRCVNRTPHSERRAVYIGALFPMSGGWPGGQACQPAVEMALEDVNSRRDILPDYELKLIHHDSKCDPGQATKYLYELLYNDPIKIILMPGCSSVSTLVAEAARMWNLIVLSYGSSSPALSNRQRFPTFFRTHPSATLHNPTRVKLFEKWGWKKIATIQQTTEVFTSTLDDLEERVKEAGIEITFRQSFFSDPAVPVKNLKRQDARIIVGLFYETEARKVFCEVYKERLFGKKYVWFLIGWYADNWFKIYDPSINCTVDEMTEAVEGHITTEIVMLNPANTRSISNMTSQEFVEKLTKRLKRHPEETGGFQEAPLAYDAIWALALALNKTSGGGGRSGVRLEDFNYNNQTITDQIYRAMNSSSFEGVSGHVVFDASGSRMAWTLIEQLQGGSYKKIGYYDSTKDDLSWSKTDKWIGGSPPADQTLVIKTFRFLSQKLFISVSVLSSLGIVLAVVCLSFNIYNSHVRYIQNSQPNLNNLTAVGCSLALAAVFPLGLDGYHIGRNQFPFVCQARLWLLGLGFSLGYGSMFTKIWWVHTVFTKKEEKKEWRKTLEPWKLYATVGLLVGMDVLTLAIWQIVDPLHRTIETFAKEEPKEDIDVSILPQLEHCSSRKMNTWLGIFYGYKGLLLLLGIFLAYETKSVSTEKINDHRAVGMAIYNVAVLCLITAPVTMILSSQQDAAFAFASLAIVFSSYITLVVLFVPKMRRLITRGEWQSEAQDTMKTGSSTNNNEEEKSRLLEKENRELEKIIAEKEERVSELRHQLQSRQQLRSRRHPPTPPEPSGGLPRGPPEPPDRLSCDGSRVHLLYK

SEQ ID NO: 10114 - protein, 1759 aa, Homo sapiens
MDLGTAEGTRCTDPPAGKPAMAPKRKGGLKLNAICAKLSRQVVVEKRADAGSHTEGSPSQPRDQERSGPESGAARAPRSEEDKRRAVIEKWVNGEYSEEPAPTPVLGRIAREGLELPPEGVYMVQPQGCSDEEDHAEEPSKDGGALEEKDSDGAASKEDSGPSTRQASGEASSLRDYAASTMTEFLGMFGYDDQNTRDELARKISFEKLHAGSTPEAATSSMLPTSEDTLSKRARFSKYEEYIRKLKAGEQLSWPAPSTKTEERVGKEVVGTLPGLRLPSSTAHLETKATILPLPSHSSVQMQNLVARASKYDFFIQKLKTGENLRPQNGSTYKKPSKYDLENVKYLHLFKPGEGSPDMGGAIAFKTGKVGRPSKYDVRGIQKPGPAKVPPTPSLAPAPLASVPSAPSAPGPGPEPPASLSFNTPEYLKSTFSKTDSITTGTVSTVKNGLPTDKPAVTEDVNIYQKYIARFSGSQHCGHIHCAYQYREHYHCLDPECNYQRFTSKQDVIRHYNMHKKRDNSLQHGFMRFSPLDDCSVYYHGCHLNGKSTHYHCMQVGCNKVYTSTSDVMTHENFHKKNTQLINDGFQRFRATEDCGTADCQFYGQKTTHFHCRRPGCTFTFKNKCDIEKHKSYHIKDDAYAKDGFKKFYKYEECKYEGCVYSKATNHFHCIRAGCGFTFTSTSQMTSHKRKHERRHIRSSGALGLPPSLLGAKDTEHEESSNDDLVDFSALSSKNSSLSASPTSQQSSASLAAATAATEAGPSATKPPNSKISGLLPQGLPGSIPLALALSNSGLPTPTPYFPILAGRGSTSLPVGTPSLLGAVSSGSAASATPDTPTLVASGAGDSAPVAAASVPAPPASIMERISASKGLISPMMARLAAAALKPSATFDPGSGQQVTPARFPPAQVKPEPGESTGAPGPHEASQDRSLDLTVKEPSNESNGHAVPANSSLLSSLMNKMSQGNPGLGSLLNIKAEAEGSPAAEPSPFLGKAVKALVQEKLAEPWKVYLRRFGTKDFCDGQCDFLHKAHFHCVVEECGALFSTLDGAIKHANFHFRTEGGAAKGNTEAAFPASAAETKPPMAPSSPPVPPVTTATVSSLEGPAPSPASVPSTPTLLAWKQLASTIPQMPQIPASVPHLPASPLATTSLENAKPQVKPGFLQFQENDPCLATDCKYANKFHFHCLFGNCKYVCKTSGKAESHCLDHINPNNNLVNVRDQFAYYSLQCLCPNQHCEFRMRGHYHCLRTGCYFVTNITTKLPWHIKKHEKAERRAANGFKYFTKREECGRLGCKYNQVNSHFHCIREGCQFSFLLKHQMTSHARKHMRRMLGKNFDRVPPSQGPPGLMDAETDECMDYTGCSPGAMSSESSTMDRSCSSTPVGNESTAAGNTISMPTASGAKKRFWIIEDMSPFGKRRKTASSRKMLDEGMMLEGFRRFDLYEDCKDAACQFSLKVTHYHCTRENCGYKFCGRTHMYKHAQHHDRVDNLVLDDFKRFKASLSCHFADCPFSGTSTHFHCLRCRFRCTDSTKVTAHRKHHGKQDVISAAGFCQFSSSADCAVPDCKYKLKCSHFHCTFPGCRHTVVGMSQMDSHKRKHEKQERGEPAAEGPAPGPPISLDGSLSLGAEPGSLLFLQSAAAGLGLALGDAGDPGPPDAAAPGPREGAAAAAAAAGESSQEDEEEELELPEEEAEDDEDEDDDEDDDDEDDDEDDDDEDLRTDSEESLPEAAAEAAGAGARTPALAALAALGAPGPAPTAASSP

SEQ ID NO: 10115 - protein, 519 aa, Homo sapiens
MSPLWWGFLLSCLGCKILPGAQGQFPRVCMTVDSLVNKECCPRLGAESANVCGSQQGRGQCTEVRADTRPWSGPYILRNQDDRELWPRKFFHRTCKCTGNFAGYNCGDCKFGWTGPNCERKKPPVIRQNIHSLSPQEREQFLGALDLAKKRVHPDYVITTQHWLGLLGPNGTQPQFANCSVYDFFVWLHYYSVRDTLLGPGRPYRAIDFSHQGPAFVTWHRYHLLCLERDLQRLIGNESFALPYWNFATGRNECDVCTDQLFGAARPDDPTLISRNSRFSSWETVCDSLDDYNHLVTLCNGTYEGLLRRNQMGRNSMKLPTLKDIRDCLSLQKFDNPPFFQNSTFSFRNALEGFDKADGTLDSQVMSLHNLVHSFLNGTNALPHSAANDPIFVVLHSFTDAIFDEWMKRFNPPADAWPQELAPIGHNRMYNMVPFFPPVTNEELFLTSDQLGYSYAIDLPVSVEETPGWPTTLLVVMGTLVALVGLFVLLAFLQYRRLRKGYTPLMETHLSSKRYTEEA

SEQ ID NO: 10116 - protein, 179 aa, Homo sapiens
MSSQKGNVARSRPQKHQNTFSFKNDKFDKSVQTKKINAKLHDGVCQRCKEVLEWRVKYSKYKPLSKPKKCVKCLQKTVKDSYHIMCRPCACELEVCAKCGKKEDIVIPWSLPLLPRLECSGRILAHHNLRLPCSSDSPASASRVAGTTGAHHHAQLIFVFLVEMGFHYVGQAGLELLTS

SEQ ID NO: 10117 - protein, 961 aa, Homo sapiens
MLLLLLLAPLFLRPPGAGGAQTPNATSEGCQIIHPPWEGGIRYRGLTRDQVKAINFLPVDYEIEYVCRGEREVVGPKVRKCLANGSWTDMDTPSRCVRICSKSYLTLENGKVFLTGGDLPALDGARVDFRCDPDFHLVGSSRSICSQGQWSTPKPHCQVNRTPHSERRAVYIGALFPMSGGWPGGQACQPAVEMALEDVNSRRDILPDYELKLIHHDSKCDPGQATKYLYELLYNDPIKIILMPGCSSVSTLVAEAARMWNLIVLSYGSSSPALSNRQRFPTFFRTHPSATLHNPTRVKLFEKWGWKKIATIQQTTEVFTSTLDDLEERVKEAGIEITFRQSFFSDPAVPVKNLKRQDARIIVGLFYETEARKVFCEVYKERLFGKKYVWFLIGWYADNWFKIYDPSINCTVDEMTEAVEGHITTEIVMLNPANTRSISNMTSQEFVEKLTKRLKRHPEETGGFQEAPLAYDAIWALALALNKTSGGGGRSGVRLEDFNYNNQTITDQIYRAMNSSSFEGVSGHVVFDASGSRMAWTLIEQLQGGSYKKIGYYDSTKDDLSWSKTDKWIGGSPPADQTLVIKTFRFLSQKLFISVSVLSSLGIVLAVVCLSFNIYNSHVRYIQNSQPNLNNLTAVGCSLALAAVFPLGLDGYHIGRNQFPFVCQARLWLLGLGFSLGYGSMFTKIWWVHTVFTKKEEKKEWRKTLEPWKLYATVGLLVGMDVLTLAIWQIVDPLHRTIETFAKEEPKEDIDVSILPQLEHCSSRKMNTWLGIFYGYKGLLLLLGIFLAYETKSVSTEKINDHRAVGMAIYNVAVLCLITAPVTMILSSQQDAAFAFASLAIVFSSYITLVVLFVPKMRRLITRGEWQSEAQDTMKTGSSTNNNEEEKSRLLEKENRELEKIIAEKEERVSELRHQLQSRQQLRSRRHPPTPPEPSGGLPRGPPEPPDRLSCDGSRVHLLYK

SEQ ID NO: 10118 - protein, 164 aa, Homo sapiens
MASHSGPSTSVLFLFCCLGGWLASHTLPVRLLRPSDDVQKIVEELQSLSKMLLKDVEEEKGVLVSQNYTLPCLSPDAQPPNNIHSPAIRAYLKTIRQLDNKSVIDEIIEHLDKLIFQDAPETNISVPTDTHECKRFILTISQQFSECMDLALKSLTSGAQQATT

SEQ ID NO: 10119 - protein, 268 aa, Homo sapiens
MEVTGDAGVPESGEIRTLKPCLLRRNYSREQHGVAASCLEDLRSKACDILAIDKSLTPVTLVLAEDGTIVDDDDYFLCLPSNTKFVALASNEKWAYNNSDGGTAWISQESFDVDETDSGAGLKWKNVARQLKEDLSSIILLSEEDLQMLVDAPCSDLAQELRQSCATVQRLQHTLQQVLDQREEVRQSKQLLQLYLQALEKEGSLLSKQEESKAAFGEEVDAVDTGISRETSSDVALASHILTALREKQAPELSLSSQDLEVGGNQGH

SEQ ID NO: 10120 - protein, 331 aa, Homo sapiens
MEVTGDAGVPESGEIRTLKPCLLRRNYSREQHGVAASCLEDLRSKACDILAIDKSLTPVTLVLAEDGTIVDDDDYFLCLPSNTKFVALASNEKWAYNNSDGGTAWISQESFDVDETDSGAGLKWKNVARQLKEDLSSIILLSEEDLQMLVDAPCSDLAQELRQSCATVQRLQHTLQQVLDQREEVRQSKQLLQLYLQALEKEGSLLSKQEESKAAFGEEVDAVDTGISRETSSDVALASHILTALREKQAPELSLSSQDLELVTKEDPKALAVALNWDIKKTETVQEACERELALRLQQTQSLHSLRSISASKASPPGDLQNPKRARQDPT

SEQ ID NO: 10121 - protein, 1383 aa, Homo sapiens
MYATDSRGHSPAFLQPQNGNSRHPSGYVPGKVVPLRPPPPPKSQASAKFTSIRREDRATFAFSPEEQQAQRESQKQKRHKNTFICFAITSFSFFIALAIILGISSKYAPDENCPDQNPRLRNWDPGQDSAKQVVIKEGDMLRLTSDATVHSIVIQDGGLLVFGDNKDGSRNITLRTHYILIQDGGALHIGAEKCRYKSKATITLYGKSDEGESMPTFGKKFIGVEAGGTLELHGARKASWTLLARTLNSSGLPFGSYTFEKDFSRGLNVRVIDQDTAKILESERFDTHEYRNESRRLQEFLRFQDPGRIVAIAVGDSAAKSLLQGTIQMIQERLGSELIQGLGYRQAWALVGVIDGGSTSCNESVRNYENHSSGGKALAQREFYTVDGQKFSVTAYSEWIEGVSLSGFRVEVVDGVKLNLLDDVSSWKPGDQIVVASTDYSMYQAEEFTLLPCSECSHFQVKVKETPQFLHMGEIIDGVDMRAEVGILTRNIVIQGEVEDSCYAENQCQFFDYDTFGGHIMIMKNFTSVHLSYVELKHMGQQQMGRYPVHFHLCGDVDYKGGYRHATFVDGLSIHHSFSRCITVHGTNGLLIKDTIGFDTLGHCFFLEDGIEQRNTLFHNLGLLTKPGTLLPTDRNNSMCTTMRDKVFGNYIPVPATDCMAVSTFWIAHPNNNLINNAAAGSQDAGIWYLFHKEPTGESSGLQLLAKPELTPLGIFYNNRVHSNFKAGLFIDKGVKTTNSSAADPREYLCLDNSARFRPHQDANPEKPRVAALIDRLIAFKNNDNGAWVRGGDIIVQNSAFADNGIGLTFASDGSFPSDEGSSQEVSESLFVGESRNYGFQGGQNKYVGTGGIDQKPRTLPRNRTFPIRGFQIYDGPIHLTRSTFKKYVPTPDRYSSAIGFLMKNSWQITPRNNISLVKFGPHVSLNVFFGKPGPWFEDCEMDGDKNSIFHDIDGSVTGYKDAYVGRMDNYLIRHPSCVNVSKWNAVICSGTYAQVYVQTWSTQNLSMTITRDEYPSNPMVLRGINQKAAFPQYQPVVMLEKGYTIHWNGPAPRTTFLYLVNFNKNDWIRVGLCYPSNTSFQVTFGYLQRQNGSLSKIEEYEPVHSLEELQRKQSERKFYFDSSTGLLFLYLKAKSHRHGHSYCSSQGCERVKIQAATDSKDISNCMAKAYPQYYRKPSVVKRMPAMLTGLCQGCGTRQVVFTSDPHKSYLPVQFQSPDKAETQRGDPSVISVNGTDFTFRSAGVLLLVVDPCSVPFRLTEKTVFPLADVSRIEEYLKTGIPPRSIVLLSTRGEIKQLNISHLLVPLGLAKPAHLYDKGSTIFLGFSGNFKPSWTKLFTSPAGQGLGVLEQFIPLQLDEYGCPRATTVRRRDLELLKQASKAH

SEQ ID NO: 10122 - protein, 606 aa, Homo sapiens [sequence omitted]

SEQ ID NO: 10123 - protein, 555 aa, Homo sapiens
MPSWIGAVILPLLGLLLSLPAGADVKARSCGEVRQAYGAKGFSLADIPYQEIAGEHLRICPQEYTCCTTEMEDKLSQQSKLEFENLVEETSHFVRTTFVSRHKKFDEFFRELLENAEKSLNDMFVRTYGMLYMQNSEVFQDLFTELKRYYTGGNVNLEEMLNDFWARLLERMFQLINPQYHFSEDYLECVSKYTDQLKPFGDVPRKLKIQVTRAFIAARTFVQGLTVGREVANRVSKVSPTPGCIRALMKMLYCPYCRGLPTVRPCNNYCLNVMKGCLANQADLDTEWNLFIDAMLLVAERLEGPFNIESVMDPIDVKISEAIMNMQENSMQVSAKVFQGCGQPKPAPALRSARSAPENFNTRFRPYNPEERPTTAAGTSLDRLVTDIKEKLKLSKKVWSALPYTICKDESVTAGTSNEEECWNGHSKARYLPEIMNDGLTNQINNPEVDVDITRPDTFIRQQIMALRVMTNKLKNAYNGNDVNFQDTSDESSGSGSGSGCMDDVCPTEFEFVTTEAPAVDPDRREVDSSAAQRGHSLLSWSLTCIVLALQRLCR

SEQ ID NO: 10124 - protein, 1320 aa, Homo sapiens
MYATDSRGHSPAFLQPQNGNSRHPSGYVPGKVVPLRPPPPPKSQASAKFTSIRREDRATFAFSPEEQQAQRESQKQKRHKNTFICFAITSFSFFIALAIILGISSKYAPDENCPDQNPRLRNWDPGQDSAKQVVIKEGDMLRLTSDATVHSIVIQDGGLLVFGDNKDGSRNITLRTHYILIQDGGALHIGAEKCRYKSKATITLYGKSDEGESMPTFGKKFIGVEAGGTLELHGARKASWTLLARTLNSSGLPFGSYTFEKDFSRGLNVRVIDQDTAKILESERFDTHEYRNESRRLQEFLRFQDPGRIVAIAVGDSAAKSLLQGTIQMIQERLGSELIQGLGYRQAWALVGVIDGGSTSCNESVRNYENHSSGGKALAQREFYTVDGQKFSVTAYSEWIEETPQFLHMGEIIDGVDMRAEVGILTRNIVIQGEVEDSCYAENQCQFFDYDTFGGHIMIMKNFTSVHLSYVELKHMGQQQMGRYPVHFHLCGDVDYKGGYRHATFVDGLSIHHSFSRCITVHGTNGLLIKDTIGFDTLGHCFFLEDGIEQRNTLFHNLGLLTKPGTLLPTDRNNSMCTTMRDKVFGNYIPVPATDCMAVSTFWIAHPNNNLINNAAAGSQDAGIWYLFHKEPTGESSGLQLLAKPELTPLGIFYNNRVHSNFKAGLFIDKGVKTTNSSAADPREYLCLDNSARFRPHQDANPEKPRVAALIDRLIAFKNNDNGAWVRGGDIIVQNSAFADNGIGLTFASDGSFPSDEGSSQEVSESLFVGESRNYGFQGGQNKYVGTGGIDQKPRTLPRNRTFPIRGFQIYDGPIHLTRSTFKKYVPTPDRYSSAIGFLMKNSWQITPRNNISLVKFGPHVSLNVFFGKPGPWFEDCEMDGDKNSIFHDIDGSVTGYKDAYVGRMDNYLIRHPSCVNVSKWNAVICSGTYAQVYVQTWSTQNLSMTITRDEYPSNPMVLRGINQKAAFPQYQPVVMLEKGYTIHWNGPAPRTTFLYLVNFNKNDWIRVGLCYPSNTSFQVTFGYLQRQNGSLSKIEEYEPVHSLEELQRKQSERKFYFDSSTGLLFLYLKAKSHRHGHSYCSSQGCERVKIQAATDSKDISNCMAKAYPQYYRKPSVVKRMPAMLTGLCQGCGTRQVVFTSDPHKSYLPVQFQSPDKAETQRGDPSVISVNGTDFTFRSAGVLLLVVDPCSVPFRLTEKTVFPLADVSRIEEYLKTGIPPRSIVLLSTRGEIKQLNISHLLVPLGLAKPAHLYDKGSTIFLGFSGNFKPSWTKLFTSPAGQGLGVLEQFIPLQLDEYGCPRATTVRRRDLELLKQASKAH

SEQ ID NO: 10125 - protein, 572 aa, Homo sapiens
MDAQTWPVGFRCLLLLALVGSARSEGVQTCEEVRKLFQWRLLGAVRGLPDSPRAGPDLQVCISKKPTCCTRKMEERYQIAARQDMQQFLQTSSSTLKFLISRNAAAFQETLETLIKQAENYTSILFCSTYRNMALEAAASVQEFFTDVGLYLFGADVNPEEFVNRFFDSLFPLVYNHLINPGVTDSSLEYSECIRMARRDVSPFGNIPQRVMGQMGRSLLPSRTFLQALNLGIEVINTTDYLHFSKECSRALLKMQYCPHCQGLALTKPCMGYCLNVMRGCLAHMAELNPHWHAYIRSLEELSDAMHGTYDIGHVLLNFHLLVNDAVLQAHLNGQKLLEQVNRICGRPVRTPTQSPRCSFDQSKEKHGMKTTTRNSEETLANRRKEFINSLRLYRSFYGGLADQLCANELAAADGLPCWNGEDIVKSYTQRVVGNGIKAQSGNPEVKVKGIDPVINQIIDKLKHVVQLLQGRSPKPDKWELLQLGSGGGMVEQVSGDCDDEDGCGGSGSGEVKRTLKITDWMPDDMNFSDVKQIHQTDTGSTLDTTGAGCAVATESMTFTLISVVMLLPGIW

SEQ ID NO: 10126 - protein, 1265 aa, Homo sapiens
MEAEKDSGRRLRPIDRQRYDENEDLSDVEEIVSVRGFSLEEKLRSQLYQGDFVHAMEGKDFNYEYVQREALRVPLIFREKDGLGIKMPDPDFTVRDVKLLVGSRRLVDVMDVNTQKGTEMSMSQFVRYYETPEAQRDKLYNVISLEFSHTKLEHLVKRPTVVDLVDWVDNMWPQHLKEKQTEATNAIAEMKYPKVKKYCLMSVKGCFTDFHIDFGGTSVWYHVFRGGKIFWLIPPTLHNLALYEEWVLSGKQSDIFLGDRVERCQRIELKQGYTFFIPSGWIHAVYTPVDSLVFGGNILHSFNVPMQLRIYEIEDRTRVQPKFRYPFYYEMCWYVLERYVYCVTQRSHLTQEYQRESMLIDAPRKPSIDGFSSDSWLEMEEEACDQQPQEEEEKDEEGEGRDRAPKPPTDGSTSPTSTPSEDQEALGKKPKAPALRFLKRTLSNESEESVKSTTLAVDYPKTPTGSPATEVSAKWTHLTEFELKGLKALVEKLESLPENKKCVPEGIEDPQALLEGVKNVLKEHADDDPSLAITGVPVVTWPKKTPKNRAVGRPKGKLGPASAVKLAANRTTAGARRRRTRCRKCEACLRTECGECHFCKDMKKFGGPGRMKQSCIMRQCIAPVLPHTAVCLVCGEAGKEDTVEEEEGKFNLMLMECSICNEIIHPGCLKIKESEGVVNDELPNCWECPKCNHAGKTGKQKRGPGFKYASNLPGSLLKEQKMNRDNKEGQEPAKRRSECEEAPRRRSDEHSKKVPPDGLLRRKSDDVHLRKKRKYEKPQELSGRKRLKPGKEDKLFRKKRRSWKNAEDRMALANKPLRRFKQEPEDELPEAPPKTRESDHSRSSSPTAGPSTEGAEGPEEKKKVKMRRKRRLPNKELSRELSKELNHEIQRTENSLANENQQPIKSEPESEGEEPKRPPGICERPHRFSKGLNGTPRELRHQLGPSLRSPPRVISRPPPSVSPPKCIQMERHVIRPPPISPPPDSLPLDDGAAHVMHREVWMAVFSYLSHQDLCVCMRVCRTWNRWCCDKRLWTRIDLNHCKSITPLMLSGIIRRQPVSLDLSWTNISKKQLSWLINRLPGLRDLVLSGCSWIAVSALCSSSCPLLRTLDVQWVEGLKDAQMRDLLSPPTDNRPGQMDNRSKLRNIVELRLAGLDITDASLRLIIRHMPLLSKLHLSYCNHVTDQSINLLTAVGTTTRDSLTEINLSDCNKVTDQCLSFFKRCGNICHIDLRYCKQVTKEGCEQFIAEMSSFQGRSCSTTRLGDE

SEQ ID NO: 10127 - protein, 1336 aa, Homo sapiens
MAGPQMGGSAEDHPPRKRHAAEKQKKKTVIYTKCFEFESATQRPIDRQRYDENEDLSDVEEIVSVRGFSLEEKLRSQLYQGDFVHAMEGKDFNYEYVQREALRVPLIFREKDGLGIKMPDPDFTVRDVKLLVGSRRLVDVMDVNTQKGTEMSMSQFVRYYETPEAQRDKLYNVISLEFSHTKLEHLVKRPTVVDLVDWVDNMWPQHLKEKQTEATNAIAEMKYPKVKKYCLMSVKGCFTDFHIDFGGTSVWYHVFRGGKIFWLIPPTLHNLALYEEWVLSGKQSDIFLGDRVERCQRIELKQGYTFFIPSGWIHAVYTPVDSLVFGGNILHSFNVPMQLRIYEIEDRTRVQPKFRYPFYYEMCWYVLERYVYCVTQRSHLTQEYQRESMLIDAPRKPSIDGFSSDSWLEMEEEACDQQPQEEEEKDEEGEGRDRAPKPPTDGSTSPTSTPSEDQEALGKKPKAPALRFLKRTLSNESEESVKSTTLAVDYPKTPTGSPATEVSAKWTHLTEFELKGLKALVEKLESLPENKKCVPEGIEDPQALLEGVKNVLKEHADDDPSLAITGVPVVTWPKKTPKNRAVGRPKGKLGPASAVKLAANRTTAGARRRRTRCRKCEACLRTECGECHFCKDMKKFGGPGRMKQSCIMRQCIAPVLPHTAVCLVCGEAGKEDTVEEEEGKFNLMLMECSICNEIIHPGCLKIKESEGVVNDELPNCWECPKCNHAGKTGKQKRGPGFKYASNLPGSLLKEQKMNRDNKEGQEPAKRRSECEEAPRRRSDEHSKKVPPDGLLRRKSDDVHLRKKRKYEKPQELSGRKRASSLQTSPGSSSHLSPRPPLGSSLSPWWRSSLTYFQQQLKPGKEDKLFRKKRRSWKNAEDRMALANKPLRRFKQEPEDELPEAPPKTRESDHSRSSSPTAGPSTEGAEGPEEKKKVKMRRKRRLPNKELSRELSKELNHEIQRTENSLANENQQPIKSEPESEGEEPKRPPGICERPHRFSKGLNGTPRELRHQLGPSLRSPPRVISRPPPSVSPPKCIQMERHVIRPPPISPPPDSLPLDDGAAHVMHREVWMAVFSYLSHQDLCVCMRVCRTWNRWCCDKRLWTRIDLNHCKSITPLMLSGIIRRQPVSLDLSWTNISKKQLSWLINRLPGLRDLVLSGCSWIAVSALCSSSCPLLRTLDVQWVEGLKDAQMRDLLSPPTDNRPGQMDNRSKLRNIVELRLAGLDITDASLRLIIRHMPLLSKLHLSYCNHVTDQSINLLTAVGTTTRDSLTEINLSDCNKVTDQCLSFFKRCGNICHIDLRYCKQVTKEGCEQFIAEMSVSVQFGQVEEKLLQKLS

SEQ ID NO: 10128 - protein, 1027 aa, Homo sapiens
MVSSDRPVSLEDEVSHSMKEMIGGCCVCSDERGWAENPLVYCDGHGCSVAVHQACYGIVQVPTGPWFCRKCESQERAARVRCELCPHKDGALKRTDNGGWAHVVCALYIPEVQFANVSTMEPIVLQSVPHDRYNKTCYICDEQGRESKAATGACMTCNKHGCRQAFHVTCAQFAGLLCEEEGNGADNVQYCGYCKYHFSKLKKSKRGSNRSYDQSLSDSSSHSQDKHHEKEKKKYKEKDKHKQKHKKQPEPSPALVPSLTVTTEKTYTSTSNNSISGSLKRLEDTTARFTNANFQEVSAHTSSGKDVSETRGSEGKGKKSSAHSSGQRGRKPGGGRNPGTTVSAASPFPQGSFSGTPGSVKSSSGSSVQSPQDFLSFTDSDLRNDSYSHSQQSSATKDVHKGESGSQEGGVNSFSTLIGLPSTSAVTSQPKSFENSPGDLGNSSLPTAGYKRAQTSGIEEETVKEKKRKGNKQSKHGPGRPKGNKNQENVSHLSVSSASPTSSVASAAGSITSSSLQKSPTLLRNGSLQSLSVGSSPVGSEISMQYRHDGACPTTTFSELLNAIHNDRGDSSTLTKQELKFIGIYNSNDVAVSFPNVVSGSGSSTPVSSSHLPQQSSGHLQQVGALSPSAVSSAAPAVATTQANTLSGSSLSQAPSHMYGNRSNSSMAALIAQSENNQTDQDLGDNSRNLVGRGSSPRGSLSPRSPVSSLQIRYDQPGNSSLENLPPVAASIEQLLERQWSEGQQFLLEQGTPSDILGMLKSLHQLQVENRRLEEQIKNLTAKKERLQLLNAQLSVPFPTITANPSPSHQIHTFSAQTAPTTDSLNSSKSPHIGNSFLPDNSLPVLNQDLTSSGQSTSSSSALSTPPPAGQSPAQQGSGVSGVQQVNGVTVGALASGMQPVTSTIPAVSAVGGIIGALPGNQLAINGIVGALNGVMQTPVTMSQNPTPLTHTTVPPNATHPMPATLTNSASGLGLLSDQQRQILIHQQQFQQLLNSQQLTPVHRHPHFTQLPPTHFSPSMEIMQVRK

SEQ ID NO: 10129 - protein, 775 aa, Homo sapiens
MAPVGGGGRPVGGPARGRLLLAAPVLLVLLWALGARGQGSPQQGTIVGMRLASCNKSCGTNPDGIIFVSEGSTVNLRLYGYSLGNISSNLISFTEVDDAETLHKSTSCLELTKDLVVQQLVNVSRGNTSGVLVVLTKFLRRSESMKLYALCTRAQPDGPWLKWTDKDSLLFMVEEPGRFLPLWLHILLITVLLVLSGIFSGLNLGLMALDPMELRIVQNCGTEKERRYARKIEPIRRKGNYLLCSLLLGNVLVNTSLTILLDNLIGSGLMAVASSTIGIVIFGEILPQALCSRHGLAVGANTILLTKFFMLLTFPLSFPISKLLDFFLGQEIRTVYNREKLMEMLKVTEPYNDLVKEELNMIQGALELRTKTVEDIMTQLQDCFMIRSDAILDFNTMSEIMESGYTRIPVFEDEQSNIVDILYVKDLAFVDPDDCTPLKTITRFYNHPVHFVFHDTKLDAMLEEFKKGKSHLAIVQKVNNEGEGDPFYEVLGLVTLEDVIEEIIKSEILDESDMYTDNRSRKRVSEKNKRDFSAFKDADNELKVKISPQLLLAAHRFLATEVSQFSPSLISEKILLRLLKYPDVIQELKFDEHNKYYARHYLYTRNKPADYFILILQGKVEVEAGKENMKFETGAFSYYGTMALTSVPSDRSPAHPTPLSRSASLSYPDRTDVSTAATLAGSSNQFGSSVLGQYISDFSVRALVDLQYIKITRQQYQNGLLASRMENSPQFPIDGCTTHMENLAEKSELPVVDETTTLLNERNSLLHKASHENAI

SEQ ID NO: 10130 - protein, 359 aa, Homo sapiens
MAATLGPLGSWQQWRRCLSARDGSRMLLLLLLLGSGQGPQQVGAGQTFEYLKREHSLSKPYQGVGTGSSSLWNLMGNAMVMTQYIRLTPDMQSKQGALWNRVPCFLRDWELQVHFKIHGQGKKNLHGDGLAIWYTKDRMQPGPVFGNMDKFVGLGVFVDTYPNEEKQQEAQKRRYSPGVQRVFPYISAMVNNGSLSYDHERDGRPTELGGCTAIVRNLHYDTFLVIRYVKRHLTIMMDIDGKHEWRDCIEVPGVRLPRGYYFGTSSITGDLSDNHDVISLKLFELTVERTPEEEKLHRDVFLPSVDNMKLPEMTAPLPPLSGLALFLIVFFSLVFSVFAIVIGIILYNKWQEQSRKRFY

SEQ ID NO: 10131 - protein, 958 aa, Homo sapiens
MHTCCPPVTLEQDLHRKMHSWMLQTLAFAVTSLVLSCAETIDYYGEICDNACPCEEKDGILTVSCENRGIISLSEISPPRFPIYHLLLSGNLLNRLYPNEFVNYTGASILHLGSNVIQDIETGAFHGLRGLRRLHLNNNKLELLRDDTFLGLENLEYLQVDYNYISVIEPNAFGKLHLLQVLILNDNLLSSLPNNLFRFVPLTHLDLRGNRLKLLPYVGLLQHMDKVVELQLEENPWNCSCELISLKDWLDSISYSALVGDVVCETPFRLHGRDLDEVSKQELCPRRLISDYEMRPQTPLSTTGYLHTTPASVNSVATSSSAVYKPPLKPPKGTRQPNKPRVRPTSRQPSKDLGYSNYGPSIAYQTKSPVPLECPTACSCNLQISDLGLNVNCQERKIESIAELQPKPYNPKKMYLTENYIAVVRRTDFLEATGLDLLHLGNNRISMIQDRAFGDLTNLRRLYLNGNRIERLSPELFYGLQSLQYLFLQYNLIREIQSGTFDPVPNLQLLFLNNNLLQAMPSGVFSGLTLLRLNLRSNHFTSLPVSGVLDQLKSLIQIDLHDNPWDCTCDIVGMKLWVEQLKVGVLVDEVICKAPKKFAETDMRSIKSELLCPDYSDVVVSTPTPSSIQVPARTSAVTPAVRLNSTGAPASLGAGGGASSVPLSVLILSLLLVFIMSVFVAAGLFVLVMKRRKKNQSDHTSTNNSDVSSFNMQYSVYGGGGGTGGHPHAHVHHRGPALPKVKTPAGHVYEYIPHPLGHMCKNPIYRSREGNSVEDYKDLHELKVTYSSNHHLQQQQQPPPPPQQPQQQPPPQLQLQPGEEERRESHHLRSPAYSVSTIEPREDLLSPVQDADRFYRGILEPDKHCSTTPAGNSLPEYPKFPCSPAAYTFSPNYDLRRPHQYLHPGAGDSRLREPVLYSPPSAVFVEPNRNEYLELKAKLNVEPDYLEVLEKQTTFSQF

SEQ ID NO: 10132 - protein, 1823 aa, Homo sapiens
MSGASVKVAVRVRPFNSRETSKESKCIIQMQGNSTSIINPKNPKEAPKSFSFDYSYWSHTSPEDPCFASQNRVYNDIGKEMLLHAFEGYNVCIFAYGQTGAGKSYTMMGKQEESQAGIIPQLCEELFEKINDNCNEEMSYSVEVSYMEIYCERVRDLLNPKNKGNLRVREHPLLGPYVEDLSKLAVTSYTDIADLMDAGNKARTVAATNMNETSSRSHAVFTIVFTQKKHDNETNLSTEKVSKISLVDLAGSERADSTGAKGTRLKEGANINKSLTTLGKVISALAEVDNCTSKSKKKKKTDFIPYRDSVLTWLLRENLGGNSRTAMVAALSPADINYDETLSTLRYADRAKQIKCNAVINEDPNAKLVRELKEEVTRLKDLLRAQGLGDIIDIDPLIDDYSGSGSKYLKDFQNNKHRYLLASENQRPGHFSTASMGSLTSSPSSCSLSSQVGLTSVTSIQERIMSTPGGEEAIERLKESEKIIAELNETWEEKLRKTEAIRMEREALLAEMGVAIREDGGTLGVFSPKKTPHLVNLNEDPLMSECLLYYIKDGITRVGQADAERRQDIVLSGAHIKEEHCIFRSERSNSGEVIVTLEPCERSETYVNGKRVSQPVQLRSGNRIIMGKNHVFRFNHPEQARAEREKTPSAETPSEPVDWTFAQRELLEKQGIDMKQEMEKRLQEMEILYKKEKEEADLLLEQQRLDYESKLQALQKQVETRSLAAETTEEEEEEEEVPWTQHEFELAQWAFRKWKSHQFTSLRDLLWGNAVYLKEANAISVELKKKVQFQFVLLTDTLYSPLPPELLPTEMEKTHEDRPFPRTVVAVEVQDLKNGATHYWSLEKLKQRLDLMREMYDRAGEMASSAQDESETTVTGSDPFYDRFHWFKLVGSSPIFHGCVNERLADRTPSPTFSTADSDITELADEQQDEMEDFDDEAFVDDAGSDAGTEEGSDLFSDGHDPFYDRSPWFILVGRAFVYLSNLLYPVPLIHRVAIVSEKGEVRGFLRVAVQAIAADEEAPDYGSGIRQSGTAKISFDNEYFNQSDFSSVAMTRSGLSLEELRIVEGQGQSSEVITPPEEISRINDLDLKSSTLLDGKMVMEGFSEEIGNHLKLGSAFTFRVTVLQASGILPEYADIFCQFNFLHRHDEAFSTEPLKNNGRGSPLAFYHVQNIAVEITESFVDYIKTKPIVFEVFGHYQQHPLHLQGQELNSPPQPCRRFFPPPMPLSKPVPATKLNTMSKTSLGQSMSKYDLLVWFEISELEPTGEYIPAVVDHTAGLPCQGTFLLHQGIQRRITVTIIHEKGSELHWKDVRELVVGRIRNKPEVDEAAVDAILSLNIISAKYLKSSHNSSRTFYRFEAVWDSSLHNSLLLNRVTPYGEKIYMTLSAYLELDHCIQPAVITKDVCMVFYSRDAKISPPRSLRSLFGSGYSKSPDSNRVTGIYELSLCKMSDTGSPGMQRRRRKILDTSVAYVRGEENLAGWRPRGDSLILEHQWELEKLELLHEVEKTRHFLLLRERLGDSIPKSLSDSLSPSLSSGTLSTSTSISSQISTTTFESAITPSESSGYDSGDIESLVDREKELATKCLQLLTHTFNREFSQVHGSVSDCKLSDISPIGRDPSESSFSSATLTPSSTCPSLVDSRSNSLDQKTPEANSRASSPCPEFEQFQIVPAVETPYLARAGKNEFLNLVPDIEEIRPSSVVSKKGYLHFKEPLYSNWAKHFVVVRRPYVFIYNSDKDPVERGIINLSTAQVEYSEDQQAMVKTPNTFAVCTKHRGVLLQALNDKDMNDWLYAFNPLLAGTIRPGHLASEIIREDKSVSFSCQ

SEQ ID NO: 10133 - protein, 1153 aa, Homo sapiens
MSGASVKVAVRVRPFNSRETSKESKCIIQMQGNSTSIINPKNPKEAPKSFSFDYSYWSHTSPEDPCFASQNRVYNDIGKEMLLHAFEGYNVCIFAYGQTGAGKSYTMMGKQEESQAGIIPQLCEELFEKINDNCNEEMSYSVEVSYMEIYCERVRDLLNPKNKGNLRVREHPLLGPYVEDLSKLAVTSYTDIADLMDAGNKARTVAATNMNETSSRSHAVFTIVFTQKKHDNETNLSTEKVSKISLVDLAGSERADSTGAKGTRLKEGANINKSLTTLGKVISALAEVSKKKKKTDFIPYRDSVLTWLLRENLGGNSRTAMVAALSPADINYDETLSTLRYADRAKQIKCNAVINEDPNAKLVRELKEEVTRLKDLLRAQGLGDIIDTSMGSLTSSPSSCSLSSQVGLTSVTSIQERIMSTPGGEEAIERLKESEKIIAELNETWEEKLRKTEAIRMEREALLAEMGVAIREDGGTLGVFSPKKTPHLVNLNEDPLMSECLLYYIKDGITRVGQADAERRQDIVLSGAHIKEEHCIFRSERSNSGEVIVTLEPCERSETYVNGKRVSQPVQLRSGNRIIMGKNHVFRFNHPEQARAEREKTPSAETPSEPVDWTFAQRELLEKQGIDMKQEMEKRLQEMEILYKKEKEEADLLLEQQRLDADSDSGDDSDKRSCEESWKLITSLREKLPPSKLQTIVKKCGLPSSGKKREPIKMYQIPQRRRLSKDSKWVTISDLKIQAVKEICYEVALNDFRHSRQEIEALAIVKMKELCAMYGKKDPNERDSWRAVARDVWDTVGVGDEKIEDVMATGKGSTDVDDLKVHIDKLEDILQEVKKQNNMKDEEIKVLRNKMLKMEKVLPLIGSQEQKSPGSHKAKEPVGAGVSSTSENNVSKGDNGELAKEERVSQLMNGDPAFRRGRLRWMRQEQIRFKNLQQQEITKQLRRQNVPHRFIPPENRKPRFPFKSNPKHRNSWSPGTHIIITEDEVIELRIPKDDEARKGNKEESQEKGGKGAFKDPQFPWGSQGMRSQDHIQVSKQHINNQQQPPQLRWRSNSLNNGQPKSTRCQASASAESLNSHSGHPTADVQTFQAKRHIHQHRQSYCNYNTGGQLEGNAATSYQKQTDKPSHCSQFVTPPRMRRQFSAPNLKAGRETTV

SEQ ID NO: 10134 - protein, 696 aa, Homo sapiens
MLLWILLLETSLCFAAGNVTGDVCKEKICSCNEIEGDLHVDCEKKGFTSLQRFTAPTSQFYHLFLHGNSLTRLFPNEFANFYNAVSLHMENNGLHEIVPGAFLGLQLVKRLHINNNKIKSFRKQTFLGLDDLEYLQADFNLLRDIDPGAFQDLNKLEVLILNDNLISTLPANVFQYVPITHLDLRGNRLKTLPYEEVLEQIPGIAEILLEDNPWDCTCDLLSLKEWLENIPKNALIGRVVCEAPTRLQGKDLNETTEQDLCPLKNRVDSSLPAPPAQEETFAPGPLPTPFKTNGQEDHATPGSAPNGGTKIPGNWQIKIRPTAAIATGSSRNKPLANSLPCPGGCSCDHIPGSGLKMNCNNRNVSSLADLKPKLSNVQELFLRDNKIHSIRKSHFVDYKNLILLDLGNNNIATVENNTFKNLLDLRWLYMDSNYLDTLSREKFAGLQNLEYLNVEYNAIQLILPGTFNAMPKLRILILNNNLLRSLPVDVFAGVSLSKLSLHNNYFMYLPVAGVLDQLTSIIQIDLHGNPWECSCTIVPFKQWAERLGSEVLMSDLKCETPVNFFRKDFMLLSNDEICPQLYARISPTLTSHSKNSTGLAETGTHSNSYLDTSRVSISVLVPGLLLVFVTSAFTVVGMLVFILRNRKRSKRRDANSSASEINSLQTVCDSSYWHNGPYNADGAHRVYDCGSHSLSD

SEQ ID NO: 10135 - protein, 1816 aa, Homo sapiens
MSGASVKVAVRVRPFNSRETSKESKCIIQMQGNSTSIINPKNPKEAPKSFSFDYSYWSHTSPEDPCFASQNRVYNDIGKEMLLHAFEGYNVCIFAYGQTGAGKSYTMMGKQEESQAGIIPQLCEELFEKINDNCNEEMSYSVEVSYMEIYCERVRDLLNPKNKGNLRVREHPLLGPYVEDLSKLAVTSYTDIADLMDAGNKARTVAATNMNETSSRSHAVFTIVFTQKKHDNETNLSTEKVSKISLVDLAGSERADSTGAKGTRLKEGANINKSLTTLGKVISALAEVDNCTSKSKKKKKTDFIPYRDSVLTWLLRENLGGNSRTAMVAALSPADINYDETLSTLRYADRAKQIKCNAVINEDPNAKLVRELKEEVTRLKDLLRAQGLGDIIDIDPLIDDYSGSGSKYLKDFQNNKHRYLLASENQRPGHFSTASMGSLTSSPSSCSLSSQVGLTSVTSIQERIMSTPGGEEAIERLKESEKIIAELNETWEEKLRKTEAIRMEREALLAEMGVAIREDGGTLGVFSPKKTPHLVNLNEDPLMSECLLYYIKDGITRVGQADAERRQDIVLSGAHIKEEHCIFRSERSNSGEVIVTLEPCERSETYVNGKRVSQPVQLRSGNRIIMGKNHVFRFNHPEQARAEREKTPSAETPSEPVDWTFAQRELLEKQGIDMKQEMEKRLQEMEILYKKEKEEADLLLEQQRLDYESKLQALQKQVETRSLAAETTEEEEEEEEVPWTQHEFELAQWAFRKWKSHQFTSLRDLLWGNAVYLKEANAISVELKKKVQFQFVLLTDTLYSPLPPELLPTEMEKTHEDRPFPRTVVAVEVQDLKNGATHYWSLEKLKQRLDLMREMYDRAGEMASSAQDESETTVTGSDPFYDRFHWFKLVGSSPIFHGCVNERLADRTPSPTFSTADSDITELADEQQDEMEDFDDEAFVDDAGSDAGTEEGSDLFSDGHDPFYDRSPWFILVGRAFVYLSNLLYPVPLIHRVAIVSEKGEVRGFLRVAVQAIAADEEAPDYGSGIRQSGTAKISFDNEYFNQSDFSSVAMTRSGLSLEELRIVEGQGQSSEVITPPEEISRINDLDLKSSTLLDGKMVMEGFSEEIGNHLKLGSAFTFRVTVLQASGILPEYADIFCQFNFLHRHDEAFSTEPLKNNGRGSPLAFYHVQNIAVEITESFVDYIKTKPIVFEVFGHYQQHPLHLQGQELNSPPQPCRRFFPPPMPLSKPVPATKLNTMSKTSLGQSMSKYDLLVWFEISELEPTGEYIPAVVDHTAGLPCQGTFLLHQGIQRRITVTIIHEKGSELHWKDVRELVVGRIRNKPEVDEAAVDAILSLNIISAKYLKSSHNSSRTFYRFEAVWDSSLHNSLLLNRVTPYGEKIYMTLSAYLELDHCIQPAVITKDVCMVFYSRDAKISPPRSLRSLFGSGYSKSPDSNRVTGIYELSLCKMSDTGSPGMQRRRRKILDTSVAYVRGEENLAGWRPRGDSLILEHQWELEKLELLHEVEKTRHFLLLRERLGDSIPKSLSDSLSPSLSSGTLSTSTSISSQISTTTFESAITPSESSGYDSGDIESLVDREKELATKCLQLLTHTFNREFSQVHGSVSDCKLSDISPIGRDPSESSFSSATLTPSSTCPSLVDSRSNSLDQKTPEANSRASSPCPEFEQFQIVPAVETPYLARAGKNEFLNLVPDIEEIRPSSVVSKKGYLHFKEPLYSNWAKHFVVVRRPYVFIYNSDKDPVERGIINLSTAQVEYSEDQQAMVKTPNTFAVCTKHRGVLLQALNDKDMNDWLYAFNPLLAGTIRSKLSRRCPSQSKY

SEQ ID NO: 10136 - protein, 323 aa, Homo sapiens
MYVRVSFDTKPDLLLHLMTKEWQLELPKLLISVHGGLQNFELQPKLKQVFGKGLIKAAMTTGAWIFTGGVNTGVIRHVGDALKDHASKSRGKICTIGIAPWGIVENQEDLIGRDVVRPYQTMSNPMSKLTVLNSMHSHFILADNGTTGKYGAEVKLRRQLEKHISLQKINTRIGQGVPVVALIVEGGPNVISIVLEYLRDTPPVPVVVCDGSGRASDILAFGHKYSEEGGLINESLRDQLLVTIQKTFTYTRTQAQHLFIILMECMKKKELVGNSAWVASCLHIFSHFLESHNIFSNHATFSLSGRAYSSPQAPLAPVASSPK

SEQ ID NO: 10137 - protein, 1566 aa, Homo sapiens
MYVRVSFDTKPDLLLHLMTKEWQLELPKLLISVHGGLQNFELQPKLKQVFGKGLIKAAMTTGAWIFTGGVNTGVIRHVGDALKDHASKSRGKICTIGIAPWGIVENQEDLIGRDVVRPYQTMSNPMSKLTVLNSMHSHFILADNGTTGKYGAEVKLRRQLEKHISLQKINTRIGQGVPVVALIVEGGPNVISIVLEYLRDTPPVPVVVCDGSGRASDILAFGHKYSEEGGLINESLRDQLLVTIQKTFTYTRTQAQHLFIILMECMKKKELITVFRMGSEGHQDIDLAILTALLKGANASAPDQLSLALAWNRVDIARSQIFIYGQQWPVGSLEQAMLDALVLDRVDFVKLLIENGVSMHRFLTISRLEELYNTRHGPSNTLYHLVRDVKKREYPGFGWIYFKGNLPPDYRISLIDIGLVIEYLMGGAYRCNYTRKRFRTLYHNLFGPKRPKALKLLGMEDDIPLRRGRKTTKKREEEVDIDLDDPEINHFPFPFHELMVWAVLMKRQKMALFFWQHGEEAMAKALVACKLCKAMAHEASENDMVDDISQELNHNSRDFGQLAVELLDQSYKQDEQLAMKLLTYELKNWSNATCLQLAVAAKHRDFIAHTCSQMLLTDMWMGRLRMRKNSGLKVILGILLPPSILSLEFKNKDDMPYMSQAQEIHLQEKEAEEPEKPTKEKEEEDMELTAMLGRNNGESSRKKDEEEVQSKHRLIPLGRKIYEFYNAPIVKFWFYTLAYIGYLMLFNYIVLVKMERWPSTQEWIVISYIFTLGIEKMREILMSEPGKLLQKVKVWLQEYWNVTDLIAILLFSVGMILRLQDQPFRSDGRVIYCVNIIYWYIRLLDIFGVNKYLGPYVMMIGKMMIDMMYFVIIMLVVLMSFGVARQAILFPNEEPSWKLAKNIFYMPYWMIYGEVFADQIDPPCGQNETREDGKIIQLPPCKTGAWIVPAIMACYLLVANILLVNLLIAVFNNTFFEVKSISNQVWKFQRYQLIMTFHERPVLPPPLIIFSHMTMIFQHLCCRWRKHESDPDERDYGLKLFITDDELKKVHDFEEQCIEEYFREKDDRFNSSNDERIRVTSERVENMSMRLEEVNEREHSMKASLQTVDIRLAQLEDLIGRMATALERLTGLERAESNKIRSRTSSDCTDAAYIVRQSSFNSQEGNTFKLQESIDPAGEETMSPTSPTLMPRMRSHSFYSVNMKDKGGIEKLESIFKERSLSLHRATSSHSVAKEPKAPAAPANTLAIVPDSRRPSSCIDIYVSAMDELHCDIDPLDNSVNILGLGEPSFSTPVPSTAPSSSAYATLAPTDRPPSRSIDFEDITSMDTRSFSSDYTHLPECQNPWDSEPPMYHTIERSKSSRYLATTPFLLEEAPIVKSHSFMFSPSRSYYANFGVPVKTAEYTSITDCIDTRCVNAPQAIADRAAFPGGLGDKVEDLTCCHPEREAELSHPSSDSEENEAKGRRATIAISSQEGDNSERTLSNNITVPKIERANSYSAEEPSAPYAHTRKSFSISDKLDRQRNTASLRNPFQRSKSSKPEGRGDSLSMRRLSRTSAFQSFESKHN

SEQ ID NO: 10138 - protein, 920 aa, Homo sapiens
MATVAANPAAAAAAVAAAAAVTEDREPQHEELPGLDSQWRQIENGESGRERPLRAGESWFLVEKHWYKQWEAYVQGGDQDSSTFPGCINNATLFQDEINWRLKEGLVEGEDYVLLPAAAWHYLVSWYGLEHGQPPIERKVIELPNIQKVEVYPVELLLVRHNDLGKSHTVQFSHTDSIGLVLRTARERFLVEPQEDTRLWAKNSEGSLDRLYDTHITVLDAALETGQLIIMETRKKDGTWPSAQLHVMNNNMSEEDEDFKGQPGICGLTNLGNTCFMNSALQCLSNVPQLTEYFLNNCYLEELNFRNPLGMKGEIAEAYADLVKQAWSGHHRSIVPHVFKNKVGHFASQFLGYQQHDSQELLSFLLDGLHEDLNRVKKKEYVELCDAAGRPDQEVAQEAWQNHKRRNDSVIVDTFHGLFKSTLVCPDCGNVSVTFDPFCYLSVPLPISHKRVLEVFFIPMDPRRKPEQHRLVVPKKGKISDLCVALSKHTGISPERMMVADVFSHRFYKLYQLEEPLSSILDRDDIFVYEVSGRIEAIEGSREDIVVPVYLRERTPARDYNNSYYGLMLFGHPLLVSVPRDRFTWEGLYNVLMYRLSRYVTKPNSDDEDDGDEKEDDEEDKDDVPGPSTGGSLRDPEPEQAGPSSGVTNRCPFLLDNCLGTSQWPPRRRRKQLFTLQTVNSNGTSDRTTSPEEVHAQPYIAIDWEPEMKKRYYDEVEAEGYVKHDCVGYVMKKAPVRLQECIELFTTVETLEKENPWYCPSCKQHQLATKKLDLWMLPEILIIHLKRFSYTKFSREKLDTLVEFPIRDLDFSEFVIQPQNESNPELYKYDLIAVSNHYGGMRDGHYTTFACNKDSGQWHYFDDNSVSPVNENQIESKAAYVLFYQRQDVARRLLSPAGSSGAPASPACSSPPSSEFMDVN

SEQ ID NO: 10139 - protein, 1707 aa, Homo sapiens
MPEPWGTVYFLGIAQVFSFLFSWWNLEGVMNQADAPRPLNWTIRKLCHAAFLPSVRLLKAQKSWIERAFYKRECVHIIPSTKDPHRCCCGRLIGQHVGLTPSISVLQNEKNESRLSRNDIQSEKWSISKHTQLSPTDAFGTIEFQGGGHSNKAMYVRVSFDTKPDLLLHLMTKEWQLELPKLLISVHGGLQNFELQPKLKQVFGKGLIKAAMTTGAWIFTGGVNTGVIRHVGDALKDHASKSRGKICTIGIAPWGIVENQEDLIGRDVVRPYQTMSNPMSKLTVLNSMHSHFILADNGTTGKYGAEVKLRRQLEKHISLQKINTRIGQGVPVVALIVEGGPNVISIVLEYLRDTPPVPVVVCDGSGRASDILAFGHKYSEEGGLINESLRDQLLVTIQKTFTYTRTQAQHLFIILMECMKKKELITVFRMGSEGHQDIDLAILTALLKGANASAPDQLSLALAWNRVDIARSQIFIYGQQWPVGSLEQAMLDALVLDRVDFVKLLIENGVSMHRFLTISRLEELYNTRHGPSNTLYHLVRDVKKGNLPPDYRISLIDIGLVIEYLMGGAYRCNYTRKRFRTLYHNLFGPKRPKALKLLGMEDDIPLRRGRKTTKKREEEVDIDLDDPEINHFPFPFHELMVWAVLMKRQKMALFFWQHGEEAMAKALVACKLCKAMAHEASENDMVDDISQELNHNSRDFGQLAVELLDQSYKQDEQLAMKLLTYELKNWSNATCLQLAVAAKHRDFIAHTCSQMLLTDMWMGRLRMRKNSGLKVILGILLPPSILSLEFKNKDDMPYMSQAQEIHLQEKEAEEPEKPTKEKEEEDMELTAMLGRNNGESSRKKDEEEVQSKHRLIPLGRKIYEFYNAPIVKFWFYTLAYIGYLMLFNYIVLVKMERWPSTQEWIVISYIFTLGIEKMREILMSEPGKLLQKVKVWLQEYWNVTDLIAILLFSVGMILRLQDQPFRSDGRVIYCVNIIYWYIRLLDIFGVNKYLGPYVMMIGKMMIDMMYFVIIMLVVLMSFGVARQAILFPNEEPSWKLAKNIFYMPYWMIYGEVFADQIDPPCGQNETREDGKIIQLPPCKTGAWIVPAIMACYLLVANILLVNLLIAVFNNTFFEVKSISNQVWKFQRYQLIMTFHERPVLPPPLIIFSHMTMIFQHLCCRWRKHESDPDERDYGLKLFITDDELKKVHDFEEQCIEEYFREKDDRFNSSNDERIRVTSERVENMSMRLEEVNEREHSMKASLQTVDIRLAQLEDLIGRMATALERLTGLERAESNKIRSRTSSDCTDAAYIVRQSSFNSQEGNTFKLQESIDPAGEETMSPTSPTLMPRMRSHSFYSVNMKDKGGIEKLESIFKERSLSLHRATSSHSVAKEPKAPAAPANTLAIVPDSRRPSSCIDIYVSAMDELHCDIDPLDNSVNILGLGEPSFSTPVPSTAPSSSAYATLAPTDRPPSRSIDFEDITSMDTRSFSSDYTHLPECQNPWDSEPPMYHTIERSKSSRYLATTPFLLEEAPIVKSHSFMFSPSRSYYANFGVPVKTAEYTSITDCIDTRCVNAPQAIADRAAFPGGLGDKVEDLTCCHPEREAELSHPSSDSEENEAKGRRATIAISSQEGDNSERTLSNNITVPKIERANSYSAEEPSAPYAHTRKSFSISDKLDRQRNTASLRNPFQRSKSSKPEGRGDSLSMRRLSRTSAFQSFESKHN

SEQ ID NO: 10140 - protein, 1325 aa, Homo sapiens
MPEPWGTVYFLGIAQVFSFLFSWWNLEGVMNQADAPRPLNWTIRKLCHAAFLPSVRLLKAQKSWIERAFYKRECVHIIPSTKDPHRCCCGRLIGQHVGLTPSISVLQNEKNESRLSRNDIQSEKWSISKHTQLSPTDAFGTIEFQGGGHSNKAMYVRVSFDTKPDLLLHLMTKEWQLELPKLLISVHGGLQNFELQPKLKQVFGKGLIKAAMTTGAWIFTGGVNTGVIRHVGDALKDHASKSRGKICTIGIAPWGIVENQEDLIGRDVVRPYQTMSNPMSKLTVLNSMHSHFILADNGTTGKYGAEVKLRRQLEKHISLQKINTRIGQGVPVVALIVEGGPNVISIVLEYLRDTPPVPVVVCDGSGRASDILAFGHKYSEEGGLINESLRDQLLVTIQKTFTYTRTQAQHLFIILMECMKKKELITVFRMGSEGHQDIDLAILTALLKGANASAPDQLSLALAWNRVDIARSQIFIYGQQWPVGSLEQAMLDALVLDRVDFVKLLIENGVSMHRFLTISRLEELYNTRHGPSNTLYHLVRDVKKGNLPPDYRISLIDIGLVIEYLMGGAYRCNYTRKRFRTLYHNLFGPKRPKALKLLGMEDDIPLRRGRKTTKKREEEVDIDLDDPEINHFPFPFHELMVWAVLMKRQKMALFFWQHGEEAMAKALVACKLCKAMAHEASENDMVDDISQELNHNSRDFGQLAVELLDQSYKQDEQLAMKLLTYELKNWSNATCLQLAVAAKHRDFIAHTCSQMLLTDMWMGRLRMRKNSGLKVILGILLPPSILSLEFKNKDDMPYMSQAQEIHLQEKEAEEPEKPTKEKEEEDMELTAMLGRNNGESSRKKDEEEVQSKHRLIPLGRKIYEFYNAPIVKFWFYTLAYIGYLMLFNYIVLVKMERWPSTQEWIVISYIFTLGIEKMREILMSEPGKLLQKVKVWLQEYWNVTDLIAILLFSVGMILRLQDQPFRSDGRVIYCVNIIYWYIRLLDIFGVNKYLGPYVMMIGKMMIDMMYFVIIMLVVLMSFGVARQAILFPNEEPSWKLAKNIFYMPYWMIYGEVFADQIDPPCGQNETREDGKIIQLPPCKTGAWIVPAIMACYLLVANILLVNLLIAVFNNTFFEVKSISNQVWKFQRYQLIMTFHERPVLPPPLIIFSHMTMIFQHLCCRWRKHESDPDERDYGLKLFITDDELKKVHDFEEQCIEEYFREKDDRFNSSNDERIRVTSERVENMSMRLEEVNEREHSMKASLQTVDIRLAQLEDLIGRMATALERLTGLERAESNKIRSRTSSDCTDAAYIVRQSSFNSQEGNTFKLQESIDPAEHPLYSV

SEQ ID NO: 10141 - protein, 457 aa, Homo sapiens
MLGAVKMEGHEPSDWSSYYAEPEGYSSVSNMNAGLGMNGMNTYMSMSAAAMGSGSGNMSAGSMNMSSYVGAGMSPSLAGMSPGAGAMAGMGGSAGAAGVAGMGPHLSPSLSPLGGQAAGAMGGLAPYANMNSMSPMYGQAGLSRARDPKTYRRSYTHAKPPYSYISLITMAIQQSPNKMLTLSEIYQWIMDLFPFYRQNQQRWQNSIRHSLSFNDCFLKVPRSPDKPGKGSFWTLHPDSGNMFENGCYLRRQKRFKCEKQLALKEAAGAAGSGKKAAAGAQASQAQLGEAAGPASETPAGTESPHSSASPCQEHKRGGLGELKGTPAAALSPPEPAPSPGQQQQAAAHLLGPPHHPGLPPEAHLKPEHHYAFNHPFSINNLMSSEQQHHHSHHHHQPHKMDLKAYEQVMHYPGYGSPMPGSLAMGPVTNKTGLDASPLAADTSYYQGVYSRPIMNSS

SEQ ID NO: 10142 - protein, 1014 aa, Homo sapiens
MRVPVFEDIKDETEEEKIGEEENEEDQVFYKPVIEDLSMELARKCTELISDIRYKEEFKKSKDKCTFVTDSPMLNHVKNIGAFISEAKYKGTIKADLSNSLYKRMPATIDSVFAGEVTQLQSEVAYKQKHDAAKGFSDYAHMKEPPEVKHAMEVNKHQSNISYRKDVQDTHTYSAELDRPDIKMATQISKIISNAEYKKGQGIMNKEPAVIGRPDFEHAVEASKLSSQIKYKEKFDNEMKDKKHHYNPLESASFRQNQLAATLASNVKYKKDIQNMHDPVSDLPNLLFLDHVLKASKMLSGREYKKLFEENKGMYHFDADAVEHLHHKGNAVLQSQVKYKEEYEKNKGKPMLEFVETPSYQASKEAQKMQSEKVYKEDFEKEIKGRSSLDLDKTPEFLHVKYITNLLREKEYKKDLENEIKGKGMELNSEVLDIQRAKRASEMASEKEYKKDLESIIKGKGMQAGTDTLEMQHAKKAAEIASEKDYKRDLETEIKGKGMQVSTDTLDVQRAKKASEMASQKQYKKDLENEIKGKGMQVSMDIPDILRAKRTSEIYSQRKYKDEAEKMLSNYSTIADTPEIQRIKTTQQNISAVFYKKEVGAGTAVKDSPEIERVKKNQQNISSVKYKEEIKHATAISDPPELKRVKENQKNISNLQYKEQNYKATPVSMTPEIERVRRNQEQLSAVKYKGELQRGTAISDPPELKRAKENQKNISNVYYRGQLGRATTLSVTPEMERVKKNQENISSVKYTQDHKQMKGRPSLILDTPAMRHVKEAQNHISMVKYHEDFEKTKGRGFTPVVDDPVTERVRKNTQVVSDAAYKGVHPHIVEMDRRPGIIVDLKVWRTDPGSIFDLDPLEDNIQSRSLHMLSEKASHYRRHWSRSHSSSTFGTGLGDDRSEISEIYPSFSCCSEVTRPSDEGAPVLPGAYQQSHSQGYGYMHQTSVSSMRSMQHSPNLRTYRAMYDYSAQDEDEVSFRDGDYIVNVQPIDDGWMYGTVQRTGRTGMLPANYIEFVN

SEQ ID NO: 10143 - protein, 316 aa, Homo sapiens
MVNQSSPMGFLLLGFSEHPALERTLFVVVFTSYLLTLVGNTLIILLSVLYPRLHSPMYFFLSDLSFLDLCFTTSCVPQMLVNLWGPKKTISFLGCSVQLFIFLSLGTTECILLTVMAFDRYVAVCQPLHYATIIHPRLCWQLASVAWVMSLVQSIVQTPSTLHLPFCPHQQIDDFLCEVPSLIRLSCGDTSYNEIQLAVSSVIFVVVPLSLILASYGATAQAVLRINSATAWRKAFGTCSSHLTVVTLFYSSVIAVYLQPKNPYAQGRGKFFGLFYAVGTPSLNPLVYTLRNKEIKRALRRLLGKERDSRESWRAA

SEQ ID NO: 10144 - protein, 281 aa, Homo sapiens
MVLAPLPDPGPPSLAVAPEPCPQPLRSPSLDNPTPFPNLGPSENPLKRLLVPGEEWEFEVTAFYRGRQVFQQTISCPEGLRLVGSEVGDRTLPGWPVTLPDPGMSLTDRGVMSYVRHVLSCLGGGLALWRAGQWLWAQRLGHCHTYWAVSEELLPNSGHGPDGEVPKDKEGGVFDLGPFIVDLITFTEGSGRSPRYALWFCVGESWPQDQPWTKRLVMVKVVPTCLRALVEMARVGGASSLENTVDLHISNSHPLSLTSDQYKAYLQDLVEGMDFQGPGES

SEQ ID NO: 10145 - protein, 273 aa, Homo sapiens
MSLTNTKTGFSVKDILDLPDTNDEEGSVAEGPEEENEGPEPAKRAGPLGQGALDAVQSLPLKNPFYDSSDNPYTRWLASTEGLQYSLHGLAAGAPPQDSSSKSPEPSADESPDNDKETPGGGGDAGKKRKRRVLFSKAQTYELERRFRQQRYLSAPEREHLASLIRLTPTQVKIWFQNHRYKMKRARAEKGMEVTPLPSPRRVAVPVLVRDGKPCHALKAQDLAAATFQAGIPFSAYSAQSLQHMQYNAQYSSASTPQYPTAHPLVQAQQWTW

SEQ ID NO: 10146 - protein, 315 aa, Homo sapiens
MEIVSTGNETITEFVLLGFYDIPELHFLFFIVFTAVYVFIIIGNMLIIVAVVSSQRLHKPMYIFLANLSFLDILYTSAVMPKMLEGFLQEATISVAGCLLQFFIFGSLATAECLLLAVMAYDRYLAICYPLHYPLLMGPRRYMGLVVTTWLSGFVVDGLVVALVAQLRFCGPNHIDQFYCDFMLFVGLACSDPRVAQVTTLILSVFCLTIPFGLILTSYARIVVAVLRVPAGASRRRAFSTCSSHLAVVTTFYGTLMIFYVAPSAVHSQLLSKVFSLLYTVVTPLFNPVIYTMRNKEVHQALRKILCIKQTETLD

SEQ ID NO: 10147 - protein, 312 aa, Homo sapiens
MMIKKNASSEDFFILLGFSNWPQLEVVLFVVILIFYLMTLTGNLFIIILSYVDSHLHTPMYFFLSNLSFLDLCYTTSSIPQLLVNLRGPEKTISYAGCMVQLYFVLALGITECVLLVVMSYDRYVAVCRPLHYTVLMHPRFCHLLVAASWVIGFTISALHSSFTFWVPLCGHRLVDHFFCEVPALLRLSCVDTHANELTLMVMSSIFVLIPLILILTTYGAIARAVLSMQSTTGLQKVFRTCGAHLMVVSLFFIPVMCMYLQPPSENSPDQGKFIALFYTVVTPSLNPLIYTLRNKHVKGAAKRLLGWEWGK

SEQ ID NO: 10148 - protein, 311 aa, Homo sapiens
MNDDGKVNASSEGYFILVGFSNWPHLEVVIFVVVLIFYLMTLIGNLFIIILSYLDSHLHTPMYFFLSNLSFLDLCYTTSSIPQLLVNLWGPEKTISYAGCMIQLYFVLALGTTECVLLVVMSYDRYAAVCRPLHYTVLMHPRFCHLLAVASWVSGFTNSALHSSFTFWVPLCGHRQVDHFFCEVPALLRLSCVDTHVNELTLMITSSIFVLIPLILILTSYGAIVRAILRMQSTTGLQKVFGTCGAHLMAVSLFFIPAMCMYLQPPSGNSQDQGKFIALFYTVVTPSLNPLIYTLRNKVVRGAVKRLMGWE

SEQ ID NO: 10149 - protein, 312 aa, Homo sapiens
MLMKKNASFEDFFLLLGFSNWPHLEVVLFVVILIFYLITLIGNLFIIILSYLDSHLHTPMYFFLSNLSFLDLCYTTSSIPQLLVNLWGPEKTISYAGCTVQLYFVLALGTAECVLLVVMSYDRYAAVCRPLHYTVLMHPRFCRLLAAASWVSGFTTSALHSSFTFWIPLCRHRLVDHFFCEVPALLRLSCVDTQANELTLMVMSSIFVLIPLILILTSYGAIARAVLSMQSTTGLQKVLRTCGAHLMVVSLFFIPVMCMYLQPPSENSQDQGKFIALFYTVVTPSLNPLIYTFRNKDVRGAVKRLMGWEWGM

SEQ ID NO: 10150 - protein, 666 aa, Homo sapiens
MQEVVLLDESSGPPSQLLWTRQDTQLPQESALLPAPYPAFTKDGSQGNLPQADITLMSQAQESVTFEDVAVNFTNREWQCLTYAQRHLYKDVMLENYGNMVSLGFPFPKPPLISHLEREVDPCVQDPQDRESLSCSYPVSADKMWPENEKASSQQEIFENGEAYWMKFNSLLKVDSRDPKVREVCVQDVKLENQWETSIREKLREEKEGSEEVTCKKGKNQKVLSKNLNPNSKHSQCNKVLIAQKLHECARCGKNFSWHSDLILHEQIHSGEKPHVCNECGKAFKTRNQLSMHRIIHTGEKPFNCTQCGKAFNSRSALCRHKKTHSGEKPHECRDCGKAFKTRNRLCMHQLIHTGEKPYKCNCCGKAFQFKHSLTIHGRIHTGEKPYECEECGKAFSGSSDLTKHIRIHTGERPYECSKCGRAFSRSSDLSKHKRIHTREKHYGCPQCGKDFSIKAELTKHRRIHTEEKRYRCEECGKAFRHNCKRRAHEREHTGEKPYQCRDCGKTFQDKHCLTIHQRIHTGEKPYKCLECGKAFSGKSNLTNHRRIHTGEKPHKCEVCGMAFHHSSVLRQHKRIHTGEKPYTCSECGTSFRQGSALIGHKRVHTGEKPYECEECGKAFRVSSNLTGHKKRKHQVWSTHELDGSRKSLSPVTVSQTSVVSILTSA

SEQ ID NO: 10151 - protein, 686 aa, Homo sapiens
MLLRGVLLALQALQLAGALDLPAGSCAFEESTCGFDSVLASLPWILNEEGHYIYVDTSFGKQGEKAVLLSPDLQAEEWSCLRLVYQITTSSESLSDPSQLNLYMRFEDESFDRLLWSAKEPSDSWLIASLDLQNSSKKFKILIEGVLGQGNTASIALFEIKMTTGYCIECDFEENHLCGFVNRWNPNVNWFVGGGSIRNVHSILPQDHTFKSELGHYMYVDSVYVKHFQEVAQLISPLTTAPMAGCLSFYYQIQQGNDNVFSLYTRDVAGLYEEIWKADRPGNAAWNLAEVEFSAPYPMEVIFEVAFNGPKGGYVALDDISFSPVHCQNQTELLFSAVEASCNFEQDLCNFYQDKEGPGWTRVKVKPNMYRAGDHTTGLGYYLLANTKFTSQPGYIGRLYGPSLPGNLQYCLRFHYAIYGFLKMSDTLAVYIFEENHVVQEKIWSVLESPRGVWMQAEITFKKPMPTKVVFMSLCKSFWDCGLVALDDITIQLGSCSSSEKLPPPPGECTFEQDECTFTQEKRNRSSWHRRRGETPTSYTGPKGDHTTGVGYYMYIEASHMVYGQKARLLSRPLRGVSGKHCLTFFYHMYGGGTGLLSVYLKKEEDSEESLLWRRRGEQSISWLRALIEYSCERQHQIIFEAIRGVSIRSDIAIDDVKFQAGPCGEMEDTTQQSSGYSEDLNEIEY

SEQ ID NO: 10152 - protein, 569 aa, Homo sapiens
MAGSPGSGVSLEGISLESSEEAELQREAMQQVLDNLGSLPSATGAAELDLIFLRGIMESPIVRSLAKAHERLEETKLEAVRDNNLELVQEILRDLAQLAEQSSTAAELAHILQEPHFQSLLETHDSVASKTYETPPPSPGLDPTFSNQPVPPDAVRMVGIRKTAGEHLGVTFRVEGGELVIARILHGGMVAQQGLLHVGDIIKEVNGQPVGSDPRALQELLRNASGSVILKILPSYQEPHLPRQVFVKCHFDYDPARDSLIPCKEAGLRFNAGDLLQIVNQDDANWWQACHVEGGSAGLIPSQLLEEKRKAFVKRDLELTPNSGTLCGSLSGKKKKRMMYLTTKNAEFDRHELLIYEEVARMPPFRRKTLVLIGAQGVGRRSLKNKLIMWDPDRYGTTVPYTSRRPKDSEREGQGYSFVSRGEMEADVRAGRYLEHGEYEGNLYGTRIDSIRGVVAAGKVCVLDVNPQAVKVLRTAEFVPYVVFIEAPDFETLRAMNRAALESGISTKQLTEADLRRTVEESSRIQRGYGHYFDLCLVNSNLERTFRELQTAMEKLRTEPQWVPVSWVY

SEQ ID NO: 10153 - protein, 950 aa, Homo sapiens
MGVPAFFRWLSRKYPSIIVNCVEEKPKECNGVKIPVDASKPNPNDVEFDNLYLDMNGIIHPCTHPEDKPAPKNEDEMMVAIFEYIDRLFSIVRPRRLLYMAIDGVAPRAKMNQQRSRRFRASKEGMEAAVEKQRVREEILAKGGFLPPEEIKERFDSNCITPGTEFMDNLAKCLRYYIADRLNNDPGWKNLTVILSDASAPGEGEHKIMDYIRRQRAQPNHDPNTHHCLCGADADLIMLGLATHEPNFTIIREEFKPNKPKPCGLCNQFGHEVKDCEGLPREKKGKHDELADSLPCAEGEFIFLRLNVLREYLERELTMASLPFTFDVERSIDDWVFMCFFVGNDFLPHLPSLEIRENAIDRLVNIYKNVVHKTGGYLTESGYVNLQRVQMIMLAVGEVEDSIFKKRKDDEDSFRRRQKEKRKRMKRDQPAFTPSGILTPHALGSRNSPGSQVASNPRQAAYEMRMQNNSSPSISPNTSFTSDGSPSPLGGIKRKAEDSDSEPEPEDNVRLWEAGWKQRYYKNKFDVDAADEKFRRKVVQSYVEGLCWVLRYYYQGCASWKWYYPFHYAPFASDFEGIADMPSDFEKGTKPFKPLEQLMGVFPAASGNFLPPSWRKLMSDPDSSIIDFYPEDFAIDLNGKKYAWQGVALLPFVDERRLRAALEEVYPDLTPEETRRNSLGGDVLFVGKHHPLHDFILELYQTGSTEPVEVPPELCHGIQGKFSLDEEAILPDQIVCSPVPMLRDLTQNTVVSINFKDPQFAEDYIFKAVMLPGARKPAAVLKPSDWEKSSNGRQWKPQLGFNRDRRPVHLDQAAFRTLGHVMPRGSGTGIYSNAAPPPVTYQGNLYRPLLRGQAQIPKLMSNMRPQDSWRGPPPLFQQQRFDRGVGAEPLLPWNRMLQTQNAAFQPNQYQMLAGPGGYPPRRDDRGGRQGYPREGRKYPLPPPSGRYNWN

SEQ ID NO: 10154 - protein, 358 aa, Homo sapiens
MASGSVAECLQQETTCPVCLQYFAEPMMLDCGHNICCACLARCWGTAETNVSCPQCRETFPQRHMRPNRHLANVTQLVKQLRTERPSGPGGEMGVCEKHREPLKLYCEEDQMPICVVCDRSREHRGHSVLPLEEAVEGFKEQIQNQLDHLKRVKDLKKRRRAQGEQARAELLSLTQMEREKIVWEFEQLYHSLKEHEYRLLARLEELDLAIYNSINGAITQFSCNISHLSSLIAQLEEKQQQPTRELLQDIGDTLSRAERIRIPEPWITPPDLQEKIHIFAQKCLFLTESLKQFTEKMQSDMEKIQELREAQLYSVDVTLDPDTAYPSLILSDNLRQVRYSYLQQDLPDNPERSPSTT

SEQ ID NO: 10155 - protein, 513 aa, Homo sapiens
MASGSVAECLQQETTCPVCLQYFAEPMMLDCGHNICCACLARCWGTAETNVSCPQCRETFPQRHMRPNRHLANVTQLVKQLRTERPSGPGGEMGVCEKHREPLKLYCEEDQMPICVVCDRSREHRGHSVLPLEEAVEGFKEQIQNQLDHLKRVKDLKKRRRAQGEQARAELLSLTQMEREKIVWEFEQLYHSLKEHEYRLLARLEELDLAIYNSINGAITQFSCNISHLSSLIAQLEEKQQQPTRELLQDIGDTLSRAERIRIPEPWITPPDLQEKIHIFAQKCLFLTESLKQFTEKMQSDMEKIQELREAQLYSVDVTLDPDTAYPSLILSDNLRQVRYSYLQQDLPDNPERFNLFPCVLGSPCFIAGRHYWEVEVGDKAKWTIGVCEDSVCRKGGVTSAPQNGFWAVSLWYGKEYWALTSPMTALPLRTPLQRVGIFLDYDAGEVSFYNVTERCHTFTFSHATFCGPVRPYFSLSYSGGKSAAPLIICPMSGIDGFSGHVGNHGHSMETSP

SEQ ID NO: 10156 - protein, 273 aa, Homo sapiens
MRLLVLLWGCLLLPGYEALEGPEEISGFEGDTVSLQCTYREELRDHRKYWCRKGGILFSRCSGTIYAEEEGQETMKGRVSIRDSRQELSLIVTLWNLTLQDAGEYWCGVEKRGPDESLLISLFVFPASPGLYPAATTAKQGKTGAEAPPLPGTSQYGHERTSQYTGTSPHPATSPPAGSSRPPMQLDSTSAEDTSPALSSGSSKPRVSIPMVRILAPVLVLLSLLSAAGLIAFCSHLLLWRKEAQQATETQRNEKFCLSRLNSLMFSLSLPWL

SEQ ID NO: 10157 - protein, 532 aa, Homo sapiens
MNKSTCLMAAETPSKRWRLHCLAFSQRFVRAGPACSSREACSSPRAGWNPAGFRLPGRWSPFVALHLVCQIREALKLRSGHRTPSGAGSSMQPPPSLCGRALVALVLACGLSRIWGEERGFPPDRATPLLQTAEIMTPPTKTLWPKGSNASLARSLAPAEVPKGDRTAGSPPRTISPPPCQGPIEIKETFKYINTVVSCLVFVLGIIGNSTLLRIIYKNKCMRNGPNILIASLALGDLLHIVIDIPINVYKLLAEDWPFGAEMCKLVPFIQKASVGITVLSLCALSIDRYRAVASWSRIKGIGVPKWTAVEIVLIWVVSVVLAVPEAIGFDIITMDYKGSYLRICLLHPVQKTAFMQFYKTAKDWWLFSFYFCLPLAITAFFYTLMTCEMLRKKSGMQIALNDHLKQRREVAKTVFCLVLVFALCWLPLHLSRILKLTLYNQNDPNRCELLSFLLVLDYIGINMASLNSCINPIALYLVSKRFKNCFKSCLCCWCQSFEEKQSLEEKQSCLKFKANDHGYDNFRSSNKYSSS

SEQ ID NO: 10158 - protein, 450 aa, Homo sapiens
MGEPRAGAALDDGSGWTGSEEGSEEGTGGSEGAGGDGGPDAEGVWSPDIEQSFQEALAIYPPCGRRKIILSDEGKMYGRNELIARYIKLRTGKTRTRKQVSSHIQVLARRKSREIQSKLKDQVSKDKAFQTMATMSSAQLISAPSLQAKLGPTGPQVVQASELFQFWSGGSGPPWNVPDVKPFSQTPFTLSLTPPSTDLPGYEPPQALSPLPPPTPSPPAWQARGLGTARLQLVEFSAFVEPPDAVDSYQRHLFVHISQHCPSPGAPPLESVDVRQIYDKFPEKKGGLRELYDRGPPHAFFLVKFWADLNWGPSGEEAGAGGSISSGGFYGVSSQYESLEHMTLTCSSKVCSFGKQVVEKVETERAQLEDGRFVYRLLRSPMCEYLVNFLHKLRQLPERYMMNSVLENFTILQVVTNRDTQELLLCTAYVFEVSTSERGAQHHIYRLVRD

SEQ ID NO: 10159 - protein, 480 aa, Homo sapiens
MARFPKADLAAAGVMLLCHFFTDQFQFADGKPGDQILDWQYGVTQAFPHTEEEVEVDSHAYSHRWKRNLDFLKAVDTNRASVGQDSPEPRSFTDLLLDDGQDNNTQIERVNLSFDFPFYGHFLREITVATGGFIYTGEVVHRMLTATQYIAPLMANFDPSVSRNSTVRYFDNGTALVVQWDHVHLQDNYNLGSFTFQATLLMDGRIIFGYKEIPVLVTQISSTNHPVKVGLSDAFVVVHRIQQIPNVRRRTIYEYHRVELQMSKITNISAVEMTPLPTCLQFNRCGPCVSSQIGFNCSWCSKLQRCSSGFDRHRQDWVDSGCPEESKEKMCENTEPVETSSRTTTTVGATTTQFRVLTTTRRAVTSQFPTSLPTEDDTKIALHLKDNGASTDDSAAEKKGGTLHAGLIIGILILVLIVATAILVTVYMYHHPTSAASIFFIERRPSRWPAMKFRRGSGHPAYAEVEPVGEKEGFIVSEQC

SEQ ID NO: 10160 - protein, 1190 aa, Homo sapiens
MPVRGDRGFPPRRELSGWLRAPGMEELIWEQYTVTLQKDSKRGFGIAVSGGRDNPHFENGETSIVISDVLPGGPADGLLQENDRVVMVNGTPMEDVLHSFAVQQLRKSGKVAAIVVKRPRKVQVAALQASPPLDQDDRAFEVMDEFDGRSFRSGYSERSRLNSHGGRSRSWEDSPERGRPHERARSRERDLSRDRSRGRSLERGLDQDHARTRDRSRGRSLERGLDHDFGPSRDRDRDRSRGRSIDQDYERAYHRAYDPDYERAYSPEYRRGARHDARSRGPRSRSREHPHSRSPSPEPRGRPGPIGVLLMKSRANEEYGLRLGSQIFVKEMTRTGLATKDGNLHEGDIILKINGTVTENMSLTDARKLIEKSRGKLQLVVLRDSQQTLINIPSLNDSDSEIEDISEIESNRSFSPEERRHQYSDYDYHSSSEKLKERPSSREDTPSRLSRMGATPTPFKSTGDIAGTVVPETNKEPRYQEDPPAPQPKAAPRTFLRPSPEDEAIYGPNTKMVRFKKGDSVGLRLAGGNDVGIFVAGIQEGTSAEQEGLQEGDQILKVNTQDFRGLVREDAVLYLLEIPKGEMVTILAQSRADVYRDILACGRGDSFFIRSHFECEKETPQSLAFTRGEVFRVVDTLYDGKLGNWLAVRIGNELEKGLIPNKSRAEQMASVQNAQRDNAGDRADFWRMRGQRSGVKKNLRKSREDLTAVVSVSTKFPAYERVLLREAGFKRPVVLFGPIADIAMEKLANELPDWFQTAKTEPKDAGSEKSTGVVRLNTVRQIIEQDKHALLDVTPKAVDLLNYTQWFPIVIFFNPDSRQGVKTMRQRLNPTSNKSSRKLFDQANKLKKTCAHLFTATINLNSANDSWFGSLKDTIQHQQGEAVWVSEGKMEGMDDDPEDRMSYLTAMGADYLSCDSRLISDFEDTDGEGGAYTDNELDEPAEEPLVSSITRSSEPVQHEESIRKPSPEPRAQMRRAASSDQLRDNSPPPAFKPEPPKAKTQNKEESYDFSKSYEYKSNPSAVAGNETPGASTKGYPPPVAAKPTFGRSILKPSTPIPPQEGEEVGESSEEQDNAPKSVLGKVKIFEKMDHKARLQRMQELQEAQNARIEIAQKHPDIYAVPIKTHKPDPGTPQHTSSRPPEPQKAPSRPYQDTRGSYGSDAEEEEYRQQLSEHSKRGYYGQSARYRDTEL

SEQ ID NO: 10161 - protein, 668 aa, Homo sapiens
MSNVTLRKMSPTGNEMKSTTQGTTRKQQDFHEVNKRRTFLQDNSWIKKRPEEEKDENYGRVVLNRHNSHDALDRKVNERDVPKATISRYSSDDTLDRISDRNDAAKTYKANTLDNQLTNRSMSMFRSLEVTKLQPGGSLNANTSNTIASTSATTPVKKKRQSWFPPPPPGYNASSSTGTRRREPGVHPPIPPKPSSPVSSPNQLRQDNRQIHPPKPGVYTETNRSAERNISEELDNLIKMNKSLNRNQGLDSLFRANPKVEEREKRAKSLESLIYMSTRTDKDGKGIQSLGSPIKVNQRTDKNEKGRQNLESVAKVNARMNKTSRRSEDLDNATEVNPKGHENTTGKKDLDGLIKVDPETNKNITRGQSLDNLIKVTPEVKRSNQGSKDLNNFIKVYPGTEKSTEGGQSLDSLIKVTPERNRTNQGNQDLENLIKVIPSANKSSEQGLDEHINVSPKAVKNTDGKQDLDKLIKVNPEIFTNNQRNQDLANLIKVNPAVIRNNQSQDLDNLIKVKPSALRNTNRDQNLENLIEVNSHVSENKNGSSNTGAKQAGPQDTVVYTRTYVENSKSPKDGYQENISGKYIQTVYSTSDRSVIERDMCTYCRKPLGVETKMILDELQICCHSTCFKCEICKQPLENLQAGDSIWIYRQTIHCEPCYSKIMAKWIP

SEQ ID NO: 10162 - protein, 529 aa, Homo sapiens
MARFPKADLAAAGVMLLCHFFTDQFQFADGKPGDQILDWQYGVTQAFPHTEEEVEVDSHAYSHRWKRNLDFLKAVDTNRASVGQDSPEPRSFTDLLLDDGQDNNTQIEEDTDHNYYISRIYGPSDSASRDLWVNIDQMEKDKVKIHGILSNTHRQAARVNLSFDFPFYGHFLREITVATGGFIYTGEVVHRMLTATQYIAPLMANFDPSVSRNSTVRYFDNGTALVVQWDHVHLQDNYNLGSFTFQATLLMDGRIIFGYKEIPVLVTQISSTNHPVKVGLSDAFVVVHRIQQIPNVRRRTIYEYHRVELQMSKITNISAVEMTPLPTCLQFNRCGPCVSSQIGFNCSWCSKLQRCSSGFDRHRQDWVDSGCPEESKEKMCENTEPVETSSRTTTTVGATTTQFRVLTTTRRAVTSQFPTSLPTEDDTKIALHLKDNGASTDDSAAEKKGGTLHAGLIIGILILVLIVATAILVTVYMYHHPTSAASIFFIERRPSRWPAMKFRRGSGHPAYAEVEPVGEKEGFIVSEQC

SEQ ID NO: 10163 - protein, 1938 aa, Homo sapiens
MSRWLWPWSNCVKERVCRYLLHHYLGHFFQEHLSLDQLSLDLYKGSVALRDIHLEIWSVNEVLESMESPLELVEGFVGSIEVAVPWAALLTDHCTVRVSGLQLTLQPRRGPAPGAADSQSWASCMTTSLQLAQECLRDGLPEPSEPPQPLEGLEMFAQTIETVLRRIKVTFLDTVVRVEHSPGDGERGVAVEVRVQRLEYCDEAVRDPSQAPPVDVHQPPAFLHKLLQLAGVRLHYEELPAQEEPPEPPLQIGSCSGYMELMVKLKQNEAFPGPKLEVAGQLGSLHLLLTPRQLQQLQELLSAVSLTDHEGLADKLNKSRPLGAEDLWLIEQDLNQQLQAGAVAEPLSPDPLTNPLLNLDNTDLFFSMAGLTSSVASALSELSLSDVDLASSVRSDMASRRLSAQAHPAGKMAPNPLLDTMRPDSLLKMTLGGVTLTLLQTSAPSSGPPDLATHFFTEFDATKDGPFGSRDFHHLRPRFQRACPCSHVRLTGTAVQLSWELRTGSRGRRTTSMEVHFGQLEVLECLWPRGTSEPEYTEILTFPGTLGSQASARPCAHLRHTQILRRVPKSRPRRSVACHCHSELALDLANFQADVELGALDRLAALLRLATVPAEPPAGLLTEPLPAMEQQTVFRLSAPRATLRLRFPIADLRPEPDPWAGQAVRAEQLRLELSEPQFRSELSSGPGPPVPTHLELTCSDLHGIYEDGGKPPVPCLRVSKALDPKSTGRKYFLPQVVVTVNPQSSSTQWEVAPEKGEELELSVESPCELREPEPSPFSSKRTMYETEEMVIPGDPEEMRTFQSRTLALSRCSLEVILPSVHIFLPSKEVYESIYNRINNDLLMWEPADLLPTPDPAAQPSGFPGPSGFWHDSFKMCKSAFKLANCFDLTPDSDSDDEDAHFFSVGASGGPQAAAPEAPSLHLQSTFSTLVTVLKGRITALCETKDEGGKRLEAVHGELVLDMEHGTLFSVSQYCGQPGLGYFCLEAEKATLYHRAAVDDYPLPSHLDLPSFAPPAQLAPTIYPSEEGVTERGASGRKGQGRGPHMLSTAVRIHLDPHKNVKEFLVTLRLHKATLRHYMALPEQSWHSQLLEFLDVLDDPVLGYLPPTVITILHTHLFSCSVDYRPLYLPVRVLITAETFTLSSNIIMDTSTFLLRFILDDSALYLSDKCEVETLDLRRDYVCVLDVDLLELVIKTWKGSTEGKLSQPLFELRCSNNVVHVHSCADSCALLVNLLQYVMSTGDLHPPPRPPSPTEIAGQKLSESPASLPSCPPVETALINQRDLADALLDTERSLRELAQPSGGHLPQASPISVYLFPGERSGAPPPSPPVGGPAGSLGSCSEEKEDEREEEGDGDTLDSDEFCILDAPGLGIPPRDGEPVVTQLHPGPIVVRDGYFSRPIGSTDLLRAPAHFPVPSTRVVLREVSLVWHLYGGRDFGPHPGHRARTGLSGPRSSPSRCSGPNRPQNSWRTQGGSGRQHHVLMEIQLSKVSFQHEVYPAEPATGPAAPSQELEERPLSRQVFIVQELEVRDRLASSQINKFLYLHTSERMPRRAHSNMLTIKALHVAPTTNLGGPECCLRVSLMPLRLNVDQDALFFLKDFFTSLVAGINPVVPGETSAEARPETRAQPSSPLEGQAEGVETTGSQEAPGGGHSPSPPDQQPIYFREFRFTSEVPIWLDYHGKHVTMDQVGTFAGLLIGLAQLNCSELKLKRLCCRHGLLGVDKVLGYALNEWLQDIRKNQLPGLLGGVGPMHSVVQLFQGFRDLLWLPIEQYRKDGRLMRGLQRGAASFGSSTASAALELSNRLVQAIQATAETVYDILSPAAPVSRSLQDKRSARRLRRGQQPADLREGVAKAYDTVREGILDTAQTICDVASRGHEQKGLTGAVGGVIRQLPPTVVKPLILATEATSSLLGGMRNQIVPDAHKDHALKWRSDSAQD

SEQ ID NO: 10164 - protein, 506 aa, Homo sapiens
ECPRGRSALLKGPPQEKPNRRSALLSVGEISELCPEITDFLCRDKKCIASHLLCDYKPDCSDRSDEAHCAHYTSTTGSCNFETSSGNWTTACSLTQDSEDDLDWAIGSRIPAKALIPDSDHTPGSGQHFLYVNSSGSKEGSVARITTSKSFPASLGMCTVRFWFYMIDPRSMGILKVYTIEESGLNILVWSVIGNKRTGWTYGSVPLSSNSPFKVAFEADLDGNEDIFIALDDISFTPECVTGGPVPVQPSPCEADQFSCIYTLQCVPLSGKCDGHEDCIDGSDEMDCPLSPTPPLCSNMEFPCSTDECIPSLLLCDGVPDCHFNEDELICSNKSCSNGALVCASSNSCIPAHQRCDGFADCMDFQLDESSCSECPLNYCRNGGTCVVEKNGPMCRCRQGWKGNRCHIKFNPPATDFTYAQNNTWTLLGIGLAFLMTHITVAVLCFLANRKVPIRKTEGSGNCAFVNPVYGNWSNPEKTESSVYSFSNPLYGTTSGSLETLSHHLK

SEQ ID NO: 10165 - protein, 1486 aa, Homo sapiens
PRDHSLNASQGHFMFILKKSSSLWQVAKLQSPTFSQTGPGCILSFWFYNYGLSVGAAELQLHMENSHDSTVIWRVLYNQGKQWLEATIQLGRLSQPFHLSLDKVSLGIYDGVSAIDDIRFENCTLPLPAESCEGLDHFWCRHTRACIEKLRLCDLVDDCGDRTDEVNCAPELQCNFETGICNWEQDAKDDFDWTRSQGPTPTLNTGPMKDNTLGTAKGHYLYIESSEPQAFQDSAALLSPILNATDTKGCTFRFYYHMFGKRIYRLAIYQRIWSDSRGQLLWQIFGNQGNRWIRKHLNISSRQPFQILVEASVGDGFTGDIAIDDLSFMDCTLYPGNLPADLPTPPETSVPVTLPPHNCTDNEFICRSDGHCIEKMQKCDFKYDCPDKSDEASCVMEVCSFEKRSLCKWYQPIPVHLLQDSNTFRWGLGNGISIHHGEENHRPSVDHTQNTTDGWYLYADSSNGKFGDTADILTPIISLTGPKCTLVFWTHMNGATVGSLQVLIKKDNVTSKLWAQTGQQGAQWKRAEVFLGIRSHTQIVFRAKRGISYIGDVAVDDISFQDCSPLLSPERKCTDHEFMCANKHCIAKDKLCDFVNDCADNSDETTFICRTSSGRCDFEFDLCSWKQEKDEDFDWNLKASSIPAAGTEPAADHTLGNSSGHYIFIKSLFPQQPMRAARISSPVISKRSKNCKIIFHYHMYGNGIGALTLMQVSVTNQTKVLLNLTVEQGNFWRREELSLFGDEDFQLKFEGRVGKGQRGDIALDDIVLTENCLSLHDSVQEELAVPLPTGFCPLGYRECHNGKCYRLEQSCNFVDNCGDNTDENECGSSCTFEKGWCGWQNSQADNFDWVLGVGSHQSLRPPKDHTLGNENAILLMRRHKYPIRSVNLHTVKHVLKAQTVGNCSVSKLEARLLDFLSVPNENTFGSSDHTNWHFMYLEATAVGLRGDKAHFRSTMWRESSAACTMSFWYFVSAKATGSIQILIKRGRRRRRAPNPVLSGSPTIPRQGSQQLGGWRGGSARHRARAFPEPECPRGRSALLKGPPQEKPNRRSALLSVGEISELCPEITDFLCRDKKCIASHLLCDYKPDCSDRSDEAHCAHYTSTTGSCNFETSSGNWTTACSLTQDSEDDLDWAIGSRIPAKALIPDSDHTPGSGQHFLYVNSSGSKEGSVARITTSKSFPASLGMCTVRFWFYMIDPRSMGILKVYTIEESGLNILVWSVIGNKRTGWTYGSVPLSSNSPFKVAFEADLDGNEDIFIALDDISFTPECVTGGPVPVQPSPCEADQFSCIYTLQCVPLSGKCDGHEDCIDGSDEMDCPLSPTPPLCSNMEFPCSTDECIPSLLLCDGVPDCHFNEDELICSNKSCSNGALVCASSNSCIPAHQRCDGFADCMDFQLDESSCSDTWTLLGIGLAFLMTHITVAVLCFLANRKVPIRKTEGSGNCAFVNPVYGNWSNPEKTESSVYSFSNPLYGTTSGSLETLSHHLK

SEQ ID NO: 10166 - protein, 351 aa, Homo sapiens
MGNAPAKKDTEQEESVNEFLAKARGDFLYRWGNPAQNTASSDQFERLRTLGMGSFGRVMLVRHQETGGHYAMKILNKQKVVKMKQVEHILNEKRILQAIDFPFLVKLQFSFKDNSYLYLVMEYVPGGEMFSRLQRVGRFSEPHACFYAAQVVLAVQYLHSLDLIHRDLKPENLLIDQQGYLQVTDFGFAKRVKGRTWTLCGTPEYLAPEIILSKGYNKAVDWWALGVLIYEMAVGFPPFYADQPIQIYEKIVSGRVRFPSKLSSDLKHLLRSLLQVDLTKRFGNLRNGVGDIKNHKWFATTSWIAIYEKKVEAPFIPKYTGPGDASNFDDYEEEELRISINEKCAKEFSEF

SEQ ID NO: 10167 - protein, 397 aa, Homo sapiens
MAPNGTASSFCLDSTACKITITVVLAVLILITVAGNVVVCLAVGLNRRLRNLTNCFIVSLAITDLLLGLLVLPFSAIYQLSCKWSFGKVFCNIYTSLDVMLCTASILNLFMISLDRYCAVMDPLRYPVLVTPVRVAISLVLIWVISITLSFLSIHLGWNSRNETSKGNHTTSKCKVQVNEVYGLVDGLVTFYLPLLIMCITYYRIFKVARDQAKRINHISSWKAATIREHKATVTLAAVMGAFIICWFPYFTAFVYRGLRGDDAINEVLEAIVLWLGYANSALNPILYAALNRDFRTGYQQLFCCRLANRNSHKTSLRSNASQLSRTQSREPRQQEEKPLKLQVWSGTEVTAPQGATDRPWLCLPECWSVELTHSFIHLFIHSFANIHPIPTTCQEL

SEQ ID NO: 10168 - protein, 981 aa, Homo sapiens
MLRRPAPALAPAARLLLAGLLCGGGVWAARVNKHKPWLEPTYHGIVTENDNTVLLDPPLIALDKDAPLRFAESFEVTVTKEGEICGFKIHGQNVPFDAVVVDKSTGEGVIRSKEKLDCELQKDYSFTIQAYDCGKGPDGTNVKKSHKATVHIQVNDVNEYAPVFKEKSYKATVIEGKQYDSILRVEAVDADCSPQFSQICSYEIITPDVPFTVDKDGYIKNTEKLNYGKEHQYKLTVTAYDCGKKRATEDVLVKISIKPTCTPGWQGWNNRIEYEPGTGALAVFPNIHLETCDEPVASVQATVELETSHIGKGCDRDTYSEKSLHRLCGAAAGTAELLPSPSGSLNWTMGLPTDNGHDSDQVFEFNGTQAVRIPDGVVSVSPKEPFTISVWMRHGPFGRKKETILCSSDKTDMNRHHYSLYVHGCRLIFLFRQDPSEEKKYRPAEFHWKLNQVCDEEWHHYVLNVEFPSVTLYVDGTSHEPFSVTEDYPLHPSKIETQLVVGACWQEFSGVENDNETEPVTVASAGGDLHMTQFFRGNLAGLTLRSGKLADKKVIDCLYTCKEGLDLQVLEDSGRGVQIQAHPSQLVLTLEGEDLGELDKAMQHISYLNSRQFPTPGIRRLKITSTIKCFNEATCISVPPVDGYVMVLQPEEPKISLSGVHHFARAASEFESSEGVFLFPELRIISTITREVEPEGDGAEDPTVQESLVSEEIVHDLDTCEVTVEGEELNHEQESLEVDMARLQQKGIEVSSSELGMTFTGVDTMASYEEVLHLLRYRNWHARSLLDRKFKLICSELNGRYISNEFKVEVNVIHTANPMEHANHMAAQPQFVHPEHRSFVDLSGHNLANPHPFAVVPSTATVVIVVCVSFLVFMIILGVFRIRAAHRRTMRDQDTGKENEMDWDDSALTITVNPMETYEDQHSSEEEEEEEEEEESEDGEEEDDITSAESESSEEEEGEQGDPQNATRQQQLEWDDSTLSY

SEQ ID NO: 10169 - protein, 189 aa, Homo sapiens
MSVLTSPRGKVEVVHCRRTESQDVYCIKSLIRKFTCKLFGKLNIIYLLEKANLAVTLCNDKEEIMAQATFLDYPNWNVAKQDDWVSVFRELDSDIPCTPLNTLFMHLFVAVDEYSVGCCKEILRTVYKAVPELHFIFLIVPSYMSLGSTLITVFDQVGNIPCLTYEEDFAVHICHRHSHYPQLHVRKAR

SEQ ID NO: 10170 - protein, 470 aa, Homo sapiens
MSVLTSPRGKVEVVHCRRTESQDVYCIKSLIRKFTCKLFGKLNIIYLLEKANLAVTLCNDKEEIMAQATFLDYPNWNVAKQDDWVSVFRELDSDIPCTPLNTLFMHLFVAVDEYSVGCCKEILRTVYKAVPELHFIFLIVPSYMSLGSTLITVFDQVGNIPCLTYEEDFAVHICHRHSHYPQLHVRKARVEDHDDLMPIFMRYDTILKETYGEYFLAELIEAQDEENHAVVCEVEGTAVGFMSVCSRVNMQLLHECFDLGPFHGLCFPHPDDVLESPQDLSVRRSQDAELRSSSQGSQKIVEELQEPVSPDTMENIQGNIAREAASEEALTAVQSGNVSEPEDIEKLSDISTGYAQYHHVSSRSLASLVLPEEPVHFRPIYRGASAAFCIQLFCIDEKYEARSLDFMNFVFSLFSDKNFCVISLPHLTPEFFLIQNFVKMVPFNTCTLEQDLYVFHRAGLLKNICLGRSS

SEQ ID NO: 10171 - protein, 1114 aa, Homo sapiens
MSQTQDYECRSHNVDLPESRIPGSNTRLEWVEIIEPRTRERMYANLVTGECVWDPPAGVRIKRTSENQWWELFDPNTSRFYYYNASTQRTVWHRPQGCDIIPLAKLQTLKQNTESPRASAESSPGRGSSVSREGSTSSSLEPEPDTEKAQELPARAGRPAAFGTVKEDSGSSSPPGVFLEKDYEIYRDYSADGQLLHYRTSSLRWNSGAKERMLIKVADREPSFLAAQGNGYAPDGPPGVRSRRPSGSQHSPSLQTFAPEADGTIFFPERRPSPFLKRAELPGSSSPLLAQPRKPSGDSQPSSPRYGYEPPLYEEPPVEYQAPIYDEPPMDVQFEAGGGYQAGSPQRSPGRKPRPFLQPNKQGPPSPCQQLVLTKQKCPERFLSLEYSPAGKEYVRQLVYVEQAGSSPKLRAGPRHKYAPNPGGGSYSLQPSPCLLRDQRLGVKSGDYSTMEGPELRHSQPPTPLPQAQEDAMSWSSQQDTLSSTGYSPGTRKRKSRKPSLCQATSATPTEGPGDLLVEQPLAEEQPPCGTSLAPVKRAEGEAEGARGAAEPFLAQARLAWEAQQAHFHMKQRSSWDSQQDGSGYESDGALPLPMPGPVVRAFSEDEALAQQENRHWRRGTFEKLGFPQILLEKSVSVQTNLASPEPYLHPSQSEDLAACAQFESSRQSRSGVPSSSCVFPTFTLRKPSSETDIENWASKHFNKHTQGLFRRKVSIANMLAWSSESIKKPMIVTSDRHVKKEACELFKLIQMYMGDRRAKADPLHVALEVATKGWSVQGLRDELYIQLCRQTTENFRLESLARGWELMAICLAFFPPTPKFHSYLEGYIYRHMDPVNDTKVTQHIKELLERNTKKKSKLRKKPKPYVEEPDGVAISTYAKYCYHKLQKAALTGAKKGLKKPNVEEIRHAKNAVFSPSMFGSALQEVMGMQRERYPERQLPWVQTRLSEEVLALNGDQTEGIFRVPGDIDEVNALKLQVDQWKVPTGLEDPHVPASLLKLWYRELEEPLIPHEFYEQCIAHYDSPEAAVAVVHALPRINRMVLCYLIRFLQVFVQPANVAVTKMDVSNLAMVMAPNCLRCQSDDPRVIFENTRKEMSFLRVLIQHLDTSFMEGVL

SEQ ID NO: 10172 - protein, 612 aa, Homo sapiens
MKATWIRLLKRAKGGRLKNSDICGSADSYTSRPSDSDVSLEEDREAVRREAERQAQAQLEKAKTKPVAFAVRTNVSYSAAHEDDVPVPGMAISFEAKDFLHVKEKFNNDWWIGRLVKEGCEIGFIPSPVKLENMRLQHEQRAKQGKFYSSKSGGNSSSSLGDIVPSSRKSTPPSSAIDIDATGLDAEENDIPANHRSPKPSANSVTSPHSKEKRMPFFKKTEHTPPYDVVPSMRPVVLVGPSLKGYEVTDMMQKALFDFLKHRFEGRISITRVTADISLAKRSVLNNPSKHAIIERSNTRSSLAEVQSEIERIFELARTLQLVVLDADTINHPAQLSKTSLAPIIVYVKISSPKVLQRLIKSRGKSQAKHLNVQMVAADKLAQCPPELFDVILDENQLEDACEHLADYLEAYWKATHPPSSSLPNPLLSRTLATSSLPLSPTLASNSQGSQGDQRTDRSAPIRSASQAEEEPSVEPVKKSQHRSSSSAPHHNHRSGTSRGLSRQETFDSETQESRDSAYVEPKEDYSHDHVDHYASHRDHNHRDETHGSSDHRHRESRHRSRDVDREQDHNECNKQRSRHKSKDRYCEKDGEVISKKRNEAGEWNRDVYIRQ

SEQ ID NO: 10173 - protein, 555 aa, Homo sapiens
MGLKAAQKTLFPLRSIDDVVRLFAAELGREEPDLVLLSLVLGFVEHFLAVNRVIPTNVPELTFQPSPAPDPPGGLTYFPVADLSIIAALYARFTAQIRGAVDLSLYPREGGVSSRELVKKVSDVIWNSLSRSYFKDRAHIQSLFSFITGTKLDSSGVAFAVVGACQALGLRDVHLALSEDHAWVVFGPNGEQTAEVTWHGKGNEDRRGQTVNAGVAERSWLYLKGSYMRCDRKMEVAFMVCAINPSIDLHTDSLELLQLQQKLLWLLYDLGHLERYPMALGNLADLEELEPTPGRPDPLTLYHKGIASAKTYYRDEHIYPYMYLAGYHCRNRNVREALQAWADTATVIQDYNYCREDEEIYKEFFEVANDVIPNLLKEAASLLEAGEERPGEQSQVRQKVRIVSREAEAAEAEEPWGEEAREGRRRGPRRESKPEEPPPPKKPALDKGLGTGQGAVSGPPRKPPGTVAGTARGPEGGSTAQVPAPTASPPPEGPVLTFQSEKMKGMKELLVATKINSSAIKLQLTAQSQVQMKKQKVSTPSDYTLSFLKRQRKGL

SEQ ID NO: 10174 - protein, 567 aa, Homo sapiens
MQCCGLVHRRRVRVSYGSADSYTSRPSDSDVSLEEDREAVRREAERQAQAQLEKAKTKPVAFAVRTNVSYSAAHEDDVPVPGMAISFEAKDFLHVKEKFNNDWWIGRLVKEGCEIGFIPSPVKLENMRLQHEQRAKQGKFYSSKSGGNSSSSLGDIVPSSRKSTPPSSAKQKQKSTEHTPPYDVVPSMRPVVLVGPSLKGYEVTDMMQKALFDFLKHRFEGRISITRVTADISLAKRSVLNNPSKHAIIERSNTRSSLAEVQSEIERIFELARTLQLVVLDADTINHPAQLSKTSLAPIIVYVKISSPKVLQRLIKSRGKSQAKHLNVQMVAADKLAQCPPELFDVILDENQLEDACEHLADYLEAYWKATHPPSSSLPNPLLSRTLATSSLPLSPTLASNSQGSQGDQRTDRSAPIRSASQAEEEPSVEPVKKSQHRSSSSAPHHNHRSGTSRGLSRQETFDSETQESRDSAYVEPKEDYSHDHVDHYASHRDHNHRDETHGSSDHRHRESRHRSRDVDREQDHNECNKQRSRHKSKDRYCEKDGEVISKKRNEAGEWNRDVYIRQ

SEQ ID NO: 10175 - protein, 575 aa, Homo sapiens
MGLKAAQKTLFPLRSIDDVVRLFAAELGREEPDLVLLSLVLGFVEHFLAVNRVIPTNVPELTFQPSPAPDPPGGLTYFPVADLSIIAALYARFTAQIRGAVDLSLYPREGGVSSRELVKKVSDVIWNSLSRSYFKDRAHIQSLFSFITGTKLDSSGVAFAVVGACQALGLRDVHLALSEDHAWSWLYLKGSYMRCDRKMEVAFMVCAINPSIDLHTDSLELLQLQQKLLWLLYDLGHLERYPMALGNLADLEELEPTPGRPDPLTLYHKGIASAKTYYRDEHIYPYMYLAGYHCRNRNVREALQAWADTATVIQDYNYCREDEEIYKEFFEVANDVIPNLLKEAASLLEAGEERPGEQSQGTQSQGSALQDPECFAHLLRFYDGICKWEEGSPTPVLHVGWATFLVQSLGRFEGQVRQKVRIVSREAEAAEAEEPWGEEAREGRRRGPRRESKPEEPPPPKKPALDKGLGTGQGAVSGPPRKPPGTVAGTARGPEGGSTAQVPAPTASPPPEGPVLTFQSEKMKGMKELLVATKINSSAIKLQLTAQSQVQMKKQKVSTPSDYTLSFLKRQRKGL

SEQ ID NO: 10176 - protein, 836 aa, Homo sapiens
MTATVENLTFQKDTLGNAVDKNRRHGSTEPLVLAWSSQFRRLTWGCALDALHRSPCVAASQHGVTHLIRSSRTPHSTRCRKEDAQPGHHGNGAASVTAQARGQRSVLQVPLPVPRSCLFSESFVVSVSSQSRFLASVPGTGVQRSTAADMAASTAAGKQRIPKVAKVKNKAPAEVQITAEQLLREAKERELELLPPPPQQKITDEEELNDYKLRKRKTFEDNIRKNRTVISNWIKYAQWEESLKEIQRARSIYERALDVDYRNITLWLKYAEMEMKNRQVNHARNIWDRAITTLPRVNQFWYKYTYMEEMLGNVAGARQVFERWMEWQPEEQAWHSYINFELRYKEVDRARTIYERFVLVHPDVKNWIKYARFEEKHAYFAHARKVYERAVEFFGDEHMDEHLYVAFAKFEENQKEFERVRVIYKYALDRISKQDAQELFKNYTIFEKKFGDRRGIEDIIVSKRRFQYEEEVKANPHNYDAWFDYLRLVESDAEAEAVREVYERAIANVPPIQEKRHWKRYIYLWINYALYEELEAKDPERTRQVYQASLELIPHKKFTFAKMWILYAQFEIRQKNLSLARRALGTSIGKCPKNKLFKVYIELELQLREFDRCRKLYEKFLEFGPENCTSWIKFAELETILGDIDRARAIYELAISQPRLDMPEVLWKSYIDFEIEQEETERTRNLYRRLLQRTQHVKVWISFAQFELSSGKEGSLTKCRQIYEEANKTMRNCEEKEERLMLLESWRSFEEEFGTASDKERVDKLMPEKVKKRRKVQTDDGSDAGWEEYFDYIFPEDAANQPNLKLLAMAKLWKKQQQEKEDAEHHPDEDVDESES

SEQ ID NO: 10177 - protein, 606 aa, Homo sapiens
MLDRRLIAPQTKYIIPGGSADSYTSRPSDSDVSLEEDREAVRREAERQAQAQLEKAKTKPVAFAVRTNVSYSAAHEDDVPVPGMAISFEAKDFLHVKEKFNNDWWIGRLVKEGCEIGFIPSPVKLENMRLQHEQRAKQGKFYSSKSGGNSSSSLGDIVPSSRKSTPPSSAIDIDATGLDAEENDIPANHRSPKPSANSVTSPHSKEKRMPFFKKTEHTPPYDVVPSMRPVVLVGPSLKGYEVTDMMQKALFDFLKHRFEGRISITRVTADISLAKRSVLNNPSKHAIIERSNTRSSLAEVQSEIERIFELARTLQLVVLDADTINHPAQLSKTSLAPIIVYVKISSPKVLQRLIKSRGKSQAKHLNVQMVAADKLAQCPPELFDVILDENQLEDACEHLADYLEAYWKATHPPSSSLPNPLLSRTLATSSLPLSPTLASNSQGSQGDQRTDRSAPIRSASQAEEEPSVEPVKKSQHRSSSSAPHHNHRSGTSRGLSRQETFDSETQESRDSAYVEPKEDYSHDHVDHYASHRDHNHRDETHGSSDHRHRESRHRSRDVDREQDHNECNKQRSRHKSKDRYCEKDGEVISKKRNEAGEWNRDVYIRQ

SEQ ID NO: 10178 - protein, 529 aa, Homo sapiens
MQCCGLVHRRRVRVSYGSADSYTSRPSDSDVSLEEDREAVRREAERQAQAQLEKAKTKPVAFAVRTNVSYSAAHEDDVPVPGMAISFEAKDFLHVKEKFNNDWWIGRLVKEGCEIGFIPSPVKLENMRLQHEQRAKQGKFYSSKSGGNSSSSLGDIVPSSRKSTPPSSAKQKQKSTEHTPPYDVVPSMRPVVLVGPSLKGYEVTDMMQKALFDFLKHRFEGRISITRVTADISLAKRSVLNNPSKHAIIERSNTRSSLAEVQSEIERIFELARTLQLVVLDADTINHPAQLSKTSLAPIIVYVKISSPKELFDVILDENQLEDACEHLADYLEAYWKATHPPSSSLPNPLLSRTLATSSLPLSPTLASNSQGSQGDQRTDRSAPIRSASQAEEEPSVEPVKKSQHRSSSSAPHHNHRSGTSRGLSRQETFDSETQESRDSAYVEPKEDYSHDHVDHYASHRDHNHRDETHGSSDHRHRESRHRSRDVDREQDHNECNKQRSRHKSKDRYCEKDGEVISKKRNEAGEWNR

SEQ ID NO: 10179 - protein, 848 aa, Homo sapiens
MTATVENLTFQKDTLGNAVDKNTSRLELRSYSLAGRHGSTEPLVLAWSSQFRRLTWGCALDALHRSPCVAASQHGVTHLIRSSRTPHSTRCRKEDAQPGHHGNGAASVTAQARGQRSVLQVPLPVPRSCLFSESFVVSVSSQSRFLASVPGTGVQRSTAADMAASTAAGKQRIPKVAKVKNKAPAEVQITAEQLLREAKERELELLPPPPQQKITDEEELNDYKLRKRKTFEDNIRKNRTVISNWIKYAQWEESLKEIQRARSIYERALDVDYRNITLWLKYAEMEMKNRQVNHARNIWDRAITTLPRVNQFWYKYTYMEEMLGNVAGARQVFERWMEWQPEEQAWHSYINFELRYKEVDRARTIYERFVLVHPDVKNWIKYARFEEKHAYFAHARKVYERAVEFFGDEHMDEHLYVAFAKFEENQKEFERVRVIYKYALDRISKQDAQELFKNYTIFEKKFGDRRGIEDIIVSKRRFQYEEEVKANPHNYDAWFDYLRLVESDAEAEAVREVYERAIANVPPIQEKRHWKRYIYLWINYALYEELEAKDPERTRQVYQASLELIPHKKFTFAKMWILYAQFEIRQKNLSLARRALGTSIGKCPKNKLFKVYIELELQLREFDRCRKLYEKFLEFGPENCTSWIKFAELETILGDIDRARAIYELAISQPRLDMPEVLWKSYIDFEIEQEETERTRNLYRRLLQRTQHVKVWISFAQFELSSGKEGSLTKCRQIYEEANKTMRNCEEKEERLMLLESWRSFEEEFGTASDKERVDKLMPEKVKKRRKVQTDDGSDAGWEEYFDYIFPEDAANQPNLKLLAMAKLWKKQQQEKEDAEHHPDEDVDESES

SEQ ID NO: 10180 - protein, 1044 aa, Homo sapiens
MPPGVDCPMEFWTKEENQSVVVDFLLPTGVYLNFPVSRNANLSTIKQLLWHRAQYEPLFHMLSGPEAYVFTCINQTAEQQELEDEQRRLCDVQPFLPVLRLVAREGDRVKKLINSQISLLIGKGLHEFDSLCDPEVNDFRAKMCQFCEEAAARRQQLGWEAWLQYSFPLQLEPSAQTWGPGTLRLPNRALLVNVKFEGSEESFTFQVSTKDVPLALMACALRKKATVFRQPLVEQPEDYTLQVNGRHEYLYGSYPLCQFQYICSCLHSGLTPHLTMVHSSSILAMRDEQSNPAPQVQKPRAKPPPIPAKKPSSVSLWSLEQPFRIELIQGSKVNADERMKLVVQAGLFHGNEMLCKTVSSSEVSVCSEPVWKQRLEFDINICDLPRMARLCFALYAVIEKAKKARSTKKKSKKADCPIAWANLMLFDYKDQLKTGERCLYMWPSVPDEKGELLNPTGTVRSNPNTDSAAALLICLPEVAPHPVYYPALEKILELGRHSECVHVTEEEQLQLREILERRGSGELYEHEKDLVWKLRHEVQEHFPEALARLLLVTKWNKHEDVAQMLYLLCSWPELPVLSALELLDFSFPDCHVGSFAIKSLRKLTDDELFQYLLQLVQVLKYESYLDCELTKFLLDRALANRKIGHFLFWHLRSEMHVPSVALRFGLILEAYCRGSTHHMKVLMKQGEALSKLKALNDFVKLSSQKTPKPQTKELMHLCMRQEAYLEALSHLQSPLDPSTLLAEVCVEQCTFMDSKMKPLWIMYSNEEAGSGGSVGIIFKNGDDLRQDMLTLQMIQLMDVLWKQEGLDLRMTPYGCLPTGDRTGLIEVVLRSDTIANIQLNKSNMAATAAFNKDALLNWLKSKNPGEALDRAIEEFTLSCAGYCVATYVLGIGDRHSDNIMIRESGQLFHIDFGHFLGNFKTKFGINRERVPFILTYDFVHVIQQGKTNNSEKFERFRGYCERAYTILRRHGLLFLHLFALMRAAGLPELSCSKDIQYLKDSLALGKTEEEALKHFRVKFNEALRESWKTKVNWLAHNVSKDNRQ

SEQ ID NO: 10181 - protein, 535 aa, Homo sapiens
MAQQNMKVRPVLLKRNSLESVEFVKQPHHRRSKSQQVRFKEDGTTKNPTGLAEVDVQTPEDPAVMGKTQATRHHLPPTYSLSFPRSQKAGGFRNIAIQTSPSLRKHFPVFKRKRLTASKSLVEMPTASQSAIQVNGNLSEQDIVSSDLAYLRLAQHLEDGPRRVKVSHAFLPRVPKVQSNGPVSICLEAGTWRSLEKATAAIQVPDDIYHSPSWEARESALSPDRSAEVSNSIHPLDDTRPGDGRRVTPLDSEKSTSCLNATSVASHTPGTEELKPELLLPKDNSDDKDLGSLSSQSKETCVPSSPRTHSSPSQGSHSQPAHPGRASDCPSSSNNHQNLVSLKTNSASKSAPGCQEQTANNPTESDTLEFPNCPGSNHLPSSLSRSETKLQSNREISDINQIHLARGELCDLQGRLQSVEESLHSNQEKIKVLLNVIQDLEKARALTEGRNFYRTGQDLNNCSTCQNTACIIYSVEYDFRQQEGRFHEVLQSLEEAEPVEEASPPPKSPAEPPAPEKQDLRRKTKKVKKKCFWWI

SEQ ID NO: 10182 - protein, 691 aa, Homo sapiens
MCFRTKLSVSWVPLFLLLSRVFSTETDKPSAQDSRSRGSSGQPADLLQVLSAGDHPPHNHSRSLIKTLLEKTGCPRRRNGMQGDCNLCFEPDALLLIAGGNFEDQLREEVVQRVSLLLLYYIIHQEEICSSKLNMSNKEYKFYLHSLLSLRQDEDSSFLSQNETEDILAFTRQYFDTSQSQCMETKTLQKKSGIVSSEGANESTLPQLAAMIITLSLQGVCLGQGNLPSPDYFTEYIFSSLNRTNTLRLSELDQLLNTLWTRSTCIKNEKIHQFQRKQNNIITHDQDYSNFSSSMEKESEDGPVSWDQTCFSARQLVEIFLQKGLSLISKEDFKQMSPGIIQQLLSCSCHLPKDQQAKLPPTTLEKYGYSTVAVTLLTLGSMLGTALVLFHSCEENYRLILQLFVGLAVGTLSGDALLHLIPQVLGLHKQEAPEFGHFHESKGHIWKLMGLIGGIHGFFLIEKCFILLVSPNDKQGLSLVNGHVGHSHHLALNSELSDQAGRGKSASTIQLKSPEDSQAAEMPIGSMTASNRKCKAISLLAIMILVGDSLHNFADGLAIGAAFSSSSESGVTTTIAILCHEIPHEMGDFAVLLSSGLSMKTAILMNFISSLTAFMGLYIGLSVSADPCVQDWIFTVTAGMFLYLSLVEMLPEMTHVQTQRPWMMFLLQNFGLILGWLSLLLLAIYEQNIKI

SEQ ID NO: 10183 - protein, 690 aa, Homo sapiens
MCFRTKLSVSWVPLFLLLSRVFSTETDKPSAQDSRSRGSSGQPADLLQVLSAGDHPPHNHSRSLIKTLLEKTGCPRRRNGMQGDCNLCFEPDALLLIAGGNFEDQLREEVVQRVSLLLLYYIIHQEEICSSKLNMSNKEYKFYLHSLLSLRQDEDSSFLSQNETEDILAFTRQYFDTSQSQCMETKTLQKKSGIVSSEGANESTLPQLAAMIITLSLQGVCLGQGNLPSPDYFTEYIFSSLNRTNTLRLSELDQLLNTLWTRSTCIKNEKIHQFQRKQNNIITHDQDYSNFSSSMEKESEDGPVSWDQTCFSARQLVEIFLQKGLSLISKEDFKQMSPGIIQQLLSCSCHLPKDQQAKLPPTTLEKYGYSTVAVTLLTLGSMLGTALVLFHSCEENYRLILQLFVGLAVGTLSGDALLHLIPQVLGLHKQEAPEFGHFHESKGHIWKLMGLIGGIHGFFLIEKCFILLVSPNDKGLSLVNGHVGHSHHLALNSELSDQAGRGKSASTIQLKSPEDSQAAEMPIGSMTASNRKCKAISLLAIMILVGDSLHNFADGLAIGAAFSSSSESGVTTTIAILCHEIPHEMGDFAVLLSSGLSMKTAILMNFISSLTAFMGLYIGLSVSADPCVQDWIFTVTAGMFLYLSLVEMLPEMTHVQTQRPWMMFLLQNFGLILGWLSLLLLAIYEQNIKI

SEQ ID NO: 10184 - protein, 654 aa, Homo sapiens
MCFRTKLSVSWVPLFLLLSRVFSTETDKPSAQDSRSRGSSGQPADLLQVLSAGDHPPHNHSRSLIKTLLEKTGCPRRRNGMQGDCNLCFEPDALLLIAGGNFEDQLREEVVQRVSLLLLYYIIHQEEICSSKLNMSNKEYKFYLHSLLSLRQDEDSSFLSQNETEDILAFTRQYFDTSQSQCMETKTLQKKSGIVSSEGANESTLPQLAAMIITLSLQGVCLGQGNLPSPDYFTEYIFSSLNRTNTLRLSELDQLLNTLWTRSTCIKNEKIHQFQRKQNNIITHDQDYSNFSSSMEKESEDGPVSWDQTCFSARQLVEIFLQKGLSLISKEDFKQMSPGIIQQLLSCSCHLPKDQQAKLPPTTLEKYGYSTVAVTLLTLGSMLGTALVLFHSCEENYRLILQLFVGLAVGTLSGDALLHLIPQVLGLHKQEAPEFGHFHESKGHIWKLMGLIGGIHGFFLIEKCFILLVSPNDKKSPEDSQAAEMPIGSMTASNRKCKAISLLAIMILVGDSLHNFADGLAIGAAFSSSSESGVTTTIAILCHEIPHEMGDFAVLLSSGLSMKTAILMNFISSLTAFMGLYIGLSVSADPCVQDWIFTVTAGMFLYLSLVEMLPEMTHVQTQRPWMMFLLQNFGLILGWLSLLLLAIYEQNIKI

SEQ ID NO: 10185 - protein, 673 aa, Homo sapiens
MATGANATPLGKLGPPGLPPLPGPKGGFEPGPPPAPGPGAGLLAPGPPPPPPVGSMGALTAAFPFAALPPPPPPPPPPPPQQPPPPPPPPSPGASYPPPQPPPPPPLYQRVSPPQPPPPQPPRKDQQPGPAGGGGDFPSKKRKRSRWNQDTMEQKTVIPGMPTVIPPGLTREQERAYIVQLQIEDLTRKLRTGDLGIPPNPEDRSPSPEPIYNSEGKRLNTREFRTRKKLEEERHNLITEMVALNPDFKPPADYKPPATRVSDKVMIPQDEYPEINFVGLLIGPRGNTLKNIEKECNAKIMIRGKGSVKEGKVGRKDGQMLPGEDEPLHALVTANTMENVKKAVEQIRNILKQGIETPEDQNDLRKMQLRELARLNGTLREDDNRILRPWQSSETRSITNTTVCTKCGGAGHIASDCKFQRPGDPQSAQDKARMDKEYLSLMAELGEAPVPASVGSTSGPATTPLASAPRPAAPANNPPPPSLMSTTQSRPPWMNSGPSESRPYHGMHGGGPGGPGGGPHSFPHPLPSLTGGHGGHPMQHNPNGPPPPWMQPPPPPMNQGPHPPGHHGPPPMDQYLGSTPVGSGVYRLHQGKGMMPPPPMGMMPPPPPPPSGQPPPPPSGPLPPWQQQQQQPPPPPPPSSSMASSTPLPWQQRSLPAAAMARAMRVRTFRAHW

SEQ ID NO: 10186 - protein, 639 aa, Homo sapiens
MATGANATPLDFPSKKRKRSRWNQDTMEQKTVIPGMPTVIPPGLTREQERAYIVQLQIEDLTRKLRTGDLGIPPNPEDRSPSPEPIYNSEGKRLNTREFRTRKKLEEERHNLITEMVALNPDFKPPADYKPPATRVSDKVMIPQDEYPEINFVGLLIGPRGNTLKNIEKECNAKIMIRGKGSVKEGKVGRKDGQMLPGEDEPLHALVTANTMENVKKAVEQIRNILKQGIETPEDQNDLRKMQLRELARLNGTLREDDNRILRPWQSSETRSITNTTVCTKCGGAGHIASDCKFQRPGDPQSAQDKARMDKEYLSLMAELGEAPVPASVGSTSGPATTPLASAPRPAAPANNPPPPSLMSTTQSRPPWMNSGPSESRPYHGMHGGGPGGPGGGPHSFPHPLPSLTGGHGGHPMQHNPNGPPPPWMQPPPPPMNQGPHPPGHHGPPPMDQYLGSTPVGSGVYRLHQGKGMMPPPPMGMMPPPPPPPSGQPPPPPSGPLPPWQQQQQQPPPPPPPSSSMASSTPLPWQQNTTTTTTSAGTGSIPPWQQQQAAAAASPGAPQMQGNPTMVPLPPGVQPPLPPGAPPPPPPPPPGSAGMMYAPPPPPPPPMDPSNFVTMMGMGVAGMPPFGMPPAPPPPPPQN

SEQ ID NO: 10187 - protein, 571 aa, Homo sapiens
MATGANATPLDFPSKKRKRSRWNQDTMEQKTVIPGMPTVIPPGLTREQERAYIVQLQIEDLTRKLRTGDLGIPPNPEDRSPSPEPIYNSEGKRLNTREFRTRKKLEEERHNLITEMVALNPDFKPPADYKPPATRVSDKVMIPQDEYPEINFVGLLIGPRGNTLKNIEKECNAKIMIRGKGSVKEGKVGRKDGQMLPGEDEPLHALVTANTMENVKKAVEQIRNILKQGIETPEDQNDLRKMQLRELARLNGTLREDDNRILRPWQSSETRSITNTTVCTKCGGAGHIASDCKFQRPGDPQSAQDKARMDKEYLSLMAELGEAPVPASVGSTSGPATTPLASAPRPAAPANNPPPPSLMSTTQSRPPWMNSGPSESRPYHGMHGGGPGGPGGGPHSFPHPLPSLTGGHGGHPMQHNPNGPPPPWMQPPPPPMNQGPHPPGHHGPPPMGKSVPGKYACGLWGLSPASRKRYDAATTYGHDAAAAAASQWAAPTPSLWSSSPMATTAAAASATPSAQQQYGFQYPLAMAAKIPPRGGDGPSHESEDFPRPLVTLPGRQPQQRPWWTGWFGKAA

SEQ ID NO: 10188 - protein, 501 aa, Homo sapiens
MEQQDQSMKEGRLTLVLALATLIAAFGSSFQYGYNVAAVNSPALLMQQFYNETYYGRTGEFMEDFPLTLLWSVTVSMFPFGGFIGSLLVGPLVNKFGRKGALLFNNIFSIVPAILMGCSRVATSFELIIISRLLVGICAGVSSNVVPMYLGELAPKNLRGALGVVPQLFITVGILVAQIFGLRNLLANVDGWPILLGLTGVPAALQLLLLPFFPESPRYLLIQKKDEAAAKKALQTLRGWDSVDREVAEIRQEDEAEKAAGFISVLKLFRMRSLRWQLLSIIVLMGGQQLSGVNAIYYYADQIYLSAGVPEEHVQYVTAGTGAVNVVMTFCAVFVVELLGRRLLLLLGFSICLIACCVLTAALALQDTVSWMPYISIVCVISYVIGHALGPSPIPALLITEIFLQSSRPSAFMVGGSVHWLSNFTVGLIFPFIQEGLGPYSFIVFAVICLLTTIYIFLIVPETKAKTFIEINQIFTKMNKVSEVYPEKEELKELPPVTSEQ

SEQ ID NO: 10189 - protein, 754 aa, Homo sapiens
MSRPLSDQEKRKQISVRGLAGVENVTELKKNFNRHLHFTLVKDRNVATPRDYYFALAHTVRDHLVGRWIRTQQHYYEKDPKKISGGWQMEEADDWLRYGNPWEKARPEFTLPVHFYGHVEHTSQGAKWVDTQVVLAMPYDTPVPGYRNNVVNTMRLWSAKAPNDFNLKDFNVGGYIQAVLDRNLAENISRVLYPNDNFFEGKELRLKQEYFVVAATLQDIIRRFKSSKFGCRDPVRTNFDAFPDKVAIQLNDTHPSLAIPELMRILVDLERMDWDKAWDVTVRTCAYTNHTVLPEALERWPVHLLETLLPRHLQIIYEINQRFLNRVAAAFPGDVDRLRRMSLVEEGAVKRINMAHLCIAGSHAVNGVARIHSEILKKTIFKDFYELEPHKFQNKTNGITPRRWLVLCNPGLAEVIAERIGEDFISDLDQLRKLLSFVDDEAFIRDVAKVKQENKLKFAAYLEREYKVHINPNSLFDIQVKRIHEYKRQLLNCLHVITLYNRIKREPNKFFVPRTVMIGGKAAPGYHMAKMIIRLVTAIGDVVNHDPAVGDRLRVIFLENYRVSLAEKVIPAADLSEQISTAGTEASGTGNMKFMLNGALTIGTMDGANVEMAEEAGEENFFIFGMRVEDVDKLDQRGYNAQEYYDRIPELRQVIEQLSSGFFSPKQPDLFKDIVNMLMHHDRFKVFADYEDYIKCQEKVSALYKNPREWTRMVIRNIATSGKFSSDRTIAQYAREIWGVEPSRQRLPAPDEAI

SEQ ID NO: 10190 - protein, 313 aa, Homo sapiens
MRALVLLLSLFLLGGQAQHVSDWTYSEGALDEAHWPQHYPACGGQRQSPINLQRTKVRYNPSLKGLNMTGYETQAGEFPMVNNGHTVQISLPSTMRMTVADGTVYIAQQMHFHWGGASSEISGSEHTVDGIRHVIEIHIVHYNSKYKSYDIAQDAPDGLAVLAAFVEVKNYPENTYYSNFISHLANIKYPGQRTTLTGLDVQDMLPRNLQHYYTYHGSLTTPPCTENVHWFVLADFVKLSRTQVWKLENSLLDHRNKTIHNDYRRTQPLNHRVVESNFPNQGKGHGGHRGRSQNPRVQPTSTRHPLALGSLEA

SEQ ID NO: 10191 - protein, 248 aa, Homo sapiens
MRALVLLLSLFLLGGQAQHVSDWTYSVQISLPSTMRMTVADGTVYIAQQMHFHWGGASSEISGSEHTVDGIRHVIEIHIVHYNSKYKSYDIAQDAPDGLAVLAAFVEVKNYPENTYYSNFISHLANIKYPGQRTTLTGLDVQDMLPRNLQHYYTYHGSLTTPPCTENVHWFVLADFVKLSRTQVWKLENSLLDHRNKTIHNDYRRTQPLNHRVVESNFPNQEYTLGSEFQFYLHKIEEILDYLRRALN

SEQ ID NO: 10192 - protein, 308 aa, Homo sapiens
MRALVLLLSLFLLGGQAQHVSDWTYSEGALDEAHWPQHYPACGGQRQSPINLQRTKVRYNPSLKGLNMTGYETQAGEFPMVNNGHTVQISLPSTMRMTVADGTVYIAQQMHFHWGGASSEISGSEHTVDGIRHVIEIHIVHYNSKYKSYDIAQDAPDGLAVLAAFVEVKNYPENTYYSNFISHLANIKYPGQRTTLTGLDVQDMLPRNLQHYYTYHGSLTTPPCTENVHWFVLADFVKLSRTQVWKLENSLLDHRNKTIHNDYRRTQPLNHRVVESNFPNQEYTLGSEFQFYLHKIEEILDYLRRALN

SEQ ID NO: 10193 - protein, 481 aa, Homo sapiens
MMLKSITESFATAIHGLKVGHLTDRVIQRSKRMILDTLGAGFLGTTTEVFHIASQYSKIYSSNISSTVWGQPDIRLPPTYAAFVNGVAIHSMDFDDTWHPATHPSGAVLPVLTALAEALPRSPKFSGLDLLLAFNVGIEVQGRLLHFAKEANDMPKRFHPPSVVGTLGSAAAASKFLGLSSTKCREALAIAVSHAGAPMANAATQTKPLHIGNAAKHGIEAAFLAMLGLQGNKQVLDLEAGFGAFYANYSPKVLPSIASYSWLLDQQDVAFKRFPAHLSTHWVADAAASVRKHLVAERALLPTDYIKRIVLRIPNVQYVNRPFPVSEHEARHSFQYVACAMLLDGGITVPSFHECQINRPQVRELLSKVELEYPPDNLPSFNILYCEISVTLKDGATFTDRSDTFYGHWRKPLSQEDLEEKFRANASKMLSWDTVESLIKIVKNLEDLEDCSVLTTLLKGPSPPEVASNSPACNNSITNLS

SEQ ID NO: 10194 - protein, 1298 aa, Homo sapiens
MDDPFSPCRRLNSTQGEIRVGPSHQAKLPDLQPFPSPDGDTVTQHEELVWMPGVNDCDLLMYLRAARSMAAFAGMCDGGSTEDGCVAASRDDTTLNALNTLHESGYDAGKALQRLVKKPVPKLIEKCWTEDEVKRFVKGLRQYGKNFFRIRKELLPNKETGELITFYYYWKKTPEAASSRAHRRHRRQAVFRRIKTRTASTPVNTPSRPPSSEFLDLSSASEDDFDSEDSEQELKGYACRHCFTTTSKDWHHGGRENILLCTDCRIHFKKYGELPPIEKPVDPPPFMFKPVKEEDDGLSGKHSMRTRRSRGSMSTLRSGRKKQPASPDGRTSPINEDIRSSGRNSPSAASTSSNDSKAETVKKSAKKVKEEASSPLKSNKRQREKVASDTEEADRTSSKKTKTQEISRPNSPSEGEGESSDSRSVNDEGSSDPKDIDQDNRSTSPSIPSPQDNESDSDSSAQQQMLQAQPPALQAPTGVTPAPSSAPPGTPQLPTPGPTPSATAVPPQGSPTASQAPNQPQAPTAPVPHTHIQQAPALHPQRPPSPHPPPHPSPHPPLQPLTGSAGQPSAPSHAQPPLHGQGPPGPHSLQAGPLLQHPGPPQPFGLPPQASQGQAPLGTSPAAAYPHTSLQLPASQSALQSQQPPREQPLPPAPLAMPHIKPPPTTPIPQLPAPQAHKHPPHLSGPSPFSMNANLPPPPALKPLSSLSTHHPPSAHPPPLQLMPQSQPLPSSPAQPPGLTQSQNLPPPPASHPPTGLHQVAPQPPFAQHPFVPGGPPPITPPTCPSTSTPPAGPGTSAQPPCSGAAASGGSIAGGSSCPLPTVQIKEEALDDAEEPESPPPPPRSPSPEPTVVDTPSHASQSARFYKHLDRGYNSCARTDLYFMPLAGSKLAKKREEAIEKAKREAEQKAREEREREKEKEKEREREREREREAERAAKASSSAHEGRLSDPQLSGPGHMRPSFEPPPTTIAAVPPYIGPDTPALRTLSEYARPHVMSPTNRNHPFYMPLNPTDPLLAYHMPGLYNVDPTIRERELREREIREREIRERELRERMKPGFEVKPPELDPLHPAANPMEHFARHSALTIPPTAGPHPFASFHPGLNPLERERLALAGPQLRPEMSYPDRLAAERIHAERMASLTSDPLARLQMFNVTPHHHQHSHIHSHLHLHQQDPLHQGSAGPVHPLVDPLTAGPHLARFPYPPGTLPNPLLGQPPHEHEMLRHPVFGTPYPRDLPGAIPPPMSAAHQLQAMHAQSAELQRLAMEQQWLHGHPHMHGGHLPSQEDYYSRLKKEGDKQL

SEQ ID NO: 10195 - protein, 591 aa, Homo sapiens
MSLLTNYEGLRHQIERLVRENEELKKLVRLIRENHELKSAIKTQAGGLGISGFTSGLGEATAGLSSRQNNGVFLPPSPAVANERVLEEVGIMALAPLAEMLTSLQPSATPGSLMSPLTGTLSTLLSGPAPTSQSSPLTSFLTSPIAGPLTGTLASSLGLPSTGTLTPSSLVAGPVAMSQSSPLIAPVMGTVAVSLSSPLLSSTATPPGVSQNLLANPMSNLVLPEAPRLRLAEPLRGGPTGPQSPACVVPTATTKVPLSTEPPQSTQDPEPLSMAFAGAPLQTSTPIGAMGTPAPKTAFSFNTSDTQAQPSAAQEQVVPASVPTSPTTSPTVTVLASAPALAPQVATSYTPSSTTHIAQGAPHPPSRMHNSPTQNLPVPHCPPHNAHSPPRTSSSPASVNDSRGPRTTEPSTKSMMEVERKLAHRKTSKFPENPRESKQLAWERLVGEIAFQLDRRILSSIFPERVRLYGFTVSNIPEKIIQASLNPSDHKLDEKLCQRLTQRYVSVMNRLQSLGYNGRVHPALTEQLVNAYGILRERPELAASEGGPYTVDFLQRVVVETVHPGMLADALLLLSCLSQLAHDDGKPMFIW

SEQ ID NO: 10196 - protein, 148 aa, Homo sapiens
MAGTLDLDKGCTVEELLRGCIEAFDDSGKVRDPQLVRMFLMMHPWYIPSSQLAAKLLHIYQQSRKDNSNSLQVKTCHLVRYWISAFPAEFDLNPELAEQIKELKALLDQEGNRRHSSLIDIDSVCVGGAQRAGGALSILYHLCLINVC

SEQ ID NO: 10197 - protein, 610 aa, Homo sapiens
MAGTLDLDKGCTVEELLRGCIEAFDDSGKVRDPQLVRMFLMMHPWYIPSSQLAAKLLHIYQQSRKDNSNSLQVKTCHLVRYWISAFPAEFDLNPELAEQIKELKALLDQEGNRRHSSLIDIDSVPTYKWKRQVTQRNPVGQKKRKMSLLFDHLEPMELAEHLTYLEYRSFCKILFQDYHSFVTHGCTVDNPVLERFISLFNSVSQWVQLMILSKPTAPQRALVITHFVHVAEKLLQLQNFNTLMAVVGGLSHSSISRLKETHSHVSPETIKLWEGLTELVTATGNYGNYRRRLAACVGFRFPILGVHLKDLVALQLALPDWLDPARTRLNGAKMKQLFSILEELAMVTSLRPPVQANPDLLSLLTVSLDQYQTEDELYQLSLQREPRSKSSPTSPTSCTPPPRPPVLEEWTSAAKPKLDQALVVEHIEKMVESVFRNFDVDGDGHISQEEFQIIRGNFPYLSAFGDLDQNQDGCISREEMVSYFLRSSSVLGGRMGFVHNFQESNSLRPVACRHCKALILGIYKQGLKCRACGVNCHKQCKDRLSVECRRRAQSVSLEGSAPSPSPMHSHHHRAFSFSLPRPGRRGSRPPAEIREEEVQTVEDGVFDIHL

SEQ ID NO: 10198 - protein, 1045 aa, Homo sapiens
MEGLEEAEANCSVAFAEAQRWVEAVTEKNFETKDFRASLENGVLLCDLINKLKPGVIKKINRLSTPIAGLDNINVFLKACEQIGLKEAQLFHPGDLQDLSNRVTVKQEETDRRVKNVLITLYWLGRKAQSNPYYNGPHLNLKAFENLLGQALTKALEDSSFLKRSGRDSGYGDIWCPERGEFLAPPRHHKREDSFESLDSLGSRSLTSCSSDITLRGGREGFESDTDSEFTFKMQDYNKDDMSYRRISAVEPKTALPFNRFLPNKSRQPSYVPAPLRKKKPDKHEDNRRSWASPVYTEADGTFSRLFQKIYGENGSKSMSDVSAEDVQNLRQLRYEEMQKIKSQLKEQDQKWQDDLAKWKDRRKSYTSDLQKKKEEREEIEKQALEKSKRSSKTFKEMLQDRESQNQKSTVPSRRRMYSFDDVLEEGKRPPTMTVSEASYQSERVEEKGATYPSEIPKEDSTTFAKREDRVTTEIQLPSQSPVEEQSPASLSSLRSRSTQMESTRVSASLPRSYRKTDTVRLTSVVTPRPFGSQTRGISSLPRSYTMDDAWKYNGDVEDIKRTPNNVVSTPAPSPDASQLASSLSSQKEVAATEEDVTRLPSPTSPFSSLSQDQAATSKATLSSTSGLDLMSESGEGEISPQREVSRSQDQFSDMRISINQTPGKSLDFGFTIKWDIPGIFVASVEAGSPAEFSQLQVDDEIIAINNTKFSYNDSKEWEEAMAKAQETGHLVMDVRRYGKAGSPETKWIDATSGIYNSEKSSNLSVTTDFSESLQSSNIESKEINGIHDESNAFESKASESISLKNLKRRSQFFEQGSSDSVVPDLPVPTISAPSRWVWDQEEERKRQERWQKEQDRLLQEKYQREQEKLREEWQRAKQEAERENSKYLDEELMVLSSNSMSLTTREPSLATWEATWSEGSKSSDREGTRAGEEERRQPQEEVVHEDQGKKPQDQLVIERERKWEQQLQEEQEQKRLQAEAEEQKRPAEEQKRQAEIERETSVRIYQYRRPVDSYDIPKTEEASSGFLPGDRNKSRSTTELDDYS

SEQ ID NO: 10199 - protein, 1549 aa, Homo sapiens
MQLVELDVSRNDIPEIPESIKFCKALEIADFSGNPLSRLPDGFTQLRSLAHLALNDVSLQALPGDVGNLANLVTLELRENLLKSLPASLSFLVKLEQLDLGGNDLEVLPDTLGALPNLRELWLDRNQLSALPPELGNLRRLVCLDVSENRLEELPAELGGLVLLTDLLLSQNLLRRLPDGIGQLKQLSILKVDQNRLCEVTEAIGDCENLSELILTENLLMALPRSLGKLTKLTNLNVDRNHLEALPPEIGGCVALSVLSLRDNRLAVLPPELAHTTELHVLDVAGNRLQSLPFALTHLNLKALWLAENQAQPMLRFQTEDDARTGEKVLTCYLLPQQPPPSLEDAGQQGSLSETWSDAPPSRVSVIQFLEAPIGDEDAEEAAAEKRGLQRRATPHPSELKVMKRSIEGRRSEACPCQPDSGSPLPAEEEKRLSAESGLSEDSRPSASTVSEAEPEGPSAEAQGGSQQEATTAGGEEDAEEDYQEPTVHFAEDALLPGDDREIEEGQPEAPWTLPGGRQRLIRKDTPHYKKHFKISKLPQPEAVVALLQGMQPDGEGPVAPGGWHNGPHAPWAPRAQKEEEEEEEGSPQEEEEEEEEENRAEEEEASTEEEDKEGAVVSAPSVKGVSFDQANNLLIEPARIEEEELTLTILRQTGGLGISIAGGKGSTPYKGDDEGIFISRVSEEGPAARAGVRVGDKLLEVNGVALQGAEHHEAVEALRGAGTAVQMRVWRERMVEPENAVTITPLRPEDDYSPRERRGGGLRLPLLPPESPGPLRQRHVACLARSERGLGFSIAGGKGSTPYRAGDAGIFVSRIAEGGAAHRAGTLQVGDRVLSINGVDVTEARHDHAVSLLTAASPTIALLLEREAGGPLPPSPLPHSSPPTAAVATTSITTATPGVPGLPSLAPSLLAAALEGPYPVEEIRLPRAGGPLGLSIVGGSDHSSHPFGVQEPGVFISKVLPRGLAARSGLRVGDRILAVNGQDVRDATHQEAVSALLRPCLELSLLVRRDPAPPGLRELCIQKAPGERLGISIRGGARGHAGNPRDPTDEGIFISKVSPTGAAGRDGRLRVGLRLLEVNQQSLLGLTHGEAVQLLRSVGDTLTVLVCDGFEASTDAALEVSPGVIANPFAAGIGHRNSLESISSIDRELSPEGPGKEKELPGQTLHWGPEATEAAGRGLQPLKLDYRALAAVPSAGSVQRVPSGAAGGKMAESPCSPSGQQPPSPPSPDELPANVKQAYRAFAAVPTSHPPEDAPAQPPTPGPAASPEQLSFRERQKYFELEVRVPQAEGPPKRVSLVGADDLRKMQEEEARKLQQKRAQMLREAAEAGAEARLALDGETLGEEEQEDEQPPWASPSPTSRQSPASPPPLGGGAPVRTAKAERRHQERLRVQSPEPPAPERALSPAELRALEAEKRALWRAARMKSLEQDALRAQMVLSRSQEGRGTRGPLERLAEAPSPAPTPSPTPVEDLGPQTSTSPGRLSPDFAEELRSLEPSPSPGPQEEDGEVALVLLGRPSPGAVGPEDVALCSSRRPVRPGRRGLGPVPS

SEQ ID NO: 10200 - protein, 1631 aa, Homo sapiens
MEGLEEAEANCSVAFAEAQRWVEAVTEKNFETKDFRASLENGVLLCDLINKLKPGVIKKINRLSTPIAGLDNINVFLKACEQIGLKEAQLFHPGDLQDLSNRVTVKQEETDRRVKNVLITLYWLGRKAQSNPYYNGPHLNLKAFENLLGQALTKALEDSSFLKRSGRDSGYGDIWCPERGEFLAPPRHHKREDSFESLDSLGSRSLTSCSSDITLRGGREGFESDTDSEFTFKMQDYNKDDMSYRRISAVEPKTALPFNRFLPNKSRQPSYVPAPLRKKKPDKHEDNRRSWASPVYTEADGTFSSNQRRIWGTNVENWPTVQGTSKSSCYLEEEKAKTRSIPNIVKDDLYVRKLSPVMPNPGNAFDQFLPKCWTPEDVNWKRIKRETYKPWYKEFQGFSQFLLLQALQTYSDDILSSETHTKIDPTSGPRLITRRKNLSYAPGYRRDDLEMAALDPDLENDDFFVRKTGAFHANPYVLRAFEDFRKFSEQDDSVERDIILQCREGELVLPDLEKDDMIVRRIPAQKKEVPLSGAPDRYHPVPFPEPWTLPPEIQAKFLCVLERTCPSKEKSNSCRILVPSYRQKKDDMLTRKIQSWKLGTTVPPISFTPGPCSEADLKRWEAIREASRLRHKKRLMVERLFQKIYGENGSKSMSDVSAEDVQNLRQLRYEEMQKIKSQLKEQDQKWQDDLAKWKDRRKSYTSDLQKKKEEREEIEKQALEKSKRSSKTFKEMLQDRESQNQKSTVPSRRRMYSFDDVLEEGKRPPTMTVSEASYQSERVEEKGATYPSEIPKEDSTTFAKREDRVTTEIQLPSQSPVEEQSPASLSSLRSRSTQMESTRVSASLPRSYRKTDTVRLTSVVTPRPFGSQTRGISSLPRSYTMDDAWKYNGDVEDIKRTPNNVVSTPAPSPDASQLASSLSSQKEVAATEEDVTRLPSPTSPFSSLSQDQAATSKATLSSTSGLDLMSESGEGEISPQREVSRSQDQFSDMRISINQTPGKSLDFGFTIKWDIPGIFVASVEAGSPAEFSQLQVDDEIIAINNTKFSYNDSKEWEEAMAKAQETGHLVMDVRRYGKAGSPETKWIDATSGIYNSEKSSNLSVTTDFSESLQSSNIESKEINGIHDESNAFESKASESISLKNLKRRSQFFEQGSSDSVVPDLPVPTISAPSRWVWDQEEERKRQERWQKEQDRLLQEKYQREQEKLREEWQRAKQEAERENSKYLDEELMVLSSNSMSLTTREPSLATWEATWSEGSKSSDREGTRAGEEERRQPQEEVVHEDQGKKPQDQLVIERERKWEQQLQEEQEQKRLQAEAEEQKRPAEEQKRQAEIERETSVRIYQYRRPVDSYDIPKTEEASSGFLPGDRNKSRSTTELDDYSTNKNGNNKYLDQIGNMTSSQRRSKKEQVPSGAELERQQILQEMRKRTPLHNDNSWIRQRSASVNKEPVSLPGIMRRGESLDNLDSPRSNSWRQPPWLNQPTGFYASSSVQDFSRPPPQLVSTSNRAYMRNPSSSVPPPSAGSVKTSTTGVATTQSPTPRSHSPSASQSGSQLRNRSVSGKRICSYCNNILGKGAAMIIESLGLCYHLHCFKCVACECDLGGSSSGAEVRIRNHQLYCNDCYLRFKSGRPTAM

SEQ ID NO: 10201 - protein, 1642 aa, Homo sapiens
MASGSRWRPTPPPLLLLLLLALAARADGLEFGGGPGQWARYARWAGAASSGELSFSLRTNATRALLLYLDDGGDCDFLELLLVDGRLRLRFTLSCAEPATLQLDTPVADDRWHMVLLTRDARRTALAVDGEARAAEVRSKRREMQVASDLFVGGIPPDVRLSALTLSTVKYEPPFRGLLANLKLGERPPALLGSQGLRGATADPLCAPARNPCANGGLCTVLAPGEVGCDCSHTGFGGKFCSEEEHPMEGPAHLTLNSEGKEEFVATFKGNEFFCYDLSHNPIQSSTDEITLAFRTLQRNGLMLHTGKSADYVNLSLKSGAVWLVINLGSGAFEALVEPVNGKFNDNAWHDVRVTRNLRQHAGIGHAMVTISVDGILTTTGYTQEDYTMLGSDDFFYIGGSPNTADLPGSPVSNNFMGCLKDVVYKNNDFKLELSRLAKEGDPKMKLQGDLSFRCEDVAALDPVTFESPEAFVALPRWSAKRTGSISLDFRTTEPNGLLLFSQGRRAGGGAGSHSSAQRADYFAMELLDGHLYLLLDMGSGGIKLRASSRKVNDGEWCHVDFQRDGRKGSISVNSRSTPFLATGDSEILDLESELYLGGLPEGGRVDLPLPPEVWTAALRAGYVGCVRDLFIDGRSRDLRGLAEAQGAVGVAPFCSRETLKQCASAPCRNGGVCREGWNRFICDCIGTGFLGRVCEREATVLSYDGSMYMKIMLPNAMHTEAEDVSLRFMSQRAYGLMMATTSRESADTLRLELDGGQMKLTVNLGKGPETLFAGHKLNDNEWHTVRVVRRGKSLQLSVDNVTVEGQMAGAHMRLEFHNIETGIMTERRFISVVPSNFIGHLSGLVFNGQPYMDQCKDGDITYCELNARFGLRAIVADPVTFKSRSSYLALATLQAYASMHLFFQFKTTAPDGLLLFNSGNGNDFIVIELVKGYIHYVFDLGNGPSLMKGNSDKPVNDNQWHNVVVSRDPGNVHTLKIDSRTVTQHSNGARNLDLKGELYIGGLSKNMFSNLPKLVASRDGFQGCLASVDLNGRLPDLIADALHRIGQVERGCDGPSTTCTEESCANQGVCLQQWDGFTCDCTMTSYGGPVCNDPGTTYIFGKGGALITYTWPPNDRPSTRMDRLAVGFSTHQRSAVLVRVDSASGLGDYLQLHIDQGTVGVIFNVGTDDITIDEPNAIVSDGKYHVVRFTRSGGNATLQVDSWPVNERYPAGRQLTIFNSQAAIKIGGRDQGRPFQGQVSGLYYNGLKVLALAAESDPNVRTEGHLRLVGEGPSVLLSAETTATTLLADMATTIMETTTTMATTTTRRGRSPTLRDSTTQNTDDLLVASAECPSDDEDLEECEPSTGGELILPIITEDSLDPPPVATRSPFVPPPPTFYPFLTGVGATQDTLPPPAARRPPSGGPCQAERDDSDCEEPIEASGFASGEVFDSSLPPTDDEDFYTTFPLVTDRTTLLSPRKPAPRPNLRTDGATGAPGVLFAPSAPAPNLPAGKMNHRDPLQPLLENPPLGPGAPTSFEPRRPPPLRPGVTSAPGFPHLPTANPTGPGERGPPGAVEVIRESSSTTGMVVGIVAAAALCILILLYAMYKYRNRDEGSYQVDQSRNYISNSAQSNGAVVKEKAPAAPKTPSKAKKNKDKEYYV

SEQ ID NO: 10202 - protein, 4416 aa, Homo sapiens
MGSSAAAAAAAAAAADSAQWLSVKEETIFLHDGLIRVTDLAELPSEILGAPEAADTDLEILTFETKNPSELAERLRSVCGNQSNAYARLLEYRLNALRGLWNAQRQLALEEQHERESSGDEETLALLKRQGLLQQPEQAPFTSRMGLLLVFPLIQSQSRTDPSLCNITAEVLLNCLRDCQPLSLTKEPADCLNGIETLLCSWLEETSDTGRHIPHKQKENAAAALVALACARGSLKTFVHTVHLLQKQTDLGSLPVADVLYRLLLLEGGPGSPSCLLGGKHIVSWGYEDMLPAPDSNTGSSSENKDADLGRCLTADGLYLYTTNSVGRGVSKLGSGLHGTLRGFVYCRNEELEPGWVAFGSGSLLHRPVSFDNKPHSLFQVIDQNTLQVCQVVPMPANHLPIGSTMSTVHLSSDGTYFYWIWSPASLNEKTPKGHSVFMDIFELVVENGVFVANPLQERTILMRKEGESAKSINEMLLSRLSRYRASPSATLAALTGSTISNTLKEDQAANTSCGLPLKMLRKTPIYTCGTYLVMLVPPPGGSGSSATRSLFGGTSGLSSLKILASSLVYNISDGQFTSRADLIDAAGSSLGRGALVPGLGACYDTVNNMLWTCSNDYIDQWCNPGNQAFHYVCQRLGVSHIITEPKEEAITTNEVINQLLHHVGAMCIHQLNLLATNPNLPITSVLGKQHPIEAHHLSSICDIMEKAMVNGDTCIIRCILVVFQVVFKFFFSPQTERNRDIIRRSGLLLWQLLMAPKDQICPEIQKEVCLAISSGLNILYPGETEINNLLKLVLTEGERNSGLSQLRDVILTNLAEQLQNNRFGSDEDDHYRLNDELLHYILKIVVRESCILITKCQTVSKDDFQKLLSTVPAASSCLRYLMAVQNHLLSNTILIKPDENDDSDSSLQGETLKELKVSILALATQILTGCDEVLEMLQQVTTALINSDIADREQRLKGLEQVTKATMLGHLLPVLLTSLMHPNLQTLIMADALMPQLVQLVLYTSQTALLLKTQCPVFAEVGCSPCGAPDQKCRLFPDERMLEEKEEPGFLTGLKIPAPWAAGKTVETVHPVRDNYKFKETVHIPGARCLYLRFDSRCSSQYDYDKLVIYAGPNTNSRKVAEYGGNTLGYGSRSVLGTGWPKDLVKVEGDTVTFSFEMRSGREHNTPDKAMWGFACTVRAQESSEDVSGGLPFLVDLALGLSVLACSMLRILYNGPEITKEEEACQELLRSKLLQRCQWQVEANGVISPALTPSPSPLPLTIEEDREFTYPSDVLVPPVGNYFDLPRIRLPPGIMIKLREISGRARPQFRPSIKEVIQPDVMEEMVVSCVIKHLNLVDALQSLINFQYQEEHAEEYDLLCKIMGETFKKLNAMERQLQSVAELEQKWQSEVDDAMQGKLENNMPFFYDYHFNENKMKELELLCSMKEVSFDGNDLENMVLSLREKFLQEVNSLIQKPSHPLAKTKTLVKSLMNRAELLLHVTIAAQSGLTRSISGTPAETPACKSASETKVISHAVRQPVFLRSMSAPSDLEMIGNEDLEFTRANQRRRHVTSHRSSSFTLLQSLAIEDSRDKPTYSVLLGQLFAFIGTNPDQAVSSSSFLLAAQTRWRRGNTRKQALVHMRELLTAAVRVGGVTHLVGPVTMVLQGGPRIEELTCGGMVEQVQEAFGETMTSVVSLCARYPIACANSIGLLCTIPYTRSEEKCLVRSGLVQLMDRLCSLSNQTESSSSEKQTKKQKVATMAWAAFQVLANRCVEWEKEEGGSTEAVHSGLARQVSSLLTNHLARATECCGNQAAGNDALQDVLSLLNDLSRSHIGKAILSQPACVSKLLSLLLDQRPSPKLVLIILQLCRAALPLMSVEDCGNVELPPWSYSVPSLNSEQEDPSDPASKIASLLLAKLADYVVPGCQTVLSPTASEPDTTLTKTSPKNSLKGDKDPGEESEAVDGKLSIFIHKREDQSSHEVLQPLLSSSEGRPFRLGTGANMEKVVKMDRDMTKGGCCEVITEEAAAALRKATKWAQSGLIVSIGPPVESINPETVSGLSTGDKKKTAQTSICRERNSELARTDPVRPFISGHVANSMAAEVIALLHSLLMAPESNAAQIWTTTAEKVLSRALMYIPQLGKYAESILENGSSSGRKLAKLQRIARQAVAALCALGGFKETIKIGSEVQVLGRGISGSIGVVASINEQEGIATVRFPPIDCRKTSQASDTLTIPLSRLCVPRSEALPLHKLSITEKVVQAVQSMLLPQEGSLSIHTSLPATGDGSAPVMAVVRLLAEIRTRACLVMAQLLEDSLFCEEFIQQCPAAVEVLNLVAQECSAGERLAVVEVQCERLRMLYRDCARPPPPPLQADRRQPKEITWSPSRVFPPVRACMFSSHLTSVTFLADPSAGGGLPRGTFIYATSPLPVQAPSFYWEIEIVSYGDTDDDTGPIVSFGFTTEAEKRDGAWTNPVGTCLFHNNGRAVHYNGSSLLQWKSVRLDVTLSPGDVAGIGWERTEGTPPPPGQPAKGRVYFTYCGQRLSPYLEDVSGGMWPVVHIQKKNTKTRANFGSRPFAYAEGQAHRNAADLCTDLAEEISANFEALPFAMASDSDNDAGTSIASDPGTHGPPCRIAAVATAQQQYDSDTSCHYKVELSYENFITSGPDPHPPPIADDESDDDDDDDIPQEDHYALLVKAWETKVFPTIRRRFRNEAERKSGLDQIKGALQLGMVDIARQTVEFLYEENGGIPRDLYLPTIEDIKDEANKFTIDKVRKGLTVVTRSPDSNNVASSAVGTALPKFAIRGMLKTFGLHGVVLDVDSVNELVQVETYLRSEGVLVRYWYPIDMLERPPAGYRRTATNGLVTLDNTNLQIHRELLRCEAALARLYCRMALLNIFAPKLPHLFTRLFHIPAIRDITLEHLQLLSNQLLAPPLPDGTISSSSILLAQSLQHCIHSQNCSATDLFYQGNSQTVREWLNVAITRTLHQGEESLLELTKQICSFLQTAPEQFPSEEFPISESKVNMDVNFPGAAFVVVSCKESQSGFRKDSSLYKAPWARVLVYGLGHKVKRNGQLNLIEAACYPRDASPANTGLAPPPTADQYPSVVLSTDRVHIKLGVSPPPGAVLVLHSLPLEFPLAMAFAEQLLSWKSEDSEGKSEDEPDTIPTSVLLQVVELLGNFLWTTDMAACVKELVFHLLAELLRTVHTLEQRRHPAGLSSSIALQLNPCLAMLMALQSELHKLYDEETQNWVSGGACGGSGGAAAGDQGRFSTYFHALMEGCLAVAEVTLPTNMSVTASGVTSATAPNLSDSSSSSSSSPGQTPQSPSLLSKRKKVKMKREKASSSGKRQSSRTVDSDPTVLSIGGSKPEDMLWFHRALTLLIILRHLTRKDPQGLGVTSDAIADACQALVGPTAHSRLLVISGIPTHLDEGVVRGAIRKACNAHGGVFKDEIYIPLQEEDTKKPKDKAEGGDGKVEPEKTLAFPGTDSMEVSTSSSLTPAMSISASASTSQASICSSQGISQTVSDLSVDPLPAGLELPIPPGLLEPHAVSSQESLDISLCSTGSLGSLGSLGEPLDNAETASVSDMGSMYTVTSLDNQPLAARPIKGFAVVEIRSRAKIEKIRASLFNNNDLIGLSSLDGEDELMEMSTEEILTVSVVNQSLFDTQGSPGLEDYFNDKSIKGEKLVPGAREVLTEIFKSCAHSEQTLSLTPAKPIRVSDIYLSKEQINSQTPGNLLHLFFTNVRPPKKVLEDQLTQILRKYGVPKPKFDKSKYSKAGKEQHPVKVVSTKRPITKPPAKDKAVLNSVSRTALSEKKPTVKPKSPEKSKPDEKDPEKSPTKKQEVPEEKYLTLEGFHKFVIDRARQDIRSVWRAILSCGYDLHFERCACIDVRHAQKASRKWTLEMDVALVQYINQLCRHLAITPARLHPHEVYLDPADAADPRVACLLNVPIESLRLRFALLQSLNTTLETFFLPLVELRQTPMYTHSIAALLKEAKGLIFYDTKVTVMNRVLNATVQRTADHAAPEITLDPLEIVGGEIRASENSYFCQAARQLASVPSSQLCVKLASGGDPTYAFNIRFTGEEVHGTSGSFRHFLWQVCKELQSSSLSLLLLCPSSAVNKNKGKYILTPSPITYGEEQLLHFLGQLLGIAIRADVPLPLDLLPSFWKTLVGEPLDPEQDLQEADILTYNYVKKFESINDETELEALCAEIASQHLATESPDSPNKPCCRFTYLTMTGEEVELCSRGRHILVAWENKDIYAAAIRSLRLRELQNVECVTAVRAGLGSIIPLQLLTMLSPLEMELRTCGLPYINLEFLKAHTMYQVGLMETDQHIEFFWGALEMFTQEELCKFIKFACNQERIPFTCPCKDGGPDTAHVPPYPMKIAPPDGTAGSPDSRYIRVETCMFMIKLPQYSSLEIMLEKLRCAIHYREDPLSG

SEQ ID NO: 10203 - protein, 445 aa, Homo sapiens
MAFSELLDLVGGLGRFQVLQTMALMVSIMWLCTQSMLENFSAAVPSHRCWAPLLDNSTAQASILGSLSPEALLAISIPPGPNQRPHQCRRFRQPQWQLLDPNATATSWSEADTEPCVDGWVYDRSIFTSTIVAKWNLVCDSHALKPMAQSIYLAGILVGAAACGPASDRWLAESARWLLTTGRLDWGLQELWRVAAINGKGAVQDTLTPEVLLSAMREELSMGQPPASLGTLLRMPGLRFRTCISTLCWFAFGFTFFGLALDLQALGSNIFLLQMFIGVVDIPAKMGALLLLSHLGRRPTLAASLLLAGLCILANTLVPHEMGALRSALAVLGLGGVGAAFTCITIYSSELFPTVLRMTAVGLGQMAARGGAILGPLVRLLGVHGPWLPLLVYGTVPVLSGLAALLLPETQSLPLPDTIQDVQNQAVKKATHGTLGNSVLKSTQF

SEQ ID NO: 10204 - protein, 553 aa, Homo sapiens
MAFSELLDLVGGLGRFQVLQTMALMVSIMWLCTQSMLENFSAAVPSHRCWAPLLDNSTAQASILGSLSPEALLAISIPPGPNQRPHQCRRFRQPQWQLLDPNATATSWSEADTEPCVDGWVYDRSIFTSTIVAKWNLVCDSHALKPMAQSIYLAGILVGAAACGPASDRFGRRLVLTWSYLQMAVMGTAAAFAPAFPVYCLFRFLLAFAVAGVMMNTGTLLMEWTAARARPLVMTLNSLGFSFGHGLTAAVAYGVRDWTLLQLVVSVPFFLCFLYSWWLAESARWLLTTGRLDWGLQELWRVAAINGKGAVQDTLTPEVLLSAMREELSMGQPPASLGTLLRMPGLRFRTCISTLCWFAFGFTFFGLALDLQALGSNIFLLQMFIGVVDIPAKMGALLLLSHLGRRPTLAASLLLAGLCILANTLVPHEMGALRSALAVLGLGGVGAAFTCITIYSSELFPTVLRMTAVGLGQMAARGGAILGPLVRLLGVHGPWLPLLVYGTVPVLSGLAALLLPETQSLPLPDTIQDVQNQAVKKATHGTLGNSVLKSTQF

SEQ ID NO: 10205 - protein, 398 aa, Homo sapiens
MRPGGALLALLASLLLLLLLRLLWCPADAPGRARILVEESREATHGTPAALRTLRSPATAVPRATNSTYLNEKSLQLTEKCKNLQYGIESFSNKTKGYSENDYLQIITDIQSCPWKRQAEEYANFRAKLASCCDAVQNFVVSQNNTPVGTNMSYEVESKKEIPIKKNIFHMFPVSQPFVDYPYNQCAVVGNGGILNKSLCGTEIDKSDFVFRCNLPPTTGDVSKDVGSKTNLVTINPSIITLKYGNLKEKKALFLEDIATYGDAFFLLPAFSFRANTGTSFKVYYTLEESKARQKVLFFHPKYLKDLALFWRTKGVTAYRLSTGLMITSVAVELCKNVKLYGFWPFSKTVEDIPVSHHYYDNKLPKHGFHQMPKEYSQILQLHMKGILKLQFSKCEVA

SEQ ID NO: 10206 - protein, 930 aa, Homo sapiens
MEYERRGGRGDRTGRYGATDRSQDDGGENRSRDHDYRDMDYRSYPREYGSQEGKHDYDDSSEEQSAEDSYEASPGSETQRRRRRRHRHSPTGPPGFPRDGDYRDQDYRTEQGEEEEEEEDEEEEEKASNIVMLRMLPQAATEDDIRGQLQSHGVQAREVRLMRNKSSGQSRGFAFVEFSHLQDATRWMEANQHSLNILGQKVSMHYSDPKPKINEDWLCNKCGVQNFKRREKCFKCGVPKSEAEQKLPLGTRLDQQTLPLGGRELSQGLLPLPQPYQAQGVLASQALSQGSEPSSENANDTIILRNLNPHSTMDSILGALAPYAVLSSSNVRVIKDKQTQLNRGFAFIQLSTIVEAAQLLQILQALHPPLTIDGKTINVEFAKGSKRDMASNEGSRISAASVASTAIAAAQWAISQASQGGEGTWATSEEPPVDYSYYQQDEGYGNSQGTESSLYAHGYLKGTKGPGITGTKGDPTGAGPEASLEPGADSVSMQAFSRAQPGAAPGIYQQSAEASSSQGTAANSQSYTIMSPAVLKSELQSPTHPSSALPPATSPTAQESYSQYPVPDVSTYQYDETSGYYYDPQTGLYYDPNSQYYYNAQSQQYLYWDGERRTYVPALEQSADGHKETGAPSKEGKEKKEKHKTKTAQQIAKDMERWARSLNKQKENFKNSFQPISSLRDDERRESATADAGYAILEKKGALAERQHTSMDLPKLASDDRPSPPRGLVAAYSGESDSEEEQERGGPEREEKLTDWQKLACLLCRRQFPSKEALIRHQQLSGLHKQNLEIHRRAHLSENELEALEKNDMEQMKYRDRAAERREKYGIPEPPEPKRRKYGGISTASVDFEQPTRDGLGSDNIGSRMLQAMGWKEGSGLGRKKQGIVTPIEAQTRVRGSGLGARGSSYGVTSTESYKETLHKTMVTRFNEAQ

SEQ ID NO: 10207 - protein, 1235 aa, Homo sapiens
MEPPSCIQDEPFPHPLEPEPGVSAQPGPGKPSDKRFRLWYVGGSCLDHRTTLPMLPWLMAEIRRRSQKPEAGGCGAPAAREVILVLSAPFLRCVPAPGAGASGGTSPSATQPNPAVFIFEHKAQHISRFIHNSHDLTYFAYLIKAQPDDPESQMACHVFRATDPSQVPDVISSIRQLSKAAMKEDAKPSKDNEDAFYNSQKFEVLYCGKVTVTHKKAPSSLIDDCMEKFSLHEQQRLKIQGEQRGPDPGEDLADLEVVVPGSPGDCLPEEADGTDTHLGLPAGASQPALTSSRVCFPERILEDSGFDEQQEFRSRCSSVTGVQRRVHEGSQKSQPRRRHASAPSHVQPSDSEKNRTMLFQVGRFEINLISPDTKSVVLEKNFKDISSCSQGIKHVDHFGFICRESPEPGLSQYICYVFQCASESLVDEVMLTLKQAFSTAAALQSAKTQIKLCEACPMHSLHKLCERIEGLYPPRAKLVIQRHLSSLTDNEQADIFERVQKMKPVSDQEENELVILHLRQLCEAKQKTHVHIGEGPSTISNSTIPENATSSGRFKLDILKNKAKRSLTSSLENIFSRGANRMRGRLGSVDSFERSNSLASEKDYSPGDSPPGTPPASPPSSAWQTFPEEDSDSPQFRRRAHTFSHPPSSTKRKLNLQDGRAQGVRSPLLRQSSSEQCSDGEGRKRTSSTCSNESLSVGGTSVTPRRISWRQRIFLRVASPMNKSPSAMQQQDGLDRNELLPLSPLSPTMEEEPLVVFLSGEDDPEKIEERKKSKELRSLWRKAIHQQILLLRMEKENQKLEASRDELQSRKVKLDYEEVGACQKEVLITWDKKLLNCRAKIRCDMEDIHTLLKEGVPKSRRGEIWQFLALQYRLRHRLPNKQQPPDISYKELLKQLTAQQHAILVDLGRTFPTHPYFSVQLGPGQLSLFNLLKAYSLLDKEVGYCQGISFVAGVLLLHMSEEQAFEMLKFLMYDLGFRKQYRPDMMSLQIQMYQLSRLLHDYHRDLYNHLEENEISPSLYAAPWFLTLFASQFSLGFVARVFDIIFLQGTEVIFKVALSLLSSQETLIMECESFENIVEFLKNTLPDMNTSEMEKIITQVFEMDISKQLHAYEVEYHVLQDELQESSYSCEDSETLEKLERANSQLKRQNMDLLEKLQVAHTKIQALESNLENLLTRETKMKSLIRTLEQEKMAYQKTVEQLRKLLPADALVNCDLLLRDLNCNPNNKAKIGNKP

SEQ ID NO: 10208 - protein, 1040 aa, Homo sapiens
MKVKEEKAGVGKLDHTNHRRRFPDQKECPPIHIGLPVPTYPQRKTDQKGHLSGLQKVHWGLRPDQPQQELTGPGSGASSQDSSMDLISRTRSPAAEQLQDILGEEDEAPNPTLFTEMDTLQHDGDQMEWKESARWIKFEEKVEEGGERWSKPHVSTLSLHSLFELRTCLQTGTVLLDLDSGSLPQIIDDVIEKQIEDGLLRPELRERVSYVLLRRHRHQTKKPIHRSLADIGKSVSTTNRSPARSPGAGPSLHHSTEDLRMRQSANYGRLCHAQSRSMNDISLTPNTDQRKNKFMKKIPKDSEASNVLVGEVDFLDQPFIAFVRLIQSAMLGGVTEVPVPTRFLFILLGPSGRAKSYNEIGRAIATLMVDDLFSDVAYKARNREDLIAGIDEFLDEVIVLPPGEWDPNIRIEPPKKVPSADKRKSVFSLAELGQMNGSVGGGGGAPGGGNGGGGGGGSGGGAGSGGAGGTSSGDDGEMPAMHEIGEELIWTGRFFGGLCLDIKRKLPWFPSDFYDGFHIQSISAILFIYLGCITNAITFGGLLGDATDNYQGVMESFLGTAMAGSLFCLFSGQPLIILSSTGPILIFEKLLFDFSKGNGLDYMEFRLWIGLHSAVQCLILVATDASFIIKYITRFTEEGFSTLISFIFIYDAIKKMIGAFKYYPINMDFKPNFITTYKCECVAPDTVNTTVFNASAPLAPDTNASLYNLLNLTALDWSLLSKKECLSYGGRLLGNSCKFIPDLALMSFILFFGTYSMTLTLKKFKFSRYFPTKVRALVADFSIVFSILMFCGIDACFGLETPKLHVPSVIKPTRPDRGWFVAPFGKNPWWVYPASILPALLVTILIFMDQQITAVIVNRKENKLKKAAGYHLDLFWVGILMALCSFMGLPWYVAATVISIAHIDSLKMETETSAPGEQPQFLGVREQRVTGIIVFILTGISVFLAPILKILGLIIVRRLLDFIFSQHDLAWIDNILPEKEKKETDKKRKRKKGAHEDCDEEPQFPPPSVIKIPMESVQSDPQNGIHCIARKRSSSWSYSL

SEQ ID NO: 10209 - protein, 1298 aa, Homo sapiens
MEPPSCIQDEPFPHPLEPEPGVSAQPGPGKPSDKRFRLWYVGGSCLDHRTTLPMLPWLMAEIRRRSQKPEAGGCGAPAAREVILVLSAPFLRCVPAPGAGASGGTSPSATQPNPAVFIFEHKAQHISRFIHNSHDLTYFAYLIKAQPDDPESQMACHVFRATDPSQVPDVISSIRQLSKAAMKEDAKPSKDNEDAFYNSQKFEVLYCGKVTVTHKKAPSSLIDDCMEKFSLHEQQRLKIQGEQRGPDPGEDLADLEVVVPGSPGDCLPEEADGTDTHLGLPAGASQPALTSSRVCFPERILEDSGFDEQQEFRSRCSSVTGVQRRVHEGSQKSQPRRRHASAPSHVQPSDSEKNRTMLFQVGRFEINLISPDTKSVVLEKNFKDISSCSQGIKHVDHFGFICRESPEPGLSQYICYVFQCASESLVDEVMLTLKQAFSTAAALQSAKTQIKLCEACPMHSLHKLCERIEGLYPPRAKLVIQRHLSSLTDNEQADIFERVQKMKPVSDQEENELVILHLRQLCEAKQKTHVHIGEGPSTISNSTIPENATSSGRFKLDILKNKAKRSLTSSLENIFSRGANRMRGRLGSVDSFERSNSLASEKDYSPGDSPPGTPPASPPSSAWQTFPEEDSDSPQFRRRAHTFSHPPSSTKRKLNLQDGRAQGVRSPLLRQSSSEQCSNLSSVRRMYKESNSSSSLPSLHTSFSAPSFTAPSFLKSFYQNSGRLSPQYENEIRQDTASESSDGEGRKRTSSTCSNESLSVGGTSVTPRRISWRQRIFLRVASPMNKSPSAMQQQDGLDRNELLPLSPLSPTMEEEPLVVFLSGEDDPEKIEERKKSKELRSLWRKAIHQQILLLRMEKENQKLEASRDELQSRKVKLDYEEVGACQKEVLITWDKKLLNCRAKIRCDMEDIHTLLKEGVPKSRRGEIWQFLALQYRLRHRLPNKQQPPDISYKELLKQLTAQQHAILVDLGRTFPTHPYFSVQLGPGQLSLFNLLKAYSLLDKEVGYCQGISFVAGVLLLHMSEEQAFEMLKFLMYDLGFRKQYRPDMMSLQIQMYQLSRLLHDYHRDLYNHLEENEISPSLYAAPWFLTLFASQFSLGFVARVFDIIFLQGTEVIFKVALSLLSSQETLIMECESFENIVEFLKNTLPDMNTSEMEKIITQVFEMDISKQLHAYEVEYHVLQDELQESSYSCEDSETLEKLERANSQLKRQNMDLLEKLQVAHTKIQALESNLENLLTRETKMKSLIRTLEQEKMAYQKTVEQLRKLLPADALVNCDLLLRDLNCNPNNKAKIGNKP

SEQ ID NO: 10210 - protein, 1347 aa, Homo sapiens
MENLPFPLKLLSASSLNAPSSTPWVLDIFLTLVFALGFFFLLLPYLSYFRCDDPPSPSPGKRKCPVGRRRRPRGRMKNHSLRAGRECPRGLQETSDLLSQLQSLLGPHLDKGDFGQLSGPDPPGEVGERAPDGASQSSHEPMEDAAPILSPLASPDPQAKHPQDLASTPSPGPMTTSVSSLSASQPPEPSLPLEHPSPEPPALFPHPPHTPDPLACSPPPPKGFTAPPLRDSTLITPSHCDSVALPLGTVPQSLSPHEDLVASVPAISGLGGSNSHVSASSRWQETARTSCAFNSSVQQDHLSRHPPETYQMEAGSLFLLSSDGQNAVGIQVTETAKVNIWEEKENVGSFTDRMTPEKHLNSLRNLAKSLDAEQDTTNPKPFWNMGENSKQLPGPQKLSDPRLWQESFWKNYSQLFWGLPSLHSESLVANAWVTDRSYTLQSPPFLFNEMSNVCPIQRETTMSPLLFQAQPPSHLGPECQPFISSTPQFRPTPMAQAEAQAHLQSSFPVLSPAFPSLIKNTGVACPASQNKVQALSLPETQHPEWPLLRRQLEGRLALPSRVQKSQDVFSVSTPNLPQESLTSILPENFPVSPELRRQLEQHIKKWIIQHWGNLGRIQESLDLMQLRDESPGTSQAKGKPSPWQSSMSTGESSKEAQKVKFQLERDPCPHLGQILGETPQNLSRDMKSFPRKVLGVTSEESERNLRKPLRSDSGSDLLRCTERTHIENILKAHMGRNLGQTNEGLIPVRVRRSWLAVNQALPVSNTHVKTSNLAAPKSGKACVNTAQVLSFLEPCTQQGLGAHIVRFWAKHRWGLPLRVLKPIQCFKLEKVSSLSLTQLAGPSSATCESGAGSEVEVDMFLRKPPMASLRKQVLTKASDHMPESLLASSPAWKQFQRAPRGIPSWNDHGPLKPPPAGQEGRWPSKPLTYSLTGSTQQSRSLGAQSSKAGETREAVPQCRVPLETCMLANLQATSEDMHGFEAPGTSKSSLHPRVSVSQDPRKLCLMEEVVNEFEPGMATKSETQPQVCAAVVLLPDGQASVVPHASENLVSQVPQGHLQSMPAGNMRASQELHDLMAARRSKLVHEEPRNPNCQGSCKNQRPMFPPIHKSEKSRKPNLEKHEERLEGLRTPQLTPVRKTEDTHQDEGVQLLPSKKQPPSVSHFGGNIKQFFQWIFSKKKSKPAPVTAESQKTVKNRSCVYSSSAEAQGLMTAVGQMLDEKMSLCHARHASKVNQHKQKFQAPVCGFPCNHRHLFYSEHGRILSYAASSQQATLKSQGCPNRDRQIRNQQPLKSVRCNNEQWGLRHPQILHPKKAVSPVSPLQHWPKTSGASSHHHHCPRHCLLWEGI

SEQ ID NO: 10211 - protein, 1207 aa, Homo sapiens
MASVAWAVLKVLLLLPTQTWSPVGAGNPPDCDAPLASALPRSSFSSSSELSSSHGPGFSRLNRRDGAGGWTPLVSNKYQWLQIDLGERMEVTAVATQGGYGSSDWVTSYLLMFSDGGRNWKQYRREESIWGFPGNTNADSVVHYRLQPPFEARFLRFLPLAWNPRGRIGMRIEVYGCAYKSEVVYFDGQSALLYRLDKKPLKPIRDVISLKFKAMQSNGILLHREGQHGNHITLELIKGKLVFFLNSGNAKLPSTIAPVTLTLGSLLDDQHWHSVLIELLDTQVNFTVDKHTHHFQAKGDSSYLDLNFEISFGGIPTPGRSRAFRRKSFHGCLENLYYNGVDVTELAKKHKPQILMMGNVSFSCPQPQTVPVTFLSSRSYLALPGNSGEDKVSVTFQFRTWNRAGHLLFGELRRGSGSFVLFLKDGKLKLSLFQPGQSPRNVTAGAGLNDGQWHSVSFSAKWSHMNVVVDDDTAVQPLVAVLIDSGDTYYFGGCLDNSSGSGCKSPLGGFQGCLRLITIGDKAVDPILVQQGALGSFRDLQIDSCGITDRCLPSYCEHGGECSQSWDTFSCDCLGTGYTGETCHSSLYEQSCEAHKHRGNPSGLYYIDADGSGPLGPFLVYCNMTDAAWTVVQHGGPDAVTLRGAPSGHPRSAVSFAYAAGAGQLRSAVNLAERCEQRLALRCGTARRPDSRDGTPLSWWVGRTNETHTSWGGSLPDAQKCTCGLEGNCIDSQYYCNCDAGRNEWTSDTIVLSQKEHLPVTQIVMTDAGRPHSEAAYTLGPLLCRGDQSFWNSASFNTETSYLHFPAFHGELTADVCFFFKTTVSSGVFMENLGITDFIRIELRAPTEVTFSFDVGNGPCEVTVQSPTPFNDNQWHHVRAERNVKGASLQVDQLPQKMQPAPADGHVRLQLNSQLFIEISAYFATGSSMTYHFQEHYTLSENSSSLVSSLHRDVTLTREMITLSFRTTRTPSLLLYVSSFYEEYLSVILANNGSLQIRYKLDRHQNPDAFTFDFKNMADGQLHQVKINREEAVVMVEVNQSTKKQVILSSGTEFNAVKSLILGKVLEAAGADPDTRRAATSGFTGCLSAVRFGRAAPLKAALRPSGPSRVTVRGHVAPMARCAAGAASGSPARELAPRLAGGAGRSGPADEGEPLVNADRRDSAVIGGVIAVVIFILLCITAIAIRIYQQRKLRKENESKVSKKEEC

SEQ ID NO: 10212 - protein, 597 aa, Homo sapiens
MERPAPLAVLPFSDPAHALSLLRGLSQLRAERKFLDVTLEAAGGRDFPAHRAVLAAASPYFRAMFAGQLRESRAERVRLHGVPPDMLQLLLDFSYTGRVAVSGDNAEPLLRAADLLQFPAVKEACGAFLQQQLDLANCLDMQDFAEAFSCSGLASAAQRFILRHVGELGAEQLERLPLARLLRYLRDDGLCVPKEEAAYQLALRWVRADPPRRAAHWPQLLEAVRLPFVRRFYLLAHVEAEPLVARCPPCLRLLREARDFQAARYDRHDRGPCPRMRPRPSTGLAEILVLVGGCDQDCDELVTVDCYNPQTGQWRYLAEFPDHLGGGYSIVALGNDIYVTGGSDGSRLYDCVWRYNSSVNEWAEVAPMLKAREYHSSSVLDGLLYVVAADSTERYDHTTDSWEALQPMTYPMDNCSTTACRGRLYAIGSLAGKETMVMQCYDPDTDLWSLVDCGQLPPWSFAPKTATLNGLMYFVRDDSAEVDVYNPTRNEWDKIPSMNQVHVGGSLAVLGGKLYVSGGYDNTFELSDVVEAYDPETRAWSVVGRLPEPTFWHGSVSIFRQFMPQTFSGGRGFELDSGSDDMDPGRPRPPRDPDELH

SEQ ID NO: 10213 - protein, 745 aa, Homo sapiens
MASVAWAVLKVLLLLPTQTWSPVGAGNPPDCDAPLASALPRSSFSSSSELSSSHGPGFSRLNRRDGAGGWTPLVSNKYQWLQIDLGERMEVTAVATQGGYGSSDWVTSYLLMFSDGGRNWKQYRREESIWGFPGNTNADSVVHYRLQPPFEARFLRFLPLAWNPRGRIGMRIEVYGCAYKSEVVYFDGQSALLYRLDKKPLKPIRDVISLKFKAMQSNGILLHREGQHGNHITLELIKGKLVFFLNSGNAKLPSTIAPVTLTLGSLLDDQHWHSVLIELLDTQVNFTVDKHTHHFQAKGDSSYLDLNFEISFGGIPTPGRSRAFRRKSFHGCLENLYYNGVDVTELAKKHKPQILMMGNVSFSCPQPQTVPVTFLSSRSYLALPGNSGEDKVSVTFQFRTWNRAGHLLFGELRRGSGSFVLFLKDGKLKLSLFQPGQSPRNVTAGAGLNDGQWHSVSFSAKWSHMNVVVDDDTAVQPLVAVLIDSGDTYYFGGCLDNSSGSGCKSPLGGFQGCLRLITIGDKAVDPILVQQGALGSFRDLQIDSCGITDRCLPSYCEHGGECSQSWDTFSCDCLGTGYTGETCHSSLYEQSCEAHKHRGNPSGLYYIDADGSGPLGPFLVYCNMTDAAWTVVQHGGPDAVTLRGAPSGHPRSAVSFAYAAGAGQLRSAVNLAERCEQRLALRCGTARRPDSRDGTPLSWWVGRTNETHTSWGGSLPDAQKCTCGLEGNCIDSQYYCNCDAGRNEW

SEQ ID NO: 10214 - protein, 541 aa, Homo sapiens
MRRKEKRLLQAVALVLAALVLLPNVGLWALYRERQPDGTPGGSGAAVAPAAGQGSHSRQKKTFFLGDGQKLKDWHDKEAIRRDAQRVGNGEQGRPYPMTDAERVDQAYRENGFNIYVSDKISLNRSLPDIRHPNCNSKRYLETLPNTSIIIPFHNEGWSSLLRTVHSVLNRSPPELVAEIVLVDDFSDRDRIARNRKTIVCPMIDVIDHDDFRYETQAGDAMRGAFDWEMYYKRIPIPPELQKADPSDPFESPVMAGGLFAVDRKWFWELGGYDPGLEIWGGEQYEISFKVWMCGGRMEDIPCSRVGHIYRKYVPYKVPAGVSLARNLKRVAEVWMDEYAEYIYQRRPEYRHLSAGDVAVQKKLRSSLNCKSFKWFMTKIAWDLPKFYPPVEPPAAAWGEIRNVGTGLCADTKHGALGSPLRLEGCVRGRGEAAWNNMQVFTFTWREDIRPGDPQHTKKFCFDAISHTSPVTLYDCHSMKGNQLWKYRKDKTLYHPVSGSCMDCSESDHRIFMNTCNPSSLTQQWLFEHTNSTVLEKFNRN

SEQ ID NO: 10215 - protein, 539 aa, Homo sapiens
MERPAPLAVLPFSDPAHALSLLRGLSQLRAERKFLDVTLEAAGGRDFPAHRAVLAAASPYFRAMFAGQLRESRAERVRLHGVPPDMLQLLLDFSYTGRVAVSGDNAEPLLRAADLLQFPAVKEACGAFLQQQLDLANCLDMQDFAEAFSCSGLASAAQRFILRHVGELGAEQLERLPLARLLRYLRDDGLCVPKEEAAYQLALRWVRADPPRRAAHWPQLLEAVRLPFVRRFYLLAHVEAEPLVARCPPCLRLLREARDFQAARYDRHDRGPCPRMRPRPSTGLAEILVLVGGCDQDCDELVTVDCYNPQTGQWRYLAEFPDHLGGGYSIVALGNDIYVTGGSDGSRLYDCVWRYNSSVNEWAEVAPMLKAREYHSSSVLDGLLYVVAADSTERYDHTTDSWEALQPMTYPMDNCSTTACRGRLYAIGSLAGKETMVMQCYDPDTDLWSLVDCGQLPPWSFAPKTATLNGLMYFVRDDSAEVDVYNPTRNEWDKIPSMNQVNFQAGQHWKHRLVLILQPKCHRDECLGSTAMMGGSHLN

SEQ ID NO: 10216 - protein, 653 aa, Homo sapiens
MAFRDVAVDFTQDEWRLLSPAQRTLYREVMLENYSNLVSLGISFSKPELITQLEQGKETWREEKKCSPATCPDPEPELYLDPFCPPGFSSQKFPMQHVLCNHPPWIFTCLCAEGNIQPGDPGPGDQEKQQQASEGRPWSDQAEGPEGEGAMPLFGRTKKRTLGAFSRPPQRQPVSSRNGLRGVELEASPAQSGNPEETDKLLKRIEVLGFGTVNCGECGLSFSKMTNLLSHQRIHSGEKPYVCGVCEKGFSLKKSLARHQKAHSGEKPIVCRECGRGFNRKSTLIIHERTHSGEKPYMCSECGRGFSQKSNLIIHQRTHSGEKPYVCRECGKGFSQKSAVVRHQRTHLEEKTIVCSDCGLGFSDRSNLISHQRTHSGEKPYACKECGRCFRQRTTLVNHQRTHSKEKPYVCGVCGHSFSQNSTLISHRRTHTGEKPYVCGVCGRGFSLKSHLNRHQNIHSGEKPIVCKDCGRGFSQQSNLIRHQRTHSGEKPMVCGECGRGFSQKSNLVAHQRTHSGERPYVCRECGRGFSHQAGLIRHKRKHSREKPYMCRQCGLGFGNKSALITHKRAHSEEKPCVCRECGQGFLQKSHLTLHQMTHTGEKPYVCKTCGRGFSLKSHLSRHRKTTSVHHRLPVQPDPEPCAGQPSDSLYSL

SEQ ID NO: 10217 - protein, 574 aa, Homo sapiens
MALRAKAEVCMAVPWLSLQRAQALGTRAARVPRTVLPFEAMPRRPGNRWLRLLQIWREQGYEDLHLEVHQTFQELGPIFRSRHSASFGRWGRSAARAGLWRCQGRGWCRANPSSLQRGQDSEALKYDLGGAGMVCVMLPEDVEKLQQVDSLHPHRMSLEPWVAYRQHRGHKCGVFLLNVADRGNSSPPFPGGIHGAPTHSGCRNGPEWRFNRLRLNPEVLSPNAVQRFLPMVDAVARDFSQALKKKVLQNARGSLTLDVQPSIFHYTIEASNLALFGERLGLVGHSPSSASLNFLHALEVMFKSTVQLMFMPRSLSRWTSPKVWKEHFEAWDCIFQYGDNCIQKIYQELAFSRPQQYTSIVAELLLNAELSPDAIKANSMELTAGSVDTTVFPLLMTLFELARNPNVQQALRQESLAAAASISEHPQKATTELPLLRAALKETLRLYPVGLFLERVASSDLVLQNYHIPAGTLVRVFLYSLGRNPALFPRPERYNPQRWLDIRGSGRNFYHVPFGFGMRQCLGRRLAEAEMLLLLHHVLKHLQVETLTQEDIKMVYSFILRPSMFPLLTFRAIN

SEQ ID NO: 10218 - protein, 781 aa, Homo sapiens
MDSSIHLSSLISRHDDEATRTSTSEGLEEGEVEGETLLIVESEDQASVDLSHDQSGDSLNSDEGDVSWMEEQLSYFCDKCQKWIPASQLREQLSYLKGDNFFRFTCSDCSADGKEQYERLKLTWQQVVMLAMYNLSLEGSGRQGYFRWKEDICAFIEKHWTFLLGNRKKTSTWWSTVAGCLSVGSPMYFRSGAQEFGEPGWWKLVHNKPPTMKPEGEKLSASTLKIKASKPTLDPIITVEGLRKRASRNPVESAMELKEKRSRTQEAKDIRRAQKEAAGFLDRSTSSTPVKFISRGRRPDVILEKGEVIDFSSLSSSDRTPLTSPSPSPSLDFSAPGTPASHSATPSLLSEADLIPDVMPPQALFHDDDEMEGDGVIDPGMEYVPPPAGSVASGPVVGVRKKVRGPEQIKQEVESEEEKPDRMDIDSEDTDSNTSLQTRAREKRKPQLEKDTKPKEPRYTPVSIYEEKLLLKRLEACPGAVAMTPEARRLKRKLIVRQAKRDRGLPLFDLDQVVNAALLLVDGIYGAKEGGISRLPAGQATYRTTCQDFRILDRYQTSLPSRKGFRHQTTKFLYRLVGSEDMAVDQSIVSPYTSRILKPYIRRDYETKPPKLQLLSQIRSHLHRSDPHWTPEPDAPLDYCYVRPNHIPTINSMCQEFFWPGIDLSECLQYPDFSVVVLYKKVIIAFGFMVPDVKYNEAYISFLFVHPEWRRAGIATFMIYHLIQTCMGKDVTLHVSASNPAMLLYQKFGFKTEEYVLDFYDKYYPLESTECKHAFFLRLRR

SEQ ID NO: 10219 - protein, 702 aa, Homo sapiens
MADSGLLLKRGSCRSTWLRVRKARPQLILSRRPRRRLGSLRWCGRRRLRWRLLQAQASGVDWREGARQVSRAAAARRPNTATPSPIPSPTPASEPESEPELESASSCHRPLLIPPVRPVGPGRALLLLPVEQGFTFSGICRVTCLYGQVQVFGFTISQGQPAQDIFSVYTHSCLSIHALHYSQPEKSKKELKREARNLLKSHLNLDDRRWSMQNFSPQCSIVLLEHLKTATVNFITSYPGSSYIFVQESPTPQIKPEYLALRSVGIRREKKRKGLQLTESTLSALEELVNVSCEEVDGCPVILVCGSQDVGKSTFNRYLINHLLNSLPCVDYLECDLGQTEFTPPGCISLLNITEPVLGPPFTHLRTPQKMVYYGKPSCKNNYENYIDIVKYVFSAYKRESPLIVNTMGWVSDQGLLLLIDLIRLLSPSHVVQFRSDHSKYMPDLTPQYVDDMDGLYTKSKTKMRNRRFRLAAFADALEFADEEKESPVEFTGHKLIGVYTDFAFRITPRNRESHNKILRDLSILSYLSQLQPPMPKPLSPLHSLTPYQVPFNAVALRITHSDVAPTHILYAVNASWVGLCKIQDDVRGYTNGPILLAQTPICDCLGFGICRGIDMEKRLYHILTPVPPEELRTVNCLLVGAIAIPHCVLKCQRGIEGTVPYVTTDYNFKLPGASEKIGAREPEEAHKEKPYRRPKFCRKMK

SEQ ID NO: 10220 - protein, 930 aa, Homo sapiens
MHYDGHVRFDLPPQGSVLARNVSTRSCPPRTSPAVDLEEEEEESSVDGKGDRKSTGLKLSKKKARRRHTDDPSKECFTLKFDLNVDIETEIVPAMKKKSLGEVLLPVFERKGIALGKVDIYLDQSNTPLSLTFEAYRFGGHYLRVKAPAKPGDEGKVEQGMKDSKSLSLPILRPAGTGPPALERVDAQSRRESLDILAPGRRRKNMSEFLGEASIPGQEPPTPSSCSLPSGSSGSTNTGDSWKNRAASRFSGFFSSGPSTSAFGREVDKMEQLEGKLHTYSLFGLPRLPRGLRFDHDSWEEEYDEDEDEDNACLRLEDSWRELIDGHEKLTRRQCHQQEAVWELLHTEASYIRKLRVIINLFLCCLLNLQESGLLCEVEAERLFSNIPEIAQLHRRLWASVMAPVLEKARRTRALLQPGDFLKGFKMFGSLFKPYIRYCMEEEGCMEYMRGLLRDNDLFRAYITWAEKHPQCQRLKLSDMLAKPHQRLTKYPLLLKSVLRKTEEPRAKEAVVAMIGSVERFIHHVNACMRQRQERQRLAAVVSRIDAYEVVESSSDEVDKLLKEFLHLDLTAPIPGASPEETRQLLLEGSLRMKEGKDSKMDVYCFLFTDLLLVTKAVKKAERTRVIRPPLLVDKIVCRELRDPGSFLLIYLNEFHSAVGAYTFQASGQALCRGWVDTIYNAQNQLQQLRAQEPPGSQQPLQSLEEEEDEQEEEEEEEEEEEEGEDSGTSAASSPTIMRKSSGSPDSQHCASDGSTETLAMVVVEPGDTLSSPEFDSGPFSSQSDETSLSTTASSATPTSELLPLGPVDGRSCSMDSAYGTLSPTSLQDFVAPGPMAELVPRAPESPRVPSPPPSPRLRRRTPVQLLSCPPHLLKSKSEASLLQLLAGAGTHGTPSAPSRSLSELCLAVPAPAQEADPGPALPNQDHPAA

SEQ ID NO: 10221 - protein, 1043 aa, Homo sapiens
MDKGRAAKVCHHADCQQLHRRGPLNLCEACDSKFHSTMHYDGHVRFDLPPQGSVLARNVSTRSCPPRTSPAVDLEEEEEESSVDGKGDRKSTGLKLSKKKARRRHTDDPSKECFTLKFDLNVDIETEIVPAMKKKSLGEVLLPVFERKGIALGKVDIYLDQSNTPLSLTFEAYRFGGHYLRVKAPAKPGDEGKVEQGMKDSKSLSLPILRPAGTGPPALERVDAQSRRESLDILAPGRRRKNMSEFLGEASIPGQEPPTPSSCSLPSGSSGSTNTGDSWKNRAASRFSGFFSSGPSTSAFGREVDKMEQLEGKLHTYSLFGLPRLPRGLRFDHDSWEEEYDEDEDEDNACLRLEDSWRELIDGHEKLTRRQCHQQEAVWELLHTEASYIRKLRVIINLFLCCLLNLQESGLLCEVEAERLFSNIPEIAQLHRRLWASVMAPVLEKARRTRALLQPGDFLKGFKMFGSLFKPYIRYCMEEEGCMEYMRGLLRDNDLFRAYITWAEKHPQCQRLKLSDMLAKPHQRLTKYPLLLKSVLRKTEEPRAKEAVVAMIGSVERFIHHVNACMRQRQERQRLAAVVSRIDAYEVVESSSDEVDKLLKEFLHLDLTAPIPGASPEETRQLLLEGSLRMKEGKDSKMDVYCFLFTDLLLVTKAVKKAERTRVIRPPLLVDKIVCRELRDPGSFLLIYLNEFHSAVGAYTFQASGQALCRGWVDTIYNAQNQLQQLRAQEPPGSQQPLQSLEEEEDEQEEEEEEEEEEEEGEDSGTSAASSPTIMRKSSGSPDSQHCASDGSTETLAMVVVEPGDTLSSPEFDSGPFSSQSDETSLSTTASSATPTSELLPLGPVDGRSCSMDSAYGTLSPTSLQDFVAPGPMAELVPRAPESPRVPSPPPSPRLRRRTPVQLLSCPPHLLKSKSEASLLQLLAGAGTHGTPSAPSRSLSELCLAVPAPGIRTQGSPQEAGPSWDCRGAPSPGSGPGLVGCLAGEPAGSHRKRCGDLPSGASPRVQPEPPPGVSAQHRKLTLAQLYRIRTTLLLNSTLTASEV

SEQ ID NO: 10222 - protein, 649 aa, Homo sapiens
MAAGGAEGGSGPGAAMGDCAEIKSQFRTREGFYKLLPGDGAARRSGPASAQTPVPPQPPQPPPGPASASGPGAAGPASSPPPAGPGPGPALPAVRLSLVRLGEPDSAGAGEPPATPAGLGSGGDRVCFNLGRELYFYPGCCRRGSQRSIDLNKPIDKRIYKGTQPTCHDFNQFTAATETISLLVGFSAGQVQYLDLIKKDTSKLFNEERLIDKTKVTYLKWLPESESLFLASHASGHLYLYNVSHPCASAPPQYSLLKQGEGFSVYAAKSKAPRNPLAKWAVGEGPLNEFAFSPDGRHLACVSQDGCLRVFHFDSMLLRGLMKSYFGGLLCVCWSPDGRYVVTGGEDDLVTVWSFTEGRVVARGHGHKSWVNAVAFDPYTTRAEEAATAAGADGERSGEEEEEEPEAAGTGSAGGAPLSPLPKAGSITYRFGSAGQDTQFCLWDLTEDVLYPHPPLARTRTLPGTPGTTPPAASSSRGGEPGPGPLPRSLSRSNSLPHPAGGGKAGGPGVAAEPGTPFSIGRFATLTLQERRDRGAEKEHKRYHSLGNISRGGSGGSGSGGEKPSGPVPRSRLDPAKVLGTALCPRIHEVPLLEPLVCKKIAQERLTVLLFLEDCIITACQEGLICTWARPGKAGISSQPGNSPSGTVV

SEQ ID NO: 10223 - protein, 852 aa, Homo sapiens
MNSVLTKHGSPPRSWLSLCSGTDDQSPAEKKGLRCQNPACMDKGRAAKVCHHADCQQLHRRGPLNLCEACDSKFHSTMHYDGHVRFDLPPQGSVLARNVSTRSCPPRTSPAVDLEEEEEESSVDGKGDRKSTGLKLSKKKARRRHTDDPSKECFTLKFDLNVDIETEIVPAMKKKSLGEVLLPVFERKGIALGKVDIYLDQSNTPLSLTFEAYRFGGHYLRVKAPAKPGDEGKVEQGMKDSKSLSLPILRPAGTGPPALERVDAQSRRESLDILAPGRRRKNMSEFLGEASIPGQEPPTPSSCSLPSGSSGSTNTGDSWKNRAASRFSGFFSSGPSTSAFGREVDKMEQLEGKLHTYSLFGLPRLPRGLRFDHDSWEEEYDEDEDEDNACLRLEDSWRELIDGHEKLTRRQCHQQEAVWELLHTEASYIRKLRVIINLFLCCLLNLQESGLLCEVEAERLFSNIPEIAQLHRRLWASVMAPVLEKARRTRALLQPGDFLKGFKMFGSLFKPYIRYCMEEEGCMEYMRGLLRDNDLFRAYITWAEKHPQCQRLKLSDMLAKPHQRLTKYPLLLKSVLRKTEEPRAKEAVVAMIGSVERFIHHVNACMRQRQERQRLAAVVSRIDAYEVVESSSDEVDKLLKEFLHLDLTAPIPGASPEETRQLLLEGSLRMKEGKDSKMDVYCFLFTDLLLVTKAVKKAERTRVIRPPLLVDKIVCRELRDPGSFLLIYLNEFHSAVGAYTFQASGQALCRGWVDTIYNAQNQLQQLRAQEPPGSQQPLQSLEEEEDEQEEEEEEEEEEEEGEDSGTSAASSPTIMRKSSGSPDSQHWKLTLAQLYRIRTTLLLNSTLTASEV

SEQ ID NO: 10224 - protein, 358 aa, Homo sapiens
MPSVSPAGPSAGAVPNATAVTTVRTNASGLEVPLFHLFARLDEELHGTFPGLWLALMAVHGAIFLAGLVLNGLALYVFCCRTRAKTPSVIYTINLVVTDLLVGLSLPTRFAVYYGARGCLRCAFPHVLGYFLNMHCSILFLTCICVDRYLAIVRPEGSRRCRQPACARAVCAFVWLAAGAVTLSVLGVTGSRPCCRVFALTVLEFLLPLLVISVFTGRIMCALSRPGLLHQGRQRRVRAMQLLLTVLIIFLVCFTPFHARQVAVALWPDMPHHTSLVVYHVAVTLSSLNSCMDPIVYCFVTSGFQATVRGLFGQHGEREPSSGDVVSMHRSSKGSGRHHILSAGPHALTQALANGPEA

SEQ ID NO: 10225 - protein, 1083 aa, Homo sapiens
MNSVLTKHGSPPRSWLSLCSGTDDQSPAEKKGLRCQNPACMDKGRAAKVCHHADCQQLHRRGPLNLCEACDSKFHSTMHYDGHVRFDLPPQGSVLARNVSTRSCPPRTSPAVDLEEEEEESSVDGKGDRKSTGLKLSKKKARRRHTDDPSKECFTLKFDLNVDIETEIVPAMKKKSLGEVLLPVFERKGIALGKVDIYLDQSNTPLSLTFEAYRFGGHYLRVKAPAKPGDEGKVEQGMKDSKSLSLPILRPAGTGPPALERVDAQSRRESLDILAPGRRRKNMSEFLGEASIPGQEPPTPSSCSLPSGSSGSTNTGDSWKNRAASRFSGFFSSGPSTSAFGREVDKMEQLEGKLHTYSLFGLPRLPRGLRFDHDSWEEEYDEDEDEDNACLRLEDSWRELIDGHEKLTRRQCHQQEAVWELLHTEASYIRKLRVIINLFLCCLLNLQESGLLCEVEAERLFSNIPEIAQLHRRLWASVMAPVLEKARRTRALLQPGDFLKGFKMFGSLFKPYIRYCMEEEGCMEYMRGLLRDNDLFRAYITWAEKHPQCQRLKLSDMLAKPHQRLTKYPLLLKSVLRKTEEPRAKEAVVAMIGSVERFIHHVNACMRQRQERQRLAAVVSRIDAYEVVESSSDEVDKLLKEFLHLDLTAPIPGASPEETRQLLLEGSLRMKEGKDSKMDVYCFLFTDLLLVTKAVKKAERTRVIRPPLLVDKIVCRELRDPGSFLLIYLNEFHSAVGAYTFQASGQALCRGWVDTIYNAQNQLQQLRAQEPPGSQQPLQSLEEEEDEQEEEEEEEEEEEEGEDSGTSAASSPTIMRKSSGSPDSQHCASDGSTETLAMVVVEPGDTLSSPEFDSGPFSSQSDETSLSTTASSATPTSELLPLGPVDGRSCSMDSAYGTLSPTSLQDFVAPGPMAELVPRAPESPRVPSPPPSPRLRRRTPVQLLSCPPHLLKSKSEASLLQLLAGAGTHGTPSAPSRSLSELCLAVPAPGIRTQGSPQEAGPSWDCRGAPSPGSGPGLVGCLAGEPAGSHRKRCGDLPSGASPRVQPEPPPGVSAQHRKLTLAQLYRIRTTLLLNSTLTASEV

SEQ ID NO: 10226 - protein, 330 aa, Homo sapiens
MAKPAQGAKYRGSIHDFPGFDPNQDAEALYTAMKGFGSDKEAILDIITSRSNRQRQEVCQSYKSLYGKDLMTDLKSEISGDLARLILGLMMPPAHYDAKQLKKAMEGAGTDEKALIEILATRTNAEIRAINEAYKEDYHKSLEDALSSDTSGHFRRILISLATGHREEGGENLDQAREDAQVAAEILEIADTPSGDKTSLETRFMTILCTRSYPHLRRVFQEFIKMTNYDVEHTIKKEMSGDVRDAFVAIVQSVKNKPLFFADKLYKSMKGAGTDEKTLTRIMVSRSEIDLLNIRREFIEKYDKSLHQAIEGDTSGDFLKALLALCGGED

SEQ ID NO: 10227 - protein, 1578 aa, Homo sapiens
MEELETSLFQTRKAHRIEQMVARWLRRSRDSSARAKVAAADGPARNPTQTLIPVRHTVKIDKDTLLQDYGFHISESLPLTVVAVTAGGSAHGKLFPGDQILQMNNEPAEDLSWERAVDILREAEDSLSITVVRCTSGVPKSSFLTEEKRARLKTNPVKVHFAEEVLISGHSQGNSLLCMPNVLKLYLENGQTKAFKFEANTTVKDIILTVKEKLSIRSIEYFALALEEQYSISRLHLLHEEELIQQVVEREESHDYRCLFRVCFVPKDPLDLLKEDPVAFEYLYLQSCSDVLQERFAVEMKCSSALRLAALHIQERIYACAQPQKISLKYIEKDWGIENFISPTLLRNMKGKDIKKAISFHMKRNQNLLEPRQKQLISAAQLRLNYLQILGELKTYGGRIFNATLMLQDRESYIALLVGAKYGISQVINSKLNIMSTLAEFANISRVELTEESEKVSVVKVYLQDVKVLTLLLESNSAKDLACLIAGYYRLLVDPVTSIFLWPGNKQQAHRVSAEEGYESRACSDSEESSEVDCVLEPLSDRRLVKLAPCRSLIKEEQPPGNSPTPEVARRGPSTCGASSTTDSAESEASDSANTESRGYRTSGSSESMDALEEDDLDTCSSSRSTFFHFGSPGLAESIDSDSQEERSGIETSGFLCLLDLAQRANPQCQKTEFSESAALETFGWAPELSTVRLDPRLYEGSHADYYSLCSSVSPASYLSDSSESTASRQGGAPPAWGQQGWTEAQPSSMLEPLALHPPLAFEDGSSDEEYYDAADKLTPPGPPSGPRDVSTAEPSATSLQNKASTSSPENSLPCGPDGRQPSRRGGVKKYAKTLRKRRSFLQTDYTSQVSFPLVPSASLESVDDVCYYDREPYLALGAPSPTVSSLQDMQGEPGLLETKALGLLAPLRETKSTNPASRVMEMEPETMETKSVIDSRVSSISAIRFRIDPNNKENSGVVPAASSSASTPHCSNPGSSGPDTAQARPSQILPLSQDLDGIAPKEPTIEHGDSSFSLSSGDPNPDRACLASNPGLNNVSQGDTLELQLEPHVQLEMGLESFCTNHIQETAPKYTEPLLSPRDEPRSDECGINPGEKIASIPTKEEPQGQLSLERDREVTNKNGTNVFQEESRKDSGDSPGDVSNNVSQTLDISSPAGKIVTSLSLDAPVTGTEQIPPHPPRDPQGQSREPPGQGCQAQEQKLFVELDLDPDFFLGKQTVSPAVPPEGIKAEAPNHVTGQDIAPRDSPEWVCFNPEPSLPEPLPCPQEDPHLETSNHCLLSEGKSDSSSICLSAEKSFLCFAPESHPEVSASLRVATSLGFAGMNEMVAPRIGMDQCSCQFSYATCFRGPQPETEEEDRDLEAHPMAPLTSPPSAGSPVVLPWRPARAHSCTTAPLSRKSHIWPEYCSRALRQLKATPASTPEGFIQLMESLLELQDILETSWGVGNKHPPEKCTWHFTESRSRLCMGSQKLLSSCRHVIRMDQSPEEMQGAVRDTFQHLVQLAGLCFQFTDCSRCSARHREAAGNLRDVVYTYHQFIEAAKSTCERGYHDLSVKLLARQCTALTAAVFCLTQKFRASTAL

SEQ ID NO: 10228 - protein, 958 aa, Homo sapiens
MLKSKTFLKKTRAGGVMKIVREHYLRDDIGCGAPGCAACGGAHEGPALEPQPQDPASSVCPQPHYLLPDTNVLLHQIDVLEDPAIRNVIVLQTVLQEVRNRSAPVYKRIRDVTNNQEKHFYTFTNEHHRETYVEQEQGENANDRNDRAIRVAAKWYNEHLKKMSADNQLQVIFITNDRRNKEKAIEEGIPAFTCEEYVKSLTANPELIDRLACLSEEGNEIESGKIIFSEHLPLSKLQQGIKSGTYLQGTFRASRENYLEATVWIHGDNEENKEIILQGLKHLNRAVHEDIVAVELLPKSQWVAPSSVVLHDEGQNEEDVEKEEETERMLKTAVSEKMLKPTGRVVGIIKRNWRPYCGMLSKSDIKESRRHLFTPADKRIPRIRIETRQASTLEGRRIIVAIDGWPRNSRYPNGHFVRNLGDVGEKETETEVLLLEHDVPHQPFSQAVLSFLPKMPWSITEKDMKNREDLRHLCICSVDPPGCTDIDDALHCRELENGNLEVGVHIADVSHFIRPGNALDQESARRGTTVYLCEKRIDMVPELLSSNLCSLKCDVDRLAFSCIWEMNHNAEILKTKFTKSVINSKASLTYAEAQLRIDSANMNDDITTSLRGLNKLAKILKKRRIEKGALTLSSPEVRFHMDSETHDPIDLQTKELRETNSMVEEFMLLANISVAKKIHEEFSEHALLRKHPAPPPSNYEILVKAARSRNLEIKTDTAKSLAESLDQAESPTFPYLNTLLRILATRCMMQAVYFCSGMDNDFHHYGLASPIYTHFTSPIRRYADVIVHRLLAVAIGADCTYPELTDKHKLADICKNLNFRHKMAQYAQRASVAFHTQLFFKSKGIVSEEAYILFVRKNAIVVLIPKYGLEGTVFFEEKDKPNPQLIYDDEIPSLKIEDTVFHVFDKVKVKIMLDSSNLQHQKIRMSLVEPQIPGISIPTDTSNMDLNGPKKKKMKLGK

SEQ ID NO: 10229 - protein, 865 aa, Homo sapiens
MASLYQRFTGKINTSRSFPAPPEASHLLGGQGPEEDGGAGAKPLGPRAQAAAPRERGGGGGGAGGRPRFQYQARSDGDEEDELVGSNPPQRNWKGIAIALLVILVICSLIVTSVILLTPAEDNSLSQKKKVTVEDLFSEDFKIHDPEAKWISDTEFIYREQKGTVRLWNVETNTSTVLIEGKKIESLRAIRYEISPDREYALFSYNVEPIYQHSYTGYYVLSKIPHGDPQSLDPPEVSNAKLQYAGWGPKGQQLIFIFENNIYYCAHVGKQAIRVVSTGKEGVIYNGLSDWLYEEEILKTHIAHWWSPDGTRLAYAAINDSRVPIMELPTYTGSIYPTVKPYHYPKAGSENPSISLHVIGLNGPTHDLEMMPPDDPRMREYYITMVKWATSTKVAVTWLNRAQNVSILTLCDATTGVCTKKHEDESEAWLHRQNEEPVFSKDGRKFFFIRAIPQGGRGKFYHITVSSSQPNSSNDNIQSITSGDWDVTKILAYDEKGNKIYFLSTEDLPRRRQLYSANTVGNFNRQCLSCDLVENCTYFSASFSHSMDFFLLKCEGPGVPMVTVHNTTDKKKMFDLETNEHVKKAINDRQMPKVEYRDIEIDDYNLPMQILKPATFTDTTHYPLLLVVDGTPGSQSVAEKFEVSWETVMVSSHGAVVVKCDGRGSGFQGTKLLHEVRRRLGLLEEKDQMEAVRTMLKEQYIDRTRVAVFGKDYGGYLSTYILPAKGENQGQTFTCGSALSPITDFKLYASAFSERYLGLHGLDNRAYEMTKVAHRVSALEEQQFLIIHPTADEKIHFQHTAELITQLIRGKANYSLQIYPDESHYFTSSSLKQHLYRSIINFFVECFRIQDKLLTVTAKEDEEED

SEQ ID NO: 10230 - protein, 348 aa, Homo sapiens
MAGSLPPCVVDCGTGYTKLGYAGNTEPQFIIPSCIAIRESAKVVDQAQRRVLRGVDDLDFFIGDEAIDKPTYATKWPIRHGIIEDWDLMERFMEQVVFKYLRAEPEDHYFLMTEPPLNTPENREYLAEIMFESFNVPGLYIAVQAVLALAASWTSRQVGERTLTGIVIDSGDGVTHVIPVAEGYVIGSCIKHIPIAGRDITYFIQQLLREREVGIPPEQSLETAKAIKEKYCYICPDIVKEFAKYDVDPRKWIKQYTGINAINQKKFVIDVGYERFLGPEIFFHPEFANPDFMESISDVVDEVIQNCPIDVRRPLYKPEFFQVCHTKKDYEEYGPSICRHNPVFGVMS

SEQ ID NO: 10231 - protein, 928 aa, Homo sapiens
MLKSKTFLKKTRAGGVMKIVREHYLRDDIGCGAPGCAACGGAHEGPALEPQPQDPASSVCPQPHYLLPDTNVLLHQIVSAWRPGTWASVASSLRLPGSLETYVEQEQGENANDRNDRAIRVAAKWYNEHLKKMSADNQLQVIFITNDRRNKEKAIEEGIPAFTCEEYVKSLTANPELIDRLACLSEEGNEIESGKIIFSEHLPLSKLQQGIKSGTYLQGTFRASRENYLEATVWIHGDNEENKEIILQGLKHLNRAVHEDIVAVELLPKSQWVAPSSVVLHDEGQNEEDVEKEEETERMLKTAVSEKMLKPTGRVVGIIKRNWRPYCGMLSKSDIKESRRHLFTPADKRIPRIRIETRQASTLEGRRIIVAIDGWPRNSRYPNGHFVRNLGDVGEKETETEVLLLEHDVPHQPFSQAVLSFLPKMPWSITEKDMKNREDLRHLCICSVDPPGCTDIDDALHCRELENGNLEVGVHIADVSHFIRPGNALDQESARRGTTVYLCEKRIDMVPELLSSNLCSLKCDVDRLAFSCIWEMNHNAEILKTKFTKSVINSKASLTYAEAQLRIDSANMNDDITTSLRGLNKLAKILKKRRIEKGALTLSSPEVRFHMDSETHDPIDLQTKELRETNSMVEEFMLLANISVAKKIHEEFSEHALLRKHPAPPPSNYEILVKAARSRNLEIKTDTAKSLAESLDQAESPTFPYLNTLLRILATRCMMQAVYFCSGMDNDFHHYGLASPIYTHFTSPIRRYADVIVHRLLAVAIGADCTYPELTDKHKLADICKNLNFRHKMAQYAQRASVAFHTQLFFKSKGIVSEEAYILFVRKNAIVVLIPKYGLEGTVFFEEKDKPNPQLIYDDEIPSLKIEDTVFHVFDKVKVKIMLDSSNLQHQKIRMSLVEPQIPGISIPTDTSNMDLNGPKKKKMKLGK

SEQ ID NO: 10232 - protein, 481 aa, Homo sapiens
MYQASAVSLLPRDIPSCHSPSPGFSHLPTSSSQLAPDLLQFPLGQDPSFLAIPILTLPPSDSLVPPYIVWYIVWPSALISFLGCTLTVQFSNGKLQSPGNMRFTLYENKDSTNPRKRNQRILAAETDRLSYVGNNFGTGALKCNTLCRHFVGILNKTSGQMEVYDAELFNMQPLFSDVSVESELALESQTKTYREKMDSCIEAFGTTKQKRALNTRRMNRVGNESLNRAVAKAAETIIDTKGVTALVSDAIHNDLQDDSLYLPPCYDDAAKPEDVYKFEDLLSPAEYEALQSPSEAFRNVTSEEILKMIEENSHCTFVIEALKSLPSDVESRDRQARCIWFLDTLIKFRAHRVVKRKSALGPGVPHIINTKLLKHFTCLTYNNGRLRNLISDSMKAKITAYVIILALHIHDFQIDLTVLQRDLKLSEKRMMEIAKAMRLKISKRRVSVAAGSEEDHKLGTLSLPLPPAQTSDRLAKRRKIT

SEQ ID NO: 10233 - protein, 1488 aa, Homo sapiens
MAEARKRRELLPLIYHHLLRAGYVRAAREVKEQSGQKCFLAQPVTLLDIYTHWQQTSELGRKRKAEEDAALQAKKTRVSDPISTSESSEEEEEAEAETAKATPRLASTNSSVLGADLPSSMKEKAKAETEKAGKTGNSMPHPATGKTVANLLSGKSPRKSAEPSANTTLVSETEEEGSVPAFGAAAKPGMVSAGQADSSSEDTSSSSDETDVEGKPSVKPAQVKASSVSTKESPARKAAPAPGKVGDVTPQVKGGALPPAKRAKKPEEESESSEEGSESEEEAPAGTRSQVKASEKILQVRAASAPAKGTPGKGATPAPPGKAGAVASQTKAGKPEEDSESSSEESSDSEEETPAAKALLQAKASGKTSQVGAASAPAKESPRKGAAPAPPGKTGPAVAKAQAGKREEDSQSSSEESDSEEEAPAQAKPSGKAPQVRAASAPAKESPRKGAAPAPPRKTGPAAAQVQVGKQEEDSRSSSEESDSDREALAAMNAAQVKPLGKSPQVKPASTMGMGPLGKGAGPVPPGKVGPATPSAQVGKWEEDSESSSEESSDSSDGEVPTAVAPAQEKSLGNILQAKPTSSPAKGPPQKAGPVAVQVKAEKPMDNSESSEESSDSADSEEAPAAMTAAQAKPALKIPQTKACPKKTNTTASAKVAPVRVGTQAPRKAGTATSPAGSSPAVAGGTQRPAEDSSSSEESDSEEEKTGLAVTVGQAKSVGKGLQVKAASVPVKGSLGQGTAPVLPGKTGPTVTQVKAEKQEDSESSEEESDSEEAAASPAQVKTSVKKTQAKANPAAARAPSAKGTISAPGKVVTAAAQAKQRSPSKVKPPVRNPQNSTVLARGPASVPSVGKAVATAAQAQTGPEEDSGSSEEESDSEEEAETLAQVKPSGKTHQIRAALAPAKESPRKGAAPTPPGKTGPSAAQAGKQDDSGSSSEESDSDGEAPAAVTSAQVIKPPLIFVDPNRSPAGPAATPAQAQAASTPRKARASESTARSSSSESEDEDVIPATQCLTPGIRTNVVTMPTAHPRIAPKASMAGASSSKESSRISDGKKQEGPATQVSKKNPASLPLTQAALKVLAQKASEAQPPVARTQPSSGVDSAVGTLPATSPQSTSVQAKGTNKLRKPKLPEVQQATKAPESSDDSEDSSDSSSGSEEDGEGPQGAKSAHTLGPTPSRTETLVEETAAESSEDDVVAPSQSLLSGYMTPGLTPANSQASKATPKLDSSPSVSSTLAAKDDPDGKQEAKPQQAAGMLSPKTGGKEAASGTTPQKSRKPKKGAGNPQASTLALQSNITQCLLGQPWPLNEAQVQASVVKVLTELLEQERKKVVDTTKESSRKGWESRKRKLSGDQPAARTPRSKKKKKLGAGEGGEASVSPEKTSTTSKGKAKRDKASGDVKEKKGKGSLGSQGAKDEPEEELQKGMGTVEGGDQSNPKSKKEKKKSDKRKKDKEKKEKKKKAKKASTKDSESPSQKKKKKKKKTAEQTV

SEQ ID NO: 10234 - protein, 419 aa, Homo sapiens
MAAEVLPSARWQYCGAPDGSQRAVLVQFSNGKLQSPGNMRFTLYENKDSTNPRKRNQRILAAETDRLSYVGNNFGTGALKCNTLCRHFVGILNKTSGQMEVYDAELFNMQPLFSDVSVESELALESQTKTYREKMDSCIEAFGTTKQKRALNTRRMNRVGNESLNRAVAKAAETIIDTKGVTALVSDAIHNDLQDDSLYLPPCYDDAAKPEDVYKFEDLLSPAEYEALQSPSEAFRNVTSEEILKMIEENSHCTFVIEALKSLPSDVESRDRQARCIWFLDTLIKFRAHRVVKRKSALGPGVPHIINTKLLKHFTCLTYNNGRLRNLISDSMKAKITAYVIILALHIHDFQIDLTVLQRDLKLSEKRMMEIAKAMRLKISKRRVSVAAGSEEDHKLGTLSLPLPPAQTSDRLAKRRKIT

SEQ ID NO: 10235 - protein, 1032 aa, Homo sapiens
MAEPSAATQSHSISSSSFGAEPSAPGGGGSPGACPALGTKSCSSSCADSFVSSSSSQPVSLFSTSQEGLSSLCSDEPSSEIMTSSFLSSSEIHNTGLTILHGEKSHVLGSQPILAKEGKDHLDLLDMKKMEKPQGTSNNVSDSSVSLAAGVHCDRPSIPASFPEHPAFLSKKIGQVEEQIDKETKNPNGVSSREAKTALDADDRFTLLTAQKPPTEYSKVEGIYTYSLSPSKVSGDDVIEKDSPESPFEVIIDKAAFDKEFKDSYKESTDDFGSWSVHTDKESSEDISETNDKLFPLRNKEAGRYPMSALLSRQFSHTNAALEEVSRCVNDMHNFTNEILTWDLVPQVKQQTDKSSDCITKTTGLDMSEYNSEIPVVNLKTSTHQKTPVCSIDGSTPITKSTGDWAEASLQQENAITGKPVPDSLNSTKEFSIKGVQGNMQKQDDTLAELPGSPPEKCDSLGSGVATVKVVLPDDHLKDEMDWQSSALGEITEADSSGESDDTVIEDITADTSFENNKIQAEKPVSIPSAVVKTGEREIKEIPSCEREEKTSKNFEELVSDSELHQDQPDILGRSPASEAACSKVPDTNVSLEDVSEVAPEKPITTENPKLPSTVSPNVFNETEFSLNVTTSAYLESLHGKNVKHIDDSSPEDLIAAFTETRDKGIVDSERNAFKAISEKMTDFKTTPPVEVLHENESGGSEIKDIGSKYSEQSKETNGSEPLGVFPTQGTPVASLDLEQEQLTIKALKELGERQVEKSTSAQRDAELPSEEVLKQTFTFAPESWPQRSYDILERNVKNGSDLGISQKPITIRETTRVDAVSSLSKTELVKKHVLARLLTDFSVHDLIFWRDVKKTGFVFGTTLIMLLSLAAFSVISVVSYLILALLSVTISFRIYKSVIQAVQKSEEGHPFKAYLDVDITLSSEAFHNYMNAAMVHINRALKLIIRLFLVEDLVDSLKLAVFMWLMTYVGAVFNGITLLILAELLIFSVPIVYEKYKTQIDHYVGIARDQTKSIVEKIQAKLPGIAKKKAE

SEQ ID NO: 10236 - protein, 3623 aa, Homo sapiens
MMNMSLPFLWSLLTLLIFAEVNGEAGELELQRQKRSINLQQPRMATERGNLVFLTGSAQNIEFRTGSLGKIKLNDEDLSECLHQIQKNKEDIIELKGSAIGLPQNISSQIYQLNSKLVDLERKFQGLQQTVDKKVCSSNPCQNGGTCLNLHDSFFCICPPQWKGPLCSADVNECEIYSGTPLSCQNGGTCVNTMGSYSCHCPPETYGPQCASKYDDCEGGSVARCVHGICEDLMREQAGEPKYSCVCDAGWMFSPNSPACTLDRDECSFQPGPCSTLVQCFNTQGSFYCGACPTGWQGNGYICEDINECEINNGGCSVAPPVECVNTPGSSHCQACPPGYQGDGRVCTLTDICSVSNGGCHPDASCSSTLGSLPLCTCLPGYTGNGYGPNGCVQLSNICLSHPCLNGQCIDTVSGYFCKCDSGWTGVNCTENINECLSNPCLNGGTCVDGVDSFSCECTRLWTGALCQVPQQVCGESLSGINGSFSYRSPDVGYVHDVNCFWVIKTEMGKVLRITFTFFRLESMDNCPHEFLQVYDGDSSSAFQLGRFCGSSLPHELLSSDNALYFHLYSEHLRNGRGFTVRWETQQPECGGILTGPYGSIKSPGYPGNYPPGRDCVWIVVTSPDLLVTFTFGTLSLEHHDDCNKDYLEIRDGPLYQDPLLGKFCTTFSVPPLQTTGPFARIHFHSDSQISDQGFHITYLTSPSDLRCGGNYTDPEGELFLPELSGPFTHTRQCVYMMKQPQGEQIQINFTHVELQCQSDSSQNYIEVRDGETLLGKVCGNGTISHIKSITNSVWIRFKIDASVEKASFRAVYQVACGDELTGEGVIRSPFFPNVYPGERTCRWTIHQPQSQVILLNFTVFEIGSSAHCETDYVEIGSSSILGSPENKKYCGTDIPSFITSVYNFLYVTFVKSSSTENHGFMAKFSAEDLACGEILTESTGTIQSPGHPNVYPHGINCTWHILVQPNHLIHLMFETFHLEFHYNCTNDYLEVYDTDSETSLGRYCGKSIPPSLTSSGNSLMLVFVTDSDLAYEGFLINYEAISAATACLQDYTDDLGTFTSPNFPNNYPNNWECIYRITVRTGQLIAVHFTNFSLEEAIGNYYTDFLEIRDGGYEKSPLLGIFYGSNLPPTIISHSNKLWLKFKSDQIDTRSGFSAYWDGSSTGCGGNLTTSSGTFISPNYPMPYYHSSECYWWLKSSHGSAFELEFKDFHLEHHPNCTLDYLAVYDGPSSNSHLLTQLCGDEKPPLIRSSGDSMFIKLRTDEGQQGRGFKAEYRQTCENVVIVNQTYGILESIGYPNPYSENQHCNWTIRATTGNTVNYTFLAFDLEHHINCSTDYLELYDGPRQMGRYCGVDLPPPGSTTSSKLQVLLLTDGVGRREKGFQMQWFVYGCGGELSGATGSFSSPGFPNRYPPNKECIWYIRTDPGSSIQLTIHDFDVEYHSRCNFDVLEIYGGPDFHSPRIAQLCTQRSPENPMQVSSTGNELAIRFKTDLSINGRGFNASWQAVTGGCGGIFQAPSGEIHSPNYPSPYRSNTDCSWVIRVDRNHRVLLNFTDFDLEPQDSCIMAYDGLSSTMSRLARTCGREQLANPIVSSGNSLFLRFQSGPSRQNRGFRAQFRQACGGHILTSSFDTVSSPRFPANYPNNQNCSWIIQAQPPLNHITLSFTHFELERSTTCARDFVEILDGGHEDAPLRGRYCGTDMPHPITSFSSALTLRFVSDSSISAGGFHTTVTASVSACGGTFYMAEGIFNSPGYPDIYPPNVECVWNIVSSPGNRLQLSFISFQLEDSQDCSRDFVEIREGNATGHLVGRYCGNSFPLNYSSIVGHTLWVRFISDGSGSGTGFQATFMKIFGNDNIVGTHGKVASPFWPENYPHNSNYQWTVNVNASHVVHGRILEMDIEEIQNCYYDKLRIYDGPSIHARLIGAYCGTQTESFSSTGNSLTFHFYSDSSISGKGFLLEWFAVDAPDGVLPTIAPGACGGFLRTGDAPVFLFSPGWPDSYSNRVDCTWLIQAPDSTVELNILSLDIESHRTCAYDSLVIRDGDNNLAQQLAVLCGREIPGPIRSTGEYMFIRFTSDSSVTRAGFNASFHKSCGGYLHADRGIITSPKYPETYPSNLNCSWHVLVQSGLTIAVHFEQPFQIPNGDSSCNQGDYLVLRNGPDICSPPLGPPGGNGHFCGSHASSTLFTSDNQMFVQFISDHSNEGQGFKIKYEAKSLACGGNVYIHDADSAGYVTSPNHPHNYPPHADCIWILAAPPETRIQLQFEDRFDIEVTPNCTSNYLELRDGVDSDAPILSKFCGTSLPSSQWSSGEVMYLRFRSDNSPTHVGFKAKYSIAQCGGRVPGQSGVVESIGHPTLPYRDNLFCEWHLQGLSGHYLTISFEDFNLQNSSGCEKDFVEIWDNHTSGNILGRYCGNTIPDSIDTSSNTAVVRFVTDGSVTASGFRLRFESSMEECGGDLQGSIGTFTSPNYPNPNPHGRICEWRITAPEGRRITLMFNNLRLATHPSCNNEHVIVFNGIRSNSPQLEKLCSSVNVSNEIKSSGNTMKVIFFTDGSRPYGGFTASYTSSEDAVCGGSLPNTPEGNFTSPGYDGVRNYSRNLNCEWTLSNPNQGNSSISIHFEDFYLESHQDCQFDVLEFRVGDADGPLMWRLCGPSKPTLPLVIPYSQVWIHFVTNERVEHIGFHAKYSFTDCGGIQIGDSGVITSPNYPNAYDSLTHCSSLLEAPQGHTITLTFSDFDIEPHTTCAWDSVTVRNGGSPESPIIGQYCGNSNPRTIQSGSNQLVVTFNSDHSLQGGGFYATWNTQTLGCGGIFHSDNGTIRSPHWPQNFPENSRCSWTAITHKSKHLEISFDNNFLIPSGDGQCQNSFVKVWAGTEEVDKALLATGCGNVAPGPVITPSNTFTAVFQSQEAPAQGFSASFVSRCGSNFTGPSGYIISPNYPKQYDNNMNCTYVIEANPLSVVLLTFVSFHLEARSAVTGSCVNDGVHIIRGYSVMSTPFATVCGDEMPAPLTIAGPVLLNFYSNEQITDFGFKFSYRIISCGGVFNFSSGIITSPAYSYADYPNDMHCLYTITVSDDKVIELKFSDFDVVPSTSCSHDYLAIYDGANTSDPLLGKFCGSKRPPNVKSSNNSMLLVFKTDSFQTAKGWKMSFRQTLGPQQGCGGYLTGSNNTFASPDSDSNGMYDKNLNCVWIIIAPVNKVIHLTFNTFALEAASTRQRCLYDYVKLYDGDSENANLAGTFCGSTVPAPFISSGNFLTVQFISDLTLEREGFNATYTIMDMPCGGTYNATWTPQNISSPNSSDPDVPFSICTWVIDSPPHQQVKITVWALQLTSQDCTQNYLQLQDSPQGHGNSRFQFCGRNASAVPVFYSSMSTAMVIFKSGVVNRNSRMSFTYQIADCNRDYHKAFGNLRSPGWPDNYDNDKDCTVTLTAPQNHTISLFFHSLGIENSVECRNDFLEVRNGSNSNSPLLGKYCGTLLPNPVFSQNNELYLRFKSDSVTSDRGYEIIWTSSPSGCGGTLYGDRGSFTSPGYPGTYPNNTYCEWVLVAPAGRLVTINFYFISIDDPGDCVQNYLTLYDGPNASSPSSGPYCGGDTSIAPFVASSNQVFIKFHADYARRPSAFRLTWDS

SEQ ID NO: 10237 - protein, 1243 aa, Homo sapiens
METRAAENTAIFMCKCCNLFSPNQSELLSHVSEKHMEEGVNVDEIIIPLRPLSTPEPPNSSKTGDEFLVMKRKRGRPKGSTKKSSTEEELAENIVSPTEDSPLAPEEGNSLPPSSLECSKCCRKFSNTRQLRKHICIIVLNLGEEEGEAGNESDLELEKKCKEDDREKASKRPRSQKTEKVQKISGKEARQLSGAKKPIISVVLTAHEAIPGATKIVPVEAGPPETGATNSETTSADLVPRRGYQEYAIQQTPYEQPMKSSRLGPTQLKIFTCEYCNKVFKFKHSLQAHLRIHTNEKPYKCPQCSYASAIKANLNVHLRKHTGEKFACDYCSFTCLSKGHLKVHIERVHKKIKQHCRFCKKKYSDVKNLIKHIRDAHDPQDKKVKEALDELCLMTREGKRQLLYDCHICERKFKNELDRDRHMLVHGDKWPFACELCGHGATKYQALELHVRKHPFVYVCAVCRKKFVSSIRLRTHIKEVHGAAQEALVFTSSINQSFCLLEPGGDIQQEALGDQLQLVEEEFALQGVNALKEEACPGDTQLEEGRKEPEAPGEMPAPAVHLASPQAESTALPPCELETTVVSSSDLHSQEVVSDDFLLKNDTSSAEAHAAPEKPPDMQHRSSVQTQGEVITLLLSKAQSAGSDQESHGAQSPLGEGQNMAVLSAGDPDPSRCLRSNPAEASDLLPPVAGGGDTITHQPDSCKAAPEHRSGITAFMKVLNSLQKKQMNTSLCERIRKVYGDLECEYCGKLFWYQVHFDMHVRTHTREHLYYCSQCHYSSITKNCLKRHVIQKHSNILLKCPTDGCDYSTPDKYKLQAHLKVHTALDKRSYSCPVCEKSFSEDRLIKSHIKTNHPEVSMSTISEVLGRRVQLKGLIGKRAMKCPYCDFYFMKNGSDLQRHIWAHEGVKPFKCSLCEYATRSKSNLKAHMNRHSTEKTHLCDMCGKKFKSKGTLKSHKLLHTADGKQFKCTVCDYTAAQKPQLLRHMEQHVSFKPFRCAHCHYSCNISGSLKRHYNRKHPNEEYANVGTGELAAEVLIQQGGLKCPVCSFVYGTKWEFNRHLKNKHGLKVVEIDGDPKWETATEAPEEPSTQYLHITEAEEDVQGTQAAVAALQDLRYTSESGDRLDPTAVNILQQIIELGAETHDATALASVVAMAPGTVTVVKQVTEEEPSSNHTVMIQETVQQASVELAEQHHLVVSSDDVEGIETVTVYTQGGEASEFIVYVQEAMQPVEEQAVEQPAQEL

SEQ ID NO: 10238 - protein, 288 aa, Homo sapiens
MDLEKNYPTPRTSRTGHGGVNQLGGVFVNGRPLPDVVRQRIVELAHQGVRPCDISRQLRVSHGCVSKILGRYYETGSIKPGVIGGSKPKVATPKVVEKIAEYKRQNPTMFAWEIRDRLLAERVCDNDTVPSVSSINRIIRTKVQQPPNQPVPASSHSIVSTGSVTQVSSVSTDSAGSSYSISGILGITSPSADTNKRKRDEGIQESPVPNGHSLPGRDFLRKQMRGDLFTQQQLEVLDRVFERQHYSDIFTTTEPIKPEQAVTWRARPSPGTLHTSPPLDRAATQHRR

SEQ ID NO: 10239 - protein, 748 aa, Homo sapiens
MSGSGRKDFDVKHILRLRWKLFSHPSPSTGGPAGGGCLQQDGSGSFEHWGPSQSRLLKSQERSGVSTFWKKPSSSSSSSSSPSSSSSSFNPLNGTLLPVATRLQQGAPGQGTQQPARTLFYVESLEEEVVPGMDFPGPHEKGLVLQELKVEPDNSSQATGEGCGHRLSSTGHSMTPQSDLDSSSSEEFYQAVHHAEQTFRKMESYLKQQQLCDVILIVGNRKIPAHRLVLSSVSDYFAAMFTSDVCEAKQEEIKMEGIDPNALWDLVQFAYTGCLELKEDTIENLLAAACLLQLPQVVEVCCHFLMKLLHPSNCLGIRAFADAQGCIELMKVAHSYTMENIMEVIRNQEFLLLPAEELHKLLASDDVNVPDEETIFHALMMWVKYDMQSRCNDLSMLLAFIRLPLLPPQILADLENHALFKNDLECQKLILEAMKYHLLPERRTLMQSPRTKPRKSTVGTLYAVGGMDNNKGATTIEKYDLRTNLWIQAGMMNGRRLQFGVAVIDDKLFVIGGRDGLKTLNTVECYNPKTKTWTVLPPMSTHRHGLGVTVLEGPIYAVGGHDGWSYLNTVERWDPQSQQWTFVASMSIARSTVGVAALNGKLYSVGGRDGSSCLSSMEYYDPHTNKWNMCAPMCKRRGGVGVATCDGFLYAVGGHDAPASNHCSRLLDYVERYDPKTDTWTMVAPLSMPRDAVGVCLLGDRLYAVGGYDGQTYLNTMESYDPQTNEWTQMASLNIGRAGACVVVIKQP

SEQ ID NO: 10240 - protein, 328 aa, Homo sapiens
MDLEKNYPTPRTSRTGHGGVNQLGGVFVNGRPLPDVVRQRIVELAHQGVRPCDISRQLRVSHGCVSKILGRYYETGSIKPGVIGGSKPKVATPKVVEKIAEYKRQNPTMFAWEIRDRLLAERVCDNDTVPSVSSINRIIRTKVQQPPNQPVPASSHSIVSTGSVTQVSSVSTDSAGSSYSISGILGITSPSADTNKRKRDEGIQESPVPNGHSLPGRDFLRKQMRGDLFTQQQLEVLDRVFERQHYSDIFTTTEPIKPEQTTEYSAMASLAGGLDDMKANLASPTPADIGSSVPGPQSYPIVTGSPYYYSAAARGAAPPAAATAYDRH

SEQ ID NO: 10241 - protein, 357 aa, Homo sapiens
MDLEKNYPTPRTSRTGHGGVNQLGGVFVNGRPLPDVVRQRIVELAHQGVRPCDISRQLRVSHGCVSKILGRYYETGSIKPGVIGGSKPKVATPKVVEKIAEYKRQNPTMFAWEIRDRLLAERVCDNDTVPSVSSINRIIRTKVQQPPNQPVPASSHSIVSTGSVTQVSSVSTDSAGSSYSISGILGITSPSADTNKRKRDEGIQESPVPNGHSLPGRDFLRKQMRGDLFTQQQLEVLDRVFERQHYSDIFTTTEPIKPEQTTEYSAMASLAGGLDDMKANLASPTPADIGSSVPGPQSYPIVTGSEFSGSPYSHPQYSSYNDSWRFPNPGLLGSPYYYSAAARGAAPPAAATAYDRH

SEQ ID NO: 10242 - protein, 362 aa, Homo sapiens
MDLEKNYPTPRTSRTGHGGVNQLGGVFVNGRPLPDVVRQRIVELAHQGVRPCDISRQLRVSHGCVSKILGRYYETGSIKPGVIGGSKPKVATPKVVEKIAEYKRQNPTMFAWEIRDRLLAERVCDNDTVPSVSSINRIIRTKVQQPPNQPVPASSHSIVSTGSVTQVSSVSTDSAGSSYSISGILGITSPSADTNKRKRDEGIQESPVPNGHSLPGRDFLRKQMRGDLFTQQQLEVLDRVFERQHYSDIFTTTEPIKPEQTTEYSAMASLAGGLDDMKANLASPTPADIGSSVPGPQSYPIVTGRDLASTTLPGYPPHVPPAGQGSYSAPTLTGMVPGSPYYYSAAARGAAPPAAATAYDRH

SEQ ID NO: 10243 - protein, 858 aa, Homo sapiens
MTVPISITNPDLLRHSTELFMDSGFSPLCQRMGAMVAFRRFEDFTRNFDEVISCFANVPKDTPLFSEARTSLYSEDDCKSLREEPIHILNVSIQCADHLEDEALVPILRTFVQSKKNILVDYGLRRITFLIAQEKEFPKFFTFRARDEFAEDRIYRHLEPALAFQLELNRMRNFDLTAVPCANHKMHLYLGAAKVKEGVEVTDHRFFIRAIIRHSDLITKEASFEYLQNEGERLLLEAMDELEVAFNNTSVRTDCNHIFLNFVPTVIMDPFKIEESVRYMVMRYGSRLWKLRVLQAEVKINIRQTTTGSAVPIRLFITNESGYYLDISLYKEVTDSRSGNIMFHSFGNKQGPQHGMLINTPYVTKDLLQAKRFQAQTLGTTYIYDFPEMFRQALFKLWGSPDKYPKDILTYTELVLDSQGQLVEMNRLPGGNEVGMVAFKMRFKTQEYPEGRDVIVIGNDITFRIGSFGPGEDLLYLRASEMARAEGIPKIYVAANSGARIGMAEEIKHMFHVAWVDPEDPHKGFKYLYLTPQDYTRISSLNSVHCKHIEEGGESRYMITDIIGKDDGLGVENLRGSGMIAGESSLAYEEIVTISLVTCRAIGIGAYLVRLGQRVIQVENSHIILTGASALNKVLGREVYTSNNQLGGVQIMHYNGVSHITVPDDFEGVYTILEWLSYMPKDNHSPVPIITPTDPIDREIEFLPSRAPYDPRWMLAGRPHPTLKGTWQSGFFDHGSFKEIMAPWAQTVVTGRARLGGIPVGVIAVETRTVEVAVPADPANLDSEAKIIQQAGQVWFPDSAYKTAQAVKDFNREKLPLMIFANWRGFSGGMKGCLGTWRDVSWWKIRAMLPMHIGEGSV

SEQ ID NO: 10244 - protein, 1032 aa, Homo sapiens
MDLRDFYLLAALIACLRLDSAIAQELIYTIREELPENVPIGNIPKDLNISHINAATGTSASLVYRLVSKAGDAPLVKVSSSTGEIFTTSNRIDREKLCAGASYAEENECFFELEVVILPNDFFRLIKIKIIVKDTNDNAPMFPSPVINISIPENTLINSRFPIPSATDPDTGFNGVQHYELLNGQSVFGLDIVETPEGEKWPQLIVQQNLDREQKDTYVMKIKVEDGGTPQKSSTAILQVTVSDVNDNRPVFKEGQVEVHIPENAPVGTSVIQLHATDADIGSNAEIRYIFGAQVAPATKRLFALNNTTGLITVQRSLDREETAIHKVTVLASDGSSTPARATVTINVTDVNDNPPNIDLRYIISPINGTVYLSEKDPVNTKIALITVSDKDTDVNGKVICFIEREVPFHLKAVYDNQYLLETSSLLDYEGTKEFSFKIVASDSGKPSLNQTALVRVKLEDENDNPPIFNQPVIELSVSENNRRGLYLTTISATDEDSGKNADIVYQLGPNASFFDLDRKTGVLTASRVFDREEQERFIFTVTARDNGTPPLQSQAAVIVTVLDENDNSPKFTHNHFQFFVSENLPKYSTVGVITVTDADAGENKAVTLSILNDNDNFVLDPYSGVIKSNVSFDREQQSSYTFDVKATDGGQPPRSSTAKVTINVMDVNDNSPVVISPPSNTSFKLVPLSAIPGSVVAEVFAVDVDTGMNAELKYTIVSGNNKGLFRIDPVTGNITLEEKPAPTDVGLHRLVVNISDLGYPKSLHTLVLVFLYVNDTAGNASYIYDLIRRTMETPLDRNIGDSSQPYQNEDYLTIMIAIIAGAMVVIVVIFVTVLVRCRHASRFKAAQRSKQGAEWMSPNQENKQNKKKKRKKRKSPKSSLLNFVTIEESKPDDAVHEPINGTISLPAELEEQSIGRFDWGPAPPTTFKPNSPDLAKHYKSASPQPAFHLKPDTPVSVKKHHVIQELPLDNTFVGGCDTLSKRSSTSSDHFSASECSSQGGFKTKGPLHTRQVNEHFYWSISTAYKCPVNQY

SEQ ID NO: 10245 - protein, 1237 aa, Homo sapiens
MDLRDFYLLAALIACLRLDSAIAQELIYTIREELPENVPIGNIPKDLNISHINAATGTSASLVYRLVSKAGDAPLVKVSSSTGEIFTTSNRIDREKLCAGASYAEENECFFELEVVILPNDFFRLIKIKIIVKDTNDNAPMFPSPVINISIPENTLINSRFPIPSATDPDTGFNGVQHYELLNGQSVFGLDIVETPEGEKWPQLIVQQNLDREQKDTYVMKIKVEDGGTPQKSSTAILQVTVSDVNDNRPVFKEGQVEVHIPENAPVGTSVIQLHATDADIGSNAEIRYIFGAQVAPATKRLFALNNTTGLITVQRSLDREETAIHKVTVLASDGSSTPARATVTINVTDVNDNPPNIDLRYIISPINGTVYLSEKDPVNTKIALITVSDKDTDVNGKVICFIEREVPFHLKAVYDNQYLLETSSLLDYEGTKEFSFKIVASDSGKPSLNQTALVRVKLEDENDNPPIFNQPVIELSVSENNRRGLYLTTISATDEDSGKNADIVYQLGPNASFFDLDRKTGVLTASRVFDREEQERFIFTVTARDNGTPPLQSQAAVIVTVLDENDNSPKFTHNHFQFFVSENLPKYSTVGVITVTDADAGENKAVTLSILNDNDNFVLDPYSGVIKSNVSFDREQQSSYTFDVKATDGGQPPRSSTAKVTINVMDVNDNSPVVISPPSNTSFKLVPLSAIPGSVVAEVFAVDVDTGMNAELKYTIVSGNNKGLFRIDPVTGNITLEEKPAPTDVGLHRLVVNISDLGYPKSLHTLVLVFLYVNDTAGNASYIYDLIRRTMETPLDRNIGDSSQPYQNEDYLTIMIAIIAGAMVVIVVIFVTVLVRCRHASRFKAAQRSKQGAEWMSPNQENKQNKKKKRKKRKSPKSSLLNFVTIEESKPDDAVHEPINGTISLPAELEEQSIGRFDWGPAPPTTFKPNSPDLAKHYKSASPQPAFHLKPDTPVSVKKHHVIQELPLDNTFVGGCDTLSKRSSTSSDHFSASECSSQGGFKTKGPLHTRQCNSHSKSDNIPVTPQKCPSSTGFHIQENEESHYESQRRVTFHLPDGSQESCSDSGLGDHEPVGSGTLISHPLPLVQPQDEFYDQASPDKRTEADGNSDPNSDGPLGPRGLAEATEMCTQECLVLGHSDNCWMPPGLGPYQHPKSPLSTFAPQKEWVKKDKLVNGHTLTRAWKEDSNRNQFNDRKQYGSNEGHFNNGSHMTDIPLANLKSYKQAGGATESPKEHQL

SEQ ID NO: 10246 - protein, 540 aa, Homo sapiens
MYENECECQLLLKEMLERLNKEADEALLHNLRLQLEAQFLQDDISAAKDRHKKNLLEVQTYISILQQIIHTTPPASIVTSGMREEKLLTEREVAALRSQLEEGREVLSHLQAQRVELQAQTTTLEQAIKSAHECYDDEIQLYNEQIETLRKEIEETERVLEKSSYDCRQLAVAQQTLKNELDRYHRIIEIEGNRLTSAFIETPIPLFTQSHGVSLSTGSGGKDLTRALQDITAAKPRQKALPKNVPRRKEIITKDKTNGALEDAPLKGLEDTKLVQVVLKEESESKFESESKEVSPLTQEGAPEDVPDGGQISKGFGKLYRKVKEKVRSPKEPETPTELYTKERHVLVTGDANYVDPRFYVSSITAKGGVAVSVAEDSVLYDGQVEPSPESPKPPLENGQVGLQEKEDGQPIDQQPIDKEIEPDGAELEGPEEKREGEERDEESRRPCAMVTPGAEEPSIPEPPKPAADQDGAEVLGTRSRSLPEKGPPKALAYKTVEVVESIEKISTESIQTYEETAVIVETMIGKTKSDKKKSGEKSS

SEQ ID NO: 10247 - protein, 563 aa, Homo sapiens
MAFNDLLQQVGGVGRFQQIQVTLVVLPLLLMASHNTLQNFTAAIPTHHCRPPADANLSKNGGLEVWLPRDRQGQPESCLRFTSPQWGLPFLNGTEANGTGATEPCTDGWIYDNSTFPSTIVTEWDLVCSHRALRQLAQSLYMVGVLLGAMVFGYLADRLGRRKVLILNYLQTAVSGTCAAFAPNFPIYCAFRLLSGMALAGISLNCMTLNVEWMPIHTRACVGTLIGYVYSLGQFLLAGVAYAVPHWRHLQLLVSAPFFAFFIYSWFFIESARWHSSSGRLDLTLRALQRVARINGKREEGAKLSMEVLRASLQKELTMGKGQASAMELLRCPTLRHLFLCLSMLWFATSFAYYGLVMDLQGFGVSIYLIQVIFGAVDLPAKLVGFLVINSLGRRPAQMAALLLAGICILLNGVIPQDQSIVRTSLAVLGKGCLAASFNCIFLYTGELYPTMIRQTGMGMGSTMARVGSIVSPLVSMTAELYPSMPLFIYGAVPVAASAVTVLLPETLGQPLPDTVQDLESRWAPTQKEAGIYPRKGKQTRQQQEHQKYMVPLQASAQEKNGL

SEQ ID NO: 10248 - protein, 665 aa, Homo sapiens
MYRRSYVFQTRKEQYEHADEASRAAEPERPADEGWAGATSLAALQGLGERVAAHVQRARALEQRHAGLRRQLDAFQRLGELAGPEDALARQVESNRQRVRDLEAERARLERQGTEAQRALDEFRSKYENECECQLLLKEMLERLNKEADEALLHNLRLQLEAQFLQDDISAAKDRHKKNLLEVQTYISILQQIIHTTPPASIVTSGMREEKLLTEREVAALRSQLEEGREVLSHLQAQRVELQAQTTTLEQAIKSAHECYDDEIQLYNEQIETLRKEIEETERVLEKSSYDCRQLAVAQQTLKNELDRYHRIIEIEGNRLTSAFIETPIPLFTQSHGVSLSTGSGGKDLTRALQDITAAKPRQKALPKNVPRRKEIITKDKTNGALEDAPLKGLEDTKLVQVVLKEESESKFESESKEVSPLTQEGAPEDVPDGGQISKGFGKLYRKVKEKVRSPKEPETPTELYTKERHVLVTGDANYVDPRFYVSSITAKGGVAVSVAEDSVLYDGQVEPSPESPKPPLENGQVGLQEKEDGQPIDQQPIDKEIEPDGAELEGPEEKREGEERDEESRRPCAMVTPGAEEPSIPEPPKPAADQDGAEVLGTRSRSLPEKGPPKALAYKTVEVVESIEKISTESIQTYEETAVIVETMIGKTKSDKKKSGEKSS

SEQ ID NO: 10249 - protein, 209 aa, Homo sapiens
MQMDNRLPPKKVPGFCSFRYGLSFLVHCCNVIITAQRACLNLTMVVMVNSTDPHGLPNTSTKKLLDNIKNPMYNWSPDIQGIILSSTSYGVIIIQVPVGYFSGIYSTKKMIGFALCLSSVLSLLIPPAAGIGVAWVVVCRAVQGAAQGIVATAQFEIYVKWAPPLERGRLTSMSTSGFLLGPFIVLLVTGVICESLGWPMVFYIFGQFK

SEQ ID NO: 10250 - protein, 388 aa, Homo sapiens
MDKLDANVSSEEGFGSVEKVVLLTFLSTVILMAILGNLLVMVAVCWDRQLRKIKTNYFIVSLAFADLLVSVLVMPFGAIELVQDIWIYGEVFCLVRTSLDVLLTTASIFHLCCISLDRYYAICCQPLVYRNKMTPLRIALMLGGCWVIPTFISFLPIMQGWNNIGIIDLIEKRKFNQNSNSTYCVFMVNKPYAITCSVVAFYIPFLLMVLAYYRIYVTAKEHAHQIQMLQRAGASSESRPQSADQHSTHRMRTETKAAKTLCIIMGCFCLCWAPFFVTNIVDPFIDYTVPGQVWTAFLWLGYINSGLNPFLYAFLNKSFRRAFLIILCCDDERYRRPSILGQTVPCSTTTINGSTHVLRDAVECGGQWESQCHPPATSPLVAAQPSDT

SEQ ID NO: 10251 - protein, 619 aa, Homo sapiens
MVFASAERPVFTNHFLVELHKGGEDKARQVAAEHGFGVRKLPFAEGLYHFYHNGLAKAKRRRSLHHKQQLERDPRVKMALQQEGFDRKKRGYRDINEIDINMNDPLFTKQWYLINTGQADGTPGLDLNVAEAWELGYTGKGVTIGIMDDGIDYLHPDLASNYNAEASYDFSSNDPYPYPRYTDDWFNSHGTRCAGEVSAAANNNICGVGVAYNSKVAGIRMLDQPFMTDIIEASSISHMPQLIDIYSASWGPTDNGKTVDGPRELTLQAMADGVNKGRGGKGSIYVWASGDGGSYDDCNCDGYASSMWTISINSAINDGRTALYDESCSSTLASTFSNGRKRNPEAGVATTDLYGNCTLRHSGTSAAAPEAAGVFALALEANLGLTWRDMQHLTVLTSKRNQLHDEVHQWRRNGVGLEFNHLFGYGVLDAGAMVKMAKDWKTVPERFHCVGGSVQDPEKIPSTGKLVLTLTTDACEGKENFVRYLEHVQAVITVNATRRGDLNINMTSPMGTKSILLSRRPRDDDSKVGFDKWPFMTTHTWGEDARGTWTLELGFVGSAPQKGVLKEWTLMLHGTQSAPYIDQVVRDYQSKLAMSKKEELEEELDEAVERSLKSILNKN

SEQ ID NO: 10252 - protein, 497 aa, Homo sapiens
MSTGPDVKATVGDISSDGNLNVAQEECSRKGFCSVRHGLALILQLCNFSIYTQQMNLSIAIPAMVNNTAPPSQPNASTERPSTDSQGYWNETLKEFKAMAPAYDWSPEIQGIILSSLNYGSFLAPIPSGYVAGIFGAKYVVGAGLFISSFLTLFIPLAANAGVALLIVLRIVQGIAQVMVLTGQYSIWVKWAPPLERSQLTTIAGSGSMLGSFIVLLAGGLLCQTIGWPYVFYIFGGIGCACCPLWFPLIYDDPVNHPFISAGEKRYIVCSLAQQDCSPGWSLPIRAMIKSLPLWAILVSYFCEYWLFYTIMAYTPTYISSVLQANLRDSGILSALPFVVGCICIILGGLLADFLLSRKILRLITIRKLFTAIGVLFPSVILVSLPWVRSSHSMTMTFLVLSSAISSFCESGALVNFLDIAPRYTGFLKGLLQVFAHIAGAISPTAAGFFISQDSEFGWRNVFLLSAAVNISGLVFYLIFGRADVQDWAKEQTFTHL

SEQ ID NO: 10253 - protein, 1182 aa, Homo sapiens
MERHQPRLHHPAQGSAAGTPYPSSASLRGCRESKMPRRKGPQHPPPPSGPEEPGEKRPKFLDKFASIRIPGSKKERPPLPNLKTAFASSDCSAAPLEMMENFPKPLSENELLELFEKMMEDMNLNEDKKAPLREKDFSIKKEMVMQYINTASKTGSLKRSRQISPQEFIHELKMGSADERLVTCLESLRVSLTSNPVSWVESFGHEGLGLLLDILEKLISGKIQEKVVKKNQHKVIQCLKALMNTQYGLERIMSEERSLSLLAKAVDPRHPNMMTDVVKLLSAVCIVGEESILEEVLEALTSAGEEKKIDRFFCIVEGLRHNSVQLQVACMQLINALVTSPDDLDFRLHIRNEFMRCGLKEILPNLKCIKNDGLDIQLKVFDEHKEEDLFELSHRLEDIRAELDEAYDVYNMVWSTVKETRAEGYFISILQHLLLIRNDYFIRQQYFKLIDECVSQIVLHRDGMDPDFTYRKRLDLDLTQFVDICIDQAKLEEFEEKASELYKKFEKEFTDHQETQAELQKKEAKINELQAELQAFKSQFGALPADCNIPLPPSKEGGTGHSALPPPPPLPSGGGVPPPPPPPPPPPLPGMRMPFSGPVPPPPPLGFLGGQNSPPLPILPFGLKPKKEFKPEISMRRLNWLKIRPHEMTENCFWIKVNENKYENVDLLCKLENTFCCQQKERREEEDIEEKKSIKKKIKELKFLDSKIAQNLSIFLSSFRVPYEEIRMMILEVDETRLAESMIQNLIKHLPDQEQLNSLSQFKSEYSNLCEPEQFVVVMSNVKRLRPRLSAILFKLQFEEQVNNIKPDIMAVSTACEEIKKSKSFSKLLELVLLMGNYMNAGSRNAQTFGFNLSSLCKLKDTKSADQKTTLLHFLVEICEEKYPDILNFVDDLEPLDKASKVSVETLEKNLRQMGRQLQQLEKELETFPPPEDLHDKFVTKMSRFVISAKEQYETLSKLHENMEKLYQSIIGYYAIDVKKVSVEDFLTDLNNFRTTFMQAIKENIKKREAEEKEKRVRIAKELAERERLERQQKKKRLLEMKTEGDETGVMDNLLEALQSGAAFRDRRKRTPMPKDVRQSLSPMSQRPVLKVCNHENQKVQLTEGSRSHYNINCNSTRTPVAKELNYNLDTHTSTGRIKAAEKKEACNVESNRKKETELLGSFSKNESVPEVEALLARLRAL

SEQ ID NO: 10254 - protein, 1159 aa, Homo sapiens
MYLSICCCFLLWAPALTLKNLNYSVPEEQGAGTVIGNIGRDARLQPGLPPAERGGGGRSKSGSYRVLENSAPHLLDVDADSGLLYTKQRIDRESLCRHNAKCQLSLEVFANDKEICMIKVEIQDINDNAPSFSSDQIEMDISENAAPGTRFPLTSAHDPDAGENGLRTYLLTRDDHGLFGLDVKSRGDGTKFPELVIQKALDREQQNHHTLVLTALDGGEPPRSATVQINVKVIDSNDNSPVFEAPSYLVELPENAPLGTVVIDLNATDADEGPNGEVLYSFSSYVPDRVRELFSIDPKTGLIRVKGNLDYEENGMLEIDVQARDLGPNPIPAHCKVTVKLIDRNDNAPSIGFVSVRQGALSEAAPPGTVIALVRVTDRDSGKNGQLQCRVLGGGGTGGGGGLGGPGGSVPFKLEENYDNFYTVVTDRPLDRETQDEYNVTIVARDGGSPPLNSTKSFAIKILDENDNPPRFTKGLYVLQVHENNIPGEYLGSVLAQDPDLGQNGTVSYSILPSHIGDVSIYTYVSVNPTNGAIYALRSFNFEQTKAFEFKVLAKDSGAPAHLESNATVRVTVLDVNDNAPVIVLPTLQNDTAELQVPRNAGLGYLVSTVRALDSDFGESGRLTYEIVDGNDDHLFEIDPSSGEIRTLHPFWEDVTPVVELVVKVTDHGKPTLSAVAKLIIRSVSGSLPEGVPRVNGEQHHWDMSLPLIVTLSTISIILLAAMITIAVKCKRENKEIRTYNCRIAEYSHPQLGGGKGKKKKINKNDIMLVQSEVEERNAMNVMNVVSSPSLATSPMYFDYQTRLPLSSPRSEVMYLKPASNNLTVPQGHAGCHTSFTGQGTNASETPATRMSIIQTDNFPAEPNYMGSRQQFVQSSSTFKDPERASLRDSGHGDSDQADSDQDTNKGSCCDMSVREALKMKTTSTKSQPLEQEPEECVNCTDECRVLGHSDRCWMPQFPAANQAENADYRTNLFVPTVEANVETETYETVNPTGKKTFCTFGKDKREHTILIANVKPYLKAKRALSPLLQEVPSASSSPTKACIEPCTSTKGSLDGCEAKPGALAEASSQYLPTDSQYLSPSKQPRDPPFMASDQMARVFADVHSRASRDSSEMGAVLEQLDHPNRDLGRESVDAEEVVREIDKLLQDCRGNDPVAVRK

SEQ ID NO: 10255 - protein, 1120 aa, Homo sapiens
MELSDVRCLTGSEELYTIHPTPPAGDGRSASRPQRLLWQTAVRHITEQRFIHGHRGGSGSGSGGSGKASDPAGGGPNHHAPQLSGDSALPLYSLGPGERAHSTCGTKVFPERSGSGSASGSGGGGDLGFLHLDCAPSNSDFFLNGGYSYRGVIFPTLRNSFKSRDLERLYQRYFLGQRRKSEVVMNVLDVLTKLTLLVLHLSLASAPMDPLKGILLGFFTGIEVVICALVVVRKDTTSHTYLQYSGVVTWVAMTTQILAAGLGYGLLGDGIGYVLFTLFATYSMLPLPLTWAILAGLGTSLLQVILQVVIPRLAVISINQVVAQAVLFMCMNTAGIFISYLSDRAQRQAFLETRRCVEARLRLETENQRQERLVLSVLPRFVVLEMINDMTNVEDEHLQHQFHRIYIHRYENVSILFADVKGFTNLSTTLSAQELVRMLNELFARFDRLAHEHHCLRIKILGDCYYCVSGLPEPRQDHAHCCVEMGLSMIKTIRYVRSRTKHDVDMRIGIHSGSVLCGVLGLRKWQFDVWSWDVDIANKLESGGIPGRIHISKATLDCLNGDYNVEEGHGKERNEFLRKHNIETYLIKQPEDSLLSLPEDIVKESVSSSDRRNSGATFTEGSWSPELPFDNIVGKQNTLAALTRNSINLLPNHLAQALHVQSGPEEINKRIEHTIDLRSGDKLRREHIKPFSLMFKDSSLEHKYFVFTGVLAMVTCAVFLRLNSVLKLAVLLIMIAIYALLTETVYAGLFLRYDNLNHSGEDFLGTKEVSLLLMAMFLLAVFYHGQQLEYTARLDFLWRVQAKEEINEMKELREHNENMLRNILPSHVARHFLEKDRDNEELYSQSYDAVGVMFASIPGFADFYSQTEMNNQGVECLRLLNEIIADFDELLGEDRFQDIEKIKTIGSTYMAVSGLSPEKQQCEDKWGHLCALADFSLALTESIQEINKHSFNNFELRIGISHGSVVAGVIGAKKPQYDIWGKTVNLASRMDSTGVSGRIQVPEETYLILKDQGFAFDYRGEIYVKGISEQEGKIKTYFLLGRVQPNPFILPPRRLPGQYSLAAVVLGLVQSLNRQRQKQLLNENNNTGIIKGHYNRRTLLSPSGTEPGAQAEGTDKSDLP

SEQ ID NO: 10256 - protein, 634 aa, Homo sapiens
MSGAIFGPLEGPSSLDAPSIHPLVCPLCHVQYERPCLLDCFHDFCAGCLRGRATDGRLTCPLCQHQTVLKGPSGLPPVDRLLQFLVDSSGDGVEAVRCANCDLECSEQDVETTYFCNTCGQPLCARCRDETHRARMFARHDIVALGQRSRDVPQKCTLHAEPYLLFSTDKKLLLCIRCFRDMQKESRAHCVDLESAYVQGCERLEQAVLAVKALQTATREAIALLQAMVEEVRHSAAEEEDAIHALFGSMQDRLAERKALLLQAVQSQYEEKDKAFKEQLSHLATLLPTLQVHLVICSSFLSLANKAEFLDLGYELMERLQGIVTRPHHLRPIQSSKIASDHRAEFARCLEPLLLLGPRRVAAAASGANTLAGGLGPKALTGPHCPSPVGKMSGSPVQKPTLHRSISTKVLLAEGENTPFAEHCRHYEDSYRHLQAEMQSLKDQVQELHRDLTKHHSLIKAEIMGDVLHKSLQLDVQIASEHASLEGMRVVFQEIWEEAYQRVANEQEIYEAQLHDLLQLRQENAYLTTITKQITPYVRSIAKVKERLEPRFQAPVDEQSESLQNTHDDSRNNAASARNNPGSVPEKREKTSEPKGNSWAPNGLSEEPLLKNMDHHRSKQKNGGDVPTWREHPT

SEQ ID NO: 10257 - protein, 1070 aa, Homo sapiens
MSPVRRWGSPCLFPLQLFSLCWVLSVAQSKTVRYSTFEEDAPGTVIGTLAEDLHMKVSGDTSFRLMKQFNSSLLRVREGDGQLTVGDAGLDRERLCGQAPQCVLAFDVVSFSQEQFRLVHVEVEVRDVNDHAPRFPRAQIPVEVSEGAAVGTRIPLEVPVDEDVGANGLQTVRLAEPHSPFRVELQTRADGAQCADLVLLQELDRESQAAYSLELVAQDGGRPPRSATAALSVRVLDANDHSPAFPQGAVAEVELAEDAPVGSLLLDLDAADPDEGPNGDVVFAFGARTPPEARRLFRLDPRSGRLTLAGPVDYERQDTYELDVRAQDRGPGPRAATCKVIVRIRDVNDNAPDIAITPLAAPGAPATSPFAAAAAAAALGGADASSPAGAGTPEAGATSLVPEGAARESLVALVSTSDRDSGANGQVRCALYGHEHFRLQPAYAGSYLVVTAASLDRERIAEYNLTLVAEDRGAPPLRTVRPYTVRVGDENDNAPLFTRPVYEVSVRENNPPGAYLATVAARDRDLGRNGQVTYRLLEAEVGRAGGAVSTYVSVDPATGAIYALRSFDYETLRQLDVRIQASDGGSPQLSSSALVQVRVLDQNDHAPVLVHPAPANGSLEVAVPGRTAKDTVVARVQARDADEGANGELAFELQQQEPREAFAIGRRTGEILLTGDLSQEPPGRVFRALLVISDGGRPPLTTTATVSFVVTAGGGRGPAAPASAGSPERSRPPGSRLGVSGSVLQWDTPLIVIIVLAGSCTLLLAAIIAIATTCNRRKKEVRKGGALREERPGAAGGGASAPGSPEEAARGAGPRPNMFDVLTFPGTGKAPFGSPAADAPPPAVAAAEVPGSEGGSATGESACHFEGQQRLRGAHAEPYGASPGFGKEPAPPVAVWKGHSFNTISGREAEKFSGKDSGKGDSDFNDSDSDISGDALKKDLINHMQSGLWACTAECKILGHSDRCWSPSCSGPNAHPSPHPPAQMSTFCKSTSLPRDPLRRDNYYQAQLPKTVGLQSVYEKVLHRDYDRTVTLLSPPRPGRLPDLQEIGVPLYQSPPGRYLSPKKGANENV

SEQ ID NO: 10258 - protein, 422 aa, Homo sapiens
MEDIQTNAELKSTQEQSVPAESAAVLNDYSLTKSHEMENVDSGEGPANEDEDIGGERPFQCNQCGASFTQKGNLLRHIKLHTGEKPFKCHLCNYACQRRDALTGHLRTHSVEKPYKCEFCGRSYKQRSSLEEHKERCRTFLQSTDPGDTASAEARHIKAEMGSERALVLDRLASNVAKRKSSMPQKFIGEKRHCFDVNYNSSYMYEKESELIQTRMMDQAINNAISYLGAEALRPLVQTPPAPTSEMVPVISSMYPIALTRAEMSNGAPQELEKKSIHLPEKSVPSERGLSPNNSGHDSTDTDSNHEERQNHIYQQNHMVLSRARNGMPLLKEVPRSYELLKPPPICPRDSVKVINKEGEVMDVYRCDHCRVLFLDYVMFTIHMGCHGFRDPFECNMCGYRSHDRYEFSSHIARGEHRALLK

SEQ ID NO: 10259 - protein, 276 aa, Homo sapiens
MDSSREPTLGRLDAAGFWQVWQRFDADEKGYIEEKELDAFFLHMLMKLGTDDTVMKANLHKVKQQFMTTQDASKDGRIRMKELAGMFLSEDENFLLLFRRENPLDSSVEFMQIWRKYDADSSGFISAAELRNFLRDLFLHHKKAISEAKLEEYTGTMMKIFDRNKDGRLDLNDLARILALQENFLLQFKMDACSTEERKRDFEKIFAYYDVSKTGALEGPEVDGFVKDMMELVQPSISGVDLDKFREILLRHCDVNKDGKIQKSELALCLGLKINP

SEQ ID NO: 10260 - protein, 334 aa, Homo sapiens
MTENSDKVPIALVGPDDVEFCSPPAYATLTVKPSSPARLLKVGAVVLISGAVLLLFGAIGAFYFWKGSDSHIYNVHYTMSINGKLQDGSMEIDAGNNLETFKMGSGAEEAIAVNDFQNGITGIRFAGGEKCYIKAQVKARIPEVGAVTKQSISSKLEGKIMPVKYEENSLIWVAVDQPVKDNSFLSSKVLELCGDLPIFWLKPTYPKEIQRERREVVRKIVPTTTKRPHSGPRSNPGAGRLNNETRPSVQEDSQAFNPDNPYHQQEGESMTFDPRLDHEGICCIECRRSYTHCQKICEPLGGYYPWPYNYQGCRSACRVIMPCSWWVARILGMV

SEQ ID NO: 10261 - protein, 971 aa, Homo sapiens
MATVRASLRGALLLLLAVAGVAEVAGGLAPGSAGALCCNHSKDNQMCRDVCEQIFSSKSESRLKHLLQRAPDYCPETMVEIWNCMNSSLPGVFKKSDGWVGLGCCELAIALECRQACKQASSKNDISKVCRKEYENALFSCISRNEMGSVCCSYAGHHTNCREYCQAIFRTDSSPGPSQIKAVENYCASISPQLIHCVNNYTQSYPMRNPTDSLYCCDRAEDHACQNACKRILMSKKTEMEIVDGLIEGCKTQPLPQDPLWQCFLESSQSVHPGVTVHPPPSTGLDGAKLHCCSKANTSTCRELCTKLYSMSWGNTQSWQEFDRFCEYNPVEVSMLTCLADVREPCQLGCRNLTYCTNFNNRPTELFRSCNAQSDQGAMNDMKLWEKGSIKMPFINIPVLDIKKCQPEMWKAIACSLQIKPCHSKSRGSIICKSDCVEILKKCGDQNKFPEDHTAESICELLSPTDDLKNCIPLDTYLRPSTLGNIVEEVTHPCNPNPCPANELCEVNRKGCPSGDPCLPYFCVQGCKLGEASDFIVRQGTLIQVPSSAGEVGCYKICSCGQSGLLENCMEMHCIDLQKSCIVGGKRKSHGTSFSIDCNVCSCFAGNLVCSTRLCLSEHSSEDDRRTFTGLPCNCADQFVPVCGQNGRTYPSACIARCVGLQDHQFEFGSCMSKDPCNPNPCQKNQRCIPKPQVCLTTFDKFGCSQYECVPRQLACDQVQDPVCDTDHMEHNNLCTLYQRGKSLSYKGPCQPFCRATEPVCGHNGETYSSVCAAYSDRVAVDYYGDCQAVGVLSEHSSVAECASVKCPSLLAAGCKPIIPPGACCPLCAGMLRVLFDKEKLDTIAKVTNKKPITVLEILQKIRMHVSVPQCDVFGYFSIESEIVILIIPVDHYPKALQIEACNKEAEKIESLINSDSPTLASHVPLSALIISQVQVSSSVPSAGVRARPSCHSLLLPLSLGLALHLLWTYN

SEQ ID NO: 10262 - protein, 1401 aa, Homo sapiens
MKSCGVSLATAAAAAAAFGDEEKKMAAGKASGESEEASPSLTAEEREALGGLDSRLFGFVRFHEDGARTKALLGKAVRCYESLILKAEGKVESDFFCQLGHFNLLLEDYPKALSAYQRYYSLQSDYWKNAAFLYGLGLVYFHYNAFQWAIKAFQEVLYVDPSFCRAKEIHLRLGLMFKVNTDYESSLKHFQLALVDCNPCTLSNAEIQFHIAHLYETQRKYHSAKEAYEQLLQTENLSAQVKATVLQQLGWMHHTVDLLGDKATKESYAIQYLQKSLEADPNSGQSWYFLGRCYSSIGKVQDAFISYRQSIDKSEASADTWCSIGVLYQQQNQPMDALQAYICAVQLDHGHAAAWMDLGTLYESCNQPQDAIKCYLNATRSKSCSNTSALAARIKYLQAQLCNLPQGSLQNKTKLLPSIEEAWSLPIPAELTSRQGAMNTAQQNTSDNWSGGHAVSHPPVQQQAHSWCLTPQKLQHLEQLRANRNNLNPAQKLMLEQLESQFVLMQQHQMRPTGVAQVRSTGIPNGPTADSSLPTNSVSGQQPQLALTRVPSVSQPGVRPACPGQPLANGPFSAGHVPCSTSRTLGSTDTILIGNNHITGSGSNGNVPYLQRNALTLPHNRTNLTSSAEEPWKNQLSNSTQGLHKGQSSHSAGPNGERPLSSTGPSQHLQAAGSGIQNQNGHPTLPSNSVTQGAALNHLSSHTATSGGQQGITLTKESKPSGNILTVPETSRHTGETPNSTASVEGLPNHVHQMTADAVCSPSHGDSKSPGLLSSDNPQLSALLMGKANNNVGTGTCDKVNNIHPAVHTKTDNSVASSPSSAISTATPSPKSTEQTTTNSVTSLNSPHSGLHTINGEGMEESQSPMKTDLLLVNHKPSPQIIPSMSVSIYPSSAEVLKACRNLGKNGLSNSSILLDKCPPPRPPSSPYPPLPKDKLNPPTPSIYLENKRDAFFPPLHQFCTNPNNPVTVIRGLAGALKLDLGLFSTKTLVEANNEHMVEVRTQLLQPADENWDPTGTKKIWHCESNRSHTTIAKYAQYQASSFQESLREENEKRSHHKDHSDSESTSSDNSGRRRKGPFKTIKFGTNIDLSDDKKWKLQLHELTKLPAFVRVVSAGNLLSHVGHTILGMNTVQLYMKVPGSRTPGHQENNNFCSVNINIGPGDCEWFVVPEGYWGVLNDFCEKNNLNFLMGSWWPNLEDLYEANVPVYRFIQRPGDLVWINAGTVHWVQAIGWCNNIAWNVGPLTACQYKLAVERYEWNKLQSVKSIVPMVHLSWNMARNIKVSDPKLFEMIKYCLLRTLKQCQTLREALIAAGKEIIWHGRTKEEPAHYCSICEVEVFDLLFVTNESNSRKTYIVHCQDCARKTSGNLENFVVLEQYKMEDLMQVYDQFTLAPPLPSASS

SEQ ID NO: 10263 - protein, 439 aa, Homo sapiens
MPLNVSFTNRNYDLDYDSVQPYFYCDEEENFYQQQQQSELQPPAPSEDIWKKFELLPTPPLSPSRRSGLCSPSYVAVTPFSLRGDNDGGGGSFSTADQLEMVTELLGGDMVNQSFICDPDDETFIKNIIIQDCMWSGFSAAAKLVSEKLASYQAARKDSGSPNPARGHSVCSTSSLYLQDLSAAASECIDPSVVFPYPLNDSSSPKSCASQDSSAFSPSSDSLLSSTESSPQGSPEPLVLHEETPPTTSSDSEEEQEDEEEIDVVSVEKRQAPGKRSESGSPSAGGHSKPPHSPLVLKRCHVSTHQHNYAAPPSTRKDYPAAKRVKLDSVRVLRQISNNRKCTSPRSSDTEENVKRRTHNVLERQRRNELKRSFFALRDQIPELENNEKAPKVVILKKATAYILSVQAEEQKLISEEDLLRKRREQLKHKLEQLRNSCA

SEQ ID NO: 10264 - protein, 248 aa, Homo sapiens
MEDPEKKLNQKSDGKPRKVRFKISSSYSGRVLKQVFEDGQELESPKEEYPHSFLQESLETMDGVYGSGEVPRPQMCSPKLTAQRISVFREGNAYTLAGGQPRFNDYKANDHKPLPIIDFGKIIIYTNNLKIIRTPMDKRDFVRKILQKEEEAEEESLMNKEESYGGRDQHDRPLVEAESTLPQNRYTQEGDIPEDSCFHCRGSGSATCSLCHGSKFSMLANRFKESYRALRCPACNENGLQPCQICNQ

SEQ ID NO: 10265 - protein, 399 aa, Homo sapiens
MDSQGRKVVVCDNGTGFVKCGYAGSNFPEHIFPALVGRPIIRSTTKVGNIEIKNNKKMDLMVGDEASELRSMLEVNYPMENGIVRNWDDMKHLWDYTFGPEKLNIDTRNCKILLTEPPMNPTKNREKIVEVMFETYQFSGVYVAIQAVLTLYAQGLLTGVVVDSGDGVTHICPVYEGFSLPHLTRRLDIAGRDITRYLIKLLLLRGYAFNHSADFETVRMIKEKLCYVGYNIEQEQKLALETTVLVESYTLPDGRIIKVGGERFEAPEALFQPHLINVEGVGVAELLFNTIQAADIDTRSEFYKHIVLSGGSTMYPGLPSRLERELKQLYLERVLKGDVEKLSKFKIRIEDPPRRKHMVFLGGAVLADIMKDKDNFWMTRQEYQEKGVRVLEKLGVTVR

SEQ ID NO: 10266 - protein, 472 aa, Homo sapiens
MNMPQSLGNQPLPPEPPSLGTPAEGPGTTSPPEHCWPVRPTLRNELDTFSVHFYIFFGPSVALPPERPAVFAMRLLPVLDSGGVLSLELQLNASSVRQENVTVFGCLTHEVPLSLGDAAVTCSKESLAGFLLSVSATTRVARLRIPFPQTGTWFLALRSLCGVGPRFVRCRNATAEVRMRTFLSPCVDDCGPYGQCKLLRTHNYLYAACECKAGWRGWGCTDSADALTYGFQLLSTLLLCLSNLMFLPPVVLAIRSRYVLEAAVYTFTMFFSTFYHACDQPGIVVFCIMDYDVLQFCDFLGSLMSVWVTVIAMARLQPVVKQVLYLLGAMLLSMALQLDRHGLWNLLGPSLFALGILATAWTVRSVRRRHCYPPTWRRWLFYLCPGSLIAGSAVLLYAFVETRDNYFYIHSIWHMLIAGSVGFLLPPRAKTDHGVPSGARARGCGYQLCINEQEELGLVGPGGATVSSICAS

SEQ ID NO: 10267 - protein, 757 aa, Homo sapiens
MALGEEKAEAEASEDTKAQSYGRGSCRERELDIPGPMSGEQPPRLEAEGGLISPVWGAEGIPAPTCWIGTDPGGPSRAHQPQASDANREPVAERSEPALSGLPPATMGSGDLLLSGESQVEKTKLSSSEEFPQTLSLPRTTTICSGHDADTEDDPSLADLPQALDLSQQPHSSGLSCLSQWKSVLSPGSAAQPSSCSISASSTGSSLQGHQERAEPRGGSLAKVSSSLEPVVPQEPSSVVGLGPRPQWSPQPVFSGGDASGLGRRRLSFQAEYWACVLPDSLPPSPDRHSPLWNPNKEYEDLLDYTYPLRPGPQLPKHLDSRVPADPVLQDSGVDLDSFSVSPASTLKSPTNVSPNCPPAEATALPFSGPREPSLKQWPSRVPQKQGGMGLASWSQLASTPRAPGSRDARWERREPALRGAKDRLTIGKHLDMGSPQLRTRDRGWPSPRPEREKRTSQSARRPTCTESRWKSEEEVESDDEYLALPARLTQVSSLVSYLGSISTLVTLPTGDIKGQSPLEVSDSDGPASFPSSSSQSQLPPGAALQGSGDPEGQNPCFLRSFVRAHDSAGEGSLGSSQALGVSSGLLKTRPSLPARLDRWPFSDPDVEGQLPRKGGEQGKESLVQCVKTFCCQLEELICWLYNVADVTDHGTAARSNLTSLKSSLQLYRQFKKDIDEHQSLTESVLQKGEILLQCLLENTPVLEDVLGRIAKQSGELESHADRLYDSILASLDMLAGCTLIPDKKPMAAMEHPCEGV

SEQ ID NO: 10268 - protein, 349 aa, Homo sapiens
MSSLSGKVQTVLGLVEPSKLGRTLTHEHLAMTFDCCYCPPPPCQEAISKEPIVMKNLYWIQKNAYSHKENLQLNQETEAIKEELLYFKANGGGALVENTTTGISRDTQTLKRLAEETGVHIISGAGFYVDATHSSETRAMSVEQLTDVLMNEILHGADGTSIKCGIIGEIGCSWPLTESERKVLQATAHAQAQLGCPVIIHPGRSSRAPFQIIRILQEAGADISKTVMSHLDRTILDKKELLEFAQLGCYLEYDLFGTELLHYQLGPDIDMPDDNKRIRRVRLLVEEGCEDRILVAHDIHTKTRLMKYGGHGYSHILTNVVPKMLLRGITENVLDKILIENPKQWLTFK

SEQ ID NO: 10269 - protein, 269 aa, Homo sapiens
MAGLAARLVLLAGAAALASGSQGDREPVYRDCVLQCEEQNCSGGALNHFRSRQPIYMSLAGWTCRDDCKYECMWVTVGLYLQEGHKVPQFHGKVSLNAWFWSTVFHTRDTDLTEKMDYFCASTVILHSIYLCCVRTVGLQHPAVVSAFRALLLLMLTVHVSYLSLIRFDYGYNLVANVAIGLVNVVWWLAWCLWNQRRLPHVRKCVVVVLLLQGLSLLELLDFPPLFWVLDAHAIWHISTIPVHVLFFSFLEDDSLYLLKESEDKFKLD

SEQ ID NO: 10270 - protein, 591 aa, Homo sapiens
MLVGSQSFSPGGPNGIIRSQSFAGFSGLQERRSRCNSFIENSSALKKPQAKLKKMHNLGHKNNNPPKEPQPKRVEEVYRALKNGLDEYLEVHQTELDKLTAQLKDMKRNSRLGVLYDLDKQIKTIERYMRRLEFHISKVDELYEAYCIQRRLQDGASKMKQAFATSPASKAARESLTEINRSFKEYTENMCTIEVELENLLGEFSIKMKGLAGFARLCPGDQYEIFMKYGRQRWKLKGKIEVNGKQSWDGEETVFLPLIVGFISIKVTELKGLATHILVGSVTCETKELFAARPQVVAVDINDLGTIKLNLEITWYPFDVEDMTASSGAGNKAAALQRRMSMYSQGTPETPTFKDHSFFSNLPDDIFENGKAAEEKMPLSLSFSDLPNGDCALTSHSTGSPSNSTNPEITITPAEFNLSSLASQNEGMDDTSSASSRNSLGEGQEPKSHLKEEDPEEPRKPASAPSEACRRQSSGAGAEHLFLENDVAEALLQESEEASELKPVELDTSEGNITKQLVKRLTSAEVPMATDRLLSEGSVGGESEGCRSFLDGSLEDAFNGLLLALEPHKEQYKEFQDLNQEVMNLDDILKK

SEQ ID NO: 10271 - protein, 5890 aa, Homo sapiens
MEKEETTRELLLPNWQGSGSHGLTIAQRDDGVFVQEVTQNSPAARTGVVKEGDQIVGATIYFDNLQSGEVTQLLNTMGHHTVGLKLHRKGDRSPEPGQTWTREVFSSCSSEVVLSGDDEEYQRIYTTKIKPRLKSEDGVEGDLGETQSRTITVTRRVTAYTVDVTGREGAKDIDISSPEFKIKIPRHELTEISNVDVETQSGKTVIRLPSGSGAASPTGSAVDIRAGAISASGPELQGAGHSKLQVTMPGIKVGGSGVNVNAKGLDLGGRGGVQVPAVDISSSLGGRAVEVQGPSLESGDHGKIKFPTMKVPKFGVSTGREGQTPKAGLRVSAPEVSVGHKGGKPGLTIQAPQLEVSVPSANIEGLEGKLKGPQITGPSLEGDLGLKGAKPQGHIGVDASAPQIGGSITGPSVEVQAPDIDVQGPGSKLNVPKMKVPKFSVSGAKGEETGIDVTLPTGEVTVPGVSGDVSLPEIATGGLEGKMKGTKVKTPEMIIQKPKISMQDVDLSLGSPKLKGDIKVSAPGVQGDVKGPQVALKGSRVDIETPNLEGTLTGPRLGSPSGKTGTCRISMSEVDLNVAAPKVKGGVDVTLPRVEGKVKVPEVDVRGPKVDVSAPDVEAHGPEWNLKMPKMKMPTFSTPGAKGEGPDVHMTLPKGDISISGPKVNVEAPDVNLEGLGGKLKGPDVKLPDMSVKTPKISMPDVDLHVKGTKVKGEYDVTVPKLEGELKGPKVDIDAPDVDVHGPDWHLKMPKMKMPKFSVPGFKAEGPEVDVNLPKADVDISGPKIDVTAPDVSIEEPEGKLKGPKFKMPEMNIKVPKISMPDVDLHLKGPNVKGEYDVTMPKVESEIKVPDVELKSAKMDIDVPDVEVQGPDWHLKMPKMKMPKFSMPGFKAEGPEVDVNLPKADVDISGPKVGVEVPDVNIEGPEGKLKGPKFKMPEMNIKAPKISMPDVDLHMKGPKVKGEYDMTVPKLEGDLKGPKVDVSAPDVEMQGPDWNLKMPKIKMPKFSMPSLKGEGPEFDVNLSKANVDISAPKVDTNAPDLSLEGPEGKLKGPKFKMPEMHFRAPKMSLPDVDLDLKGPKMKGNVDISAPKIEGEMQVPDVDIRGPKVDIKAPDVEGQGLDWSLKIPKMKMPKFSMPSLKGEGPEVDVNLPKADVVVSGPKVDIEAPDVSLEGPEGKLKGPKFKMPEMHFKTPKISMPDVDLHLKGPKVKGDVDVSVPKVEGEMKVPDVEIKGPKMDIDAPDVEVQGPDWHLKMPKMKMPKFSMPGFKGEGREVDVNLPKADIDVSGPKVDVEVPDVSLEGPEGKLKGPKFKMPEMHFKAPKISMPDVDLNLKGPKLKGDVDVSLPEVEGEMKVPDVDIKGPKVDISAPDVDVHGPDWHLKMPKVKMPKFSMPGFKGEGPEVDVKLPKADVDVSGPKMDAEVPDVNIEGPDAKLKGPKFKMPEMSIKPQKISIPDVGLHLKGPKMKGDYDVTVPKVEGEIKAPDVDIKGPKVDINAPDVEVHGPDWHLKMPKVKMPKFSMPGFKGEGPEVDMNLPKADLGVSGPKVDIDVPDVNLEAPEGKLKGPKFKMPSMNIQTHKISMPDVGLNLKAPKLKTDVDVSLPKVEGDLKGPEIDVKAPKMDVNVGDIDIEGPEGKLKGPKFKMPEMHFKAPKISMPDVDLHLKGPKVKGDMDVSVPKVEGEMKVPDVDIKGPKVDIDAPDVEVHDPDWHLKMPKMKMPKFSMPGFKAEGPEVDVNLPKADIDVSGPSVDTDAPDLDIEGPEGKLKGSKFKMPKLNIKAPKVSMPDVDLNLKGPKLKGEIDASVPELEGDLRGPQVDVKGPFVEAEVPDVDLECPDAKLKGPKFKMPEMHFKAPKISMPDVDLHLKGPKVKGDADVSVPKLEGDLTGPSVGVEVPDVELECPDAKLKGPKFKMPDMHFKAPKISMPDVDLHLKGPKVKGDVDVSVPKLEGDLTGPSVGVEVPDVELECPDAKLKGPKFKMPEMHFKTPKISMPDVDLHLKGPKVKGDMDVSVPKVEGEMKVPDVDIKGPKMDIDAPDVDVHGPDWHLKMPKMKMPKFSMPGFKAEGPEVDVNLPKADVVVSGPKVDVEVPDVSLEGPEGKLKGPKLKMPEMHFKAPKISMPDVDLHLKGPKVKGDVDVSLPKLEGDLTGPSVDVEVPDVELECPDAKLKGPKFKMPEMHFKTPKISMPDVNLNLKGPKVKGDMDVSVPKVEGEMKVPDVDIRGPKVDIDAPDVDVHGPDWHLKMPKMKMPKFSMPGFKGEGPEVDVNLPKADVDVSGPKVDVEVPDVSLEGPEGKLKGPKFKMPEMHFKTPKISMPDVDFNLKGPKIKGDVDVSAPKLEGELKGPELDVKGPKLDADMPEVAVEGPNGKWKTPKFKMPDMHFKAPKISMPDLDLHLKSPKAKGEVDVDVPKLEGDLKGPHVDVSGPDIDIEGPEGKLKGPKFKMPDMHFKAPNISMPDVDLNLKGPKIKGDVDVSVPEVEGKLEVPDMNIRGPKVDVNAPDVQAPDWHLKMPKMKMPKFSMPGFKAEGPEVDVNLPKADVDISGPKVDIEGPDVNIEGPEGKLKGPKLKMPEMNIKAPKISMPDFDLHLKGPKVKGDVDVSLPKVEGDLKGPEVDIKGPKVDINAPDVGVQGPDWHLKMPKVKMPKFSMPGFKGEGPDGDVKLPKADIDVSGPKVDIEGPDVNIEGPEGKLKGPKFKMPEMNIKAPKISMPDIDLNLKGPKVKGDVDVSLPKVEGDLKGPEVDIKGPKVDIDAPDVDVHGPDWHLKMPKIKMPKISMPGFKGEGPDVDVNLPKADIDVSGPKVDVECPDVNIEGPEGKWKSPKFKMPEMHFKTPKISMPDIDLNLTGPKIKGDVDVTGPKVEGDLKGPEVDLKGPKVDIDVPDVNVQGPDWHLKMPKMKMPKFSMPGFKAEGPEVDVNLPKADVDVSGPKVDVEGPDVNIEGPEGKLKGPKFKMPEMNIKAPKIPMPDFDLHLKGPKVKGDVDISLPKVEGDLKGPEVDIRGPQVDIDVPDVGVQGPDWHLKMPKVKMPKFSMPGFKGEGPDVDVNLPKADLDVSGPKVDIDVPDVNIEGPEGKLKGPKFKMPEMNIKAPKISMPDIDLNLKGPKVKGDMDVSLPKVEGDMKVPDVDIKGPKVDINAPDVDVQGPDWHLKMPKIKMPKISMPGFKGEGPEVDVNLPKADLDVSGPKVDVDVPDVNIEGPDAKLKGPKFKMPEMNIKAPKISMPDLDLNLKGPKMKGEVDVSLANVEGDLKGPALDIKGPKIDVDAPDIDIHGPDAKLKGPKLKMPDMHVNMPKISMPEIDLNLKGSKLKGDVDVSGPKLEGDIKAPSLDIKGPEVDVSGPKLNIEGKSKKSRFKLPKFNFSGSKVQTPEVDVKGKKPDIDITGPKVDINAPDVEVQGKVKGSKFKMPFLSISSPKVSMPDVELNLKSPKVKGDLDIAGPNLEGDFKGPKVDIKAPEVNLNAPDVDVHGPDWNLKMPKMKMPKFSVSGLKAEGPDVAVDLPKGDINIEGPSMNIEGPDLNVEGPEGGLKGPKFKMPDMNIKAPKISMPDIDLNLKGPKVKGDVDISLPKLEGDLKGPEVDIKGPKVDINAPDVDVHGPDWHLKMPKVKMPKFSMPGFKGEGPEVDVTLPKADIDISGPNVDVDVPDVNIEGPDAKLKGPKFKMPEMNIKAPKISMPDFDLNLKGPKMKGDVVVSLPKVEGDLKGPEVDIKGPKVDIDTPDINIEGSEGKFKGPKFKIPEMHLKAPKISMPDIDLNLKGPKVKGDVDVSLPKMEGDLKGPEVDIKGPKVDINAPDVDVQGPDWHLKMPKVKMPKFSMPGFKGEGPDVDVNLPKADLDVSGPKVDIDVPDVNIEGPEGKLKGPKFKMPEMNIKAPKISMPDIDLNLKGPKVKGDMDVSLPKVEGDMQVPDLDIKGPKVDINAPDVDVRGPDWHLKMPKIKMPKISMPGFKGEGPEVDVNLPKADLDVSGPKVDVDVPDVNIEGPDAKLKGPKFKMPEMNIKAPKISMPDFDLHLKGPKVKGDVDVSLPKMEGDLKAPEVDIKGPKVDIDAPDVDVHGPDWHLKMPKVKMPKFSMPGFKGEGPEVDVNLPKADIDVSGPKVDIDTPDIDIHGPEGKLKGPKFKMPDLHLKAPKISMPEVDLNLKGPKMKGDVDVSLPKVEGDLKGPEVDIKGPKVDIDVPDVDVQGPDWHLKMPKVKMPKFSMPGFKGEGPDVDVNLPKADLDVSGPKVDIDVPDVNIEGPDAKLKGPKFKMPEMNIKAPKISMPDFDLHLKGPKVKGDVDVSLPKVEGDLKGPEVDIKGPKVDIDAPDVDVHGPDWHLKMPKVKMPKFSMPGFKGEGPDVDVTLPKADIEISGPKVDIDAPDVSIEGPDAKLKGPKFKMPEMNIKAPKISMPDIDFNLKGPKVKGDVDVSLPKVEGDLKGPEIDIKGPSLDIDTPDVNIEGPEGKLKGPKFKMPEMNIKAPKISMPDFDLHLKGPKVKGDVDVSLPKVESDLKGPEVDIEGPEGKLKGPKFKMPDVHFKSPQISMSDIDLNLKGPKIKGDMDISVPKLEGDLKGPKVDVKGPKVGIDTPDIDIHGPEGKLKGPKFKMPDLHLKAPKISMPEVDLNLKGPKVKGDMDISLPKVEGDLKGPEVDIRDPKVDIDVPDVDVQGPDWHLKMPKVKMPKFSMPGFKGEGPDVDVNLPKADIDVSGPKVDVDVPDVNIEGPDAKLKGPKFKMPEMSIKAPKISMPDIDLNLKGPKVKGDVDVTLPKVEGDLKGPEADIKGPKVDINTPDVDVHGPDWHLKMPKVKMPKFSMPGFKGEGPDVDVSLPKADIDVSGPKVDVDIPDVNIEGPDAKLKGPKFKMPEINIKAPKISIPDVDLDLKGPKVKGDFDVSVPKVEGTLKGPEVDLKGPRLDFEGPDAKLSGPSLKMPSLEISAPKVTAPDVDLHLKAPKIGFSGPKLEGGEVDLKGPKVEAPSLDVHMDSPDINIEGPDVKIPKFKKPKFGFGAKSPKADIKSPSLDVTVPEAELNLETPEISVGGKGKKSKFKMPKIHMSGPKIKAKKQGFDLNVPGGEIDASLKAPDVDVNIAGPDAALKVDVKSPKTKKTMFGKMYFPDVEFDIKSPKFKAEAPLPSPKLEGELQAPDLELSLPAIHVEGLDIKAKAPKVKMPDVDISVPKIEGDLKGPKVQANLGAPDINIEGLDAKVKTPSFGISAPQVSIPDVNVNLKGPKIKGDVPSVGLEGPDVDLQGPEAKIKFPKFSMPKIGIPGVKMEGGGAEVHAQLPSLEGDLRGPDVKLEGPDVSLKGPGVDLPSVNLSMPKVSGPDLDLNLKGPSLKGDLDASVPSMKVHAPGLNLSGVGGKMQVGGDGVKVPGIDATTKLNVGAPDVTLRGPSLQGDLAVSGDIKCPKVSVGAPDLSLEASEGSIKLPKMKLPQFGISTPGSDLHVNAKGPQVSGELKGPGVDVNLKGPRISAPNVDFNLEGPKVKGSLGATGEIKGPTVGGGLPGIGVQGLEGNLQMPGIKSSGCDVNLPGVNVKLPTGQISGPEIKGGLKGSEVGFHGAAPDISVKGPAFNMASPESDFGINLKGPKIKGGADVSGGVSAPDISLGEGHLSVKGSGGEWKGPQVSSALNLDTSKFAGGLHFSGPKVEGGVKGGQIGLQAPGLSVSGPQGHLESGSGKVTFPKMKIPKFTFSGRELVGREMGVDVHFPKAEASIQAGAGDGEWEESEVKLKKSKIKMPKFNFSKPKGKGGVTGSPEASISGSKGDLKSSKASLGSLEGEAEAEASSPKGKFSLFKSKKPRHRSNSFSDEREFSGPSTPTGTLEFEGGEVSLEGGKVKGKHGKLKFGTFGGLGSKSKGHYEVTGSDDETGKLQGSGVSLASKKSRLSSSSSNDSGNKVGIQLPEVELSVSTKKE

SEQ ID NO: 10272 - protein, 683 aa, Homo sapiens
MSTPAVPQDLQLPPSQRAQSAFKEQRRQKLKEHLLRRKTLFAYKQENEMLSSSRDQRVVTSEDQVQEGTKVLKLKTKMADKENMKRPAESKNNTVVGKHCIPLKPSNELTNSTVVIDTHKPKDSNQTPHLLLTEDDPQSQHMTLSQAFHLKNNSKKKQMTTEKQKQDANMPKKPVLGSYRGQIVQSKINSFRKPLQVKDESSAATKKLSATIPKATKPQPVNTSSVTVKSNRSSNMTATTKFVSTTSQNTQLVRPPIRSHHSNTRDTVKQGISRTSANVTIRKGPHEKELLQSKTALSSVKTSSSQGIIRNKTLSRSIASEVIARPASLSNDKLMEKSEPVDQRRHTAGKAIVDSRSAQPKETSEERKARLSEWKAGKGRVLKRPPNSVVTQHEPAGQNEKPVGSFWTTMAEEDEQRLFTEKVNNTFSECLNLINEGCPKEDILVTLNDLIKNIPDAKKLVKYWICLALIEPITSPIENIIAIYEKAILAGAQPIEEMRHTIVDILTMKSQEKANLGENMEKSCASKEEVKEVSIEDTGVDVDPEKLEMESKLHRNLLFQDCEKEQDNKTKDPTHDVKTPNTETRTSCLIKYNVSTTPYLQSVKKKVQFDGTNSAFKELKFLTPVRRSRRLQEKTSKLPDMLKDHYPCVSSLEQLTELGRETDAFVCRPNAALCRVYYEADTT

SEQ ID NO: 10273 - protein, 520 aa, Homo sapiens
MSNKCDVVVVGGGISGMAAAKLLHDSGLNVVVLEARDRVGGRTYTLRNQKVKYVDLGGSYVGPTQNRILRLAKELGLETYKVNEVERLIHHVKGKSYPFRGPFPPVWNPITYLDHNNFWRTMDDMGREIPSDAPWKAPLAEEWDNMTMKELLDKLCWTESAKQLATLFVNLCVTAETHEVSALWFLWYVKQCGGTTRIISTTNGGQERKFVGGSGQVSERIMDLLGDRVKLERPVIYIDQTRENVLVETLNHEMYEAKYVISAIPPTLGMKIHFNPPLPMMRNQMITRVPLGSVIKCIVYYKEPFWRKKDYCGTMIIDGEEAPVAYTLDDTKPEGNYAAIMGFILAHKARKLARLTKEERLKKLCELYAKVLGSLEALEPVHYEEKNWCEEQYSGGCYTTYFPPGILTQYGRVLRQPVDRIYFAGTETATHWSGYMEGAVEAGERAAREILHAMGKIPEDEIWQSEPESVDVPAQPITTTFLERHLPSVPGLLRLIGLTTIFSATALGFLAHKRGLLVRV

SEQ ID NO: 10274 - protein, 575 aa, Homo sapiens
MKPLSLLIEILIILGVTIKTIKAEEHNKRQKERNVTTQVSVNEIKQYLSHILEQRTSSNVINKRENLLEKKKNQRKIRIKGIQNKDILKRNKNHLQKQAEKNFTDEGDQLFKMGIKVLQQSKSQKQKEEAYLLFAKAADMGNLKAMEKMADALLFGNFGVQNITAAIQLYESLAKEGSCKAQNALGFLSSYGIGMEYDQAKALIYYTFGSAGGNMMSQMILGYRYLSGINVLQNCEVALSYYKKVADYIADTFEKSEGVPVEKVRLTERPENLSSNSEILDWDIYQYYKFLAERGDVQIQVSLGQLHLIGRKGLDQDYYKALHYFLKAAKAGSANAMAFIGKMYLEGNAAVPQNNATAFKYFSMAASKGNAIGLHGLGLLYFHGKGVPLNYAEALKYFQKAAEKGWPDAQFQLGFMYYSGSGIWKDYKLAFKYFYLASQSGQPLAIYYLAKMYATGTGVVRSCRTAVEKRLTFLKKRRCIQWRFSYGIELPFKDIHLARRLYDMAAQTSPDAHIPVLFAVMKLETTHLLRDILFFNFTTRWNWLKLDNTIGPHWDLFVIGLIVPGLILLLRNHHG

SEQ ID NO: 10275 - protein, 1063 aa, Homo sapiens
MSPGASRGPRGSQAPLIAPLCCAAAALGMLLWSPACQAFNLDVEKLTVYSGPKGSYFGYAVDFHIPDARTASVLVGAPKANTSQPDIVEGGAVYYCPWPAEGSAQCRQIPFDTTNNRKIRVNGTKEPIEFKSNQWFGATVKAHKGKVVACAPLYHWRTLKPTPEKDPVGTCYVAIQNFSAYAEFSPCRNSNADPEGQGYCQAGFSLDFYKNGDLIVGGPGSFYWQGQVITASVADIIANYSFKDILRKLAGEKQTEVAPASYDDSYLGYSVAAGEFTGDSQQELVAGIPRGAQNFGYVSIINSTDMTFIQNFTGEQMASYFGYTVVVSDVNSDGLDDVLVGAPLFMEREFESNPREVGQIYLYLQVSSLLFRDPQILTGTETFGRFGSAMAHLGDLNQDGYNDIAIGVPFAGKDQRGKVLIYNGNKDGLNTKPSQVLQGVWASHAVPSGFGFTLRGDSDIDKNDYPDLIVGAFGTGKVAVYRARPVVTVDAQLLLHPMIINLENKTCQVPDSMTSAACFSLRVCASVTGQSIANTIVLMAEVQLDSLKQKGAIKRTLFLDNHQAHRVFPLVIKRQKSHQCQDFIVYLRDETEFRDKLSPINISLNYSLDESTFKEGLEVKPILNYYRENIVSEQAHILVDCGEDNLCVPDLKLSARPDKHQVIIGDENHLMLIINARNEGEGAYEAELFVMIPEEADYVGIERNNKGFRPLSCEYKMENVTRMVVCDLGNPMVSGTNYSLGLRFAVPRLEKTNMSINFDLQIRSSNKDNPDSNFVSLQINITAVAQVEIRGVSHPPQIVLPIHNWEPEEEPHKEEEVGPLVEHIYELHNIGPSTISDTILEVGWPFSARDEFLLYIFHIQTLGPLQCQPNPNINPQDIKPAASPEDTPELSAFLRNSTIPHLVRKRDVHVVEFHRQSPAKILNCTNIECLQISCAVGRLEGGESAVLKVRSRLWAHTFLQRKNDPYALASLVSFEVKKMPYTDQPAKLPEGSIVIKTSVIWATPNVSFSIPLWVIILAILLGLLVLAILTLALWKCGFFDRARPPQEDMTDREQLTNDKTPEA

SEQ ID NO: 10276 - protein, 391 aa, Homo sapiens
MIEVVAELSRGPVFLAGEALECVVTVTNPLPPTATSASSEALAWASAQIHCQFHASESRVALPPPDSSQPDVQPDSQTVFLPHRGERGQCILSTPPKILFCDLRLDPGESKSYSYSEVLPIEGPPSFRGQSVKYVYKLTIGCQRVNSPITLLRVPLRVLVLTGLQDVRFPQDEAVAPSSPFLEEDEGGKKDSWLAELAGERLMAATSCRSLHLYNISDGRGKVGTFGIFKSVYRLGEDVVGTLNLGEGTVACLQFSVSLQTEERVQPEYQRRRGAGGVPSVSHVTHARHQESCLHTTRTSFSLPIPLSSTPGFCTAIVSLKWRLHFEFVTSREPGLVLLPPVEQPEPTTWTGPEQVPVDTFSWDLPIKVLPTSPTLASYAAPGPSTSTITI

SEQ ID NO: 10277 - protein, 452 aa, Homo sapiens
MASRINTNFTLIPNQKLRRSNRQTSCYSKTLGSGFQPISTFGNFKALPLEIFQIILKYLSVKDISMLSMVSKTVSQHIINYISTSSGSKRLLLQDFHNLELPDRRQDSAILEHYRSLGLLFKRCTLLLPTKERLKYIHKILTEVSCFKFNGCAAPMQCLGLTCYGMFLQTLTAGWDELECHRVYNFLCELTNLCRKIQMAVCSKPGSAQKLELRIRLFCRNVLLDHWTHRSDSAFWLTRILKPWPMVNQARLLYIIFGPISPQDGQVVWQEMIEEPTDEFSLKGLADAIKLLYDASTKEWTADDVISLVDELSVVPREWLLENNARLLMLSGNNICFSFMASKAVNGRTIELARLVVFLALVCEKELYCMDWTVKMMQKVCKVFSTPVERKNFLQNVANAFACVIMEMLQSIMSGDRDEDDRSFLNLFHLVHAQANFHKEVLYLTMNTPLST

SEQ ID NO: 10278 - protein, 200 aa, Homo sapiens
MSENLSDPVSPVVRKKKSALFEVSEVIPVMTNNYEENILKGVRDSSYSLESSLELLQKDVVQLHAPRYQSMRRDVIGCTQEMDFILWPRNDIEKIVCLLFSRWKESDEPFRPVQAKFEFHHGDYEKQFLHVLSRKDKTGIVVNNPNQSVFLFIDRQHLQTPKNKATIFKLCSICLYLPQEQLTHWAVGTIEDHLRPYMPE

SEQ ID NO: 10279 - protein, 823 aa, Homo sapiens
MKIQKKLTGCSRLMLLCLSLELLLEAGAGNIHYSVPEETDKGSFVGNIAKDLGLQPQELADGGVRIVSRGRMPLFALNPRSGSLITARRIDREELCAQSMPCLVSFNILVEDKMKLFPVEVEIIDINDNTPQFQLEELEFKMNEITTPGTRVSLPFGQDLDVGMNSLQSYQLSSNPHFSLDVQQGADGPQHPEMVLQSPLDREEEAVHHLILTASDGGEPVRSGTLRIYIQVVDANDNPPAFTQAQYHINVPENVPLGTQLLMVNATDPDEGANGEVTYSFHNVDHRVAQIFRLDSYTGEISNKEPLDFEEYKMYSMEVQAQDGAGLMAKVKVLIKVLDVNDNAPEVTITSVTTAVPENFPPGTIIALISVHDQDSGDNGYTTCFIPGNLPFKLEKLVDNYYRLVTERTLDRELISGYNITITAIDQGTPALSTETHISLLVTDINDNSPVFHQDSYSAYIPENNPRGASIFSVRAHDLDSNENAQITYSLIEDTIQGAPLSAYLSINSDTGVLYALRSFDYEQFRDMQLKVMARDSGDPPLSSNVSLSLFLLDQNDNAPEILYPALPTDGSTGVELAPLSAEPGYLVTKVVAVDRDSGQNAWLSYRLLKASEPGLFSVGLHTGEVRTARALLDRDALKQSLVVAVQDHGQPPLSATVTLTVAVADRISDILADLGSLEPSAKPNDSDLTLYLVVAAAAVSCVFLAFVIVLLAHRLRRWHKSRLLQASGGGLASMPGSHFVGVDGVRAFLQTYSHEVSLTADSRKSHLIFPQPNYADTLISQESCEKKGFLSAPQSLLEDKKEPFSQVNFCDECISYLEKNNS

SEQ ID NO: 10280 - protein, 360 aa, Homo sapiens
MSTVICMKQREEEFLLTIRPFANRMQKSPCYIPIVSSATLWDRSTPSAKHIPCYERTSVPCSRFINHMKNFSESPKFRSLHFLNFPVFPERTQNSMACKRLLHTCQYIVPRCSVSTVSFDEESYEEFRSSPAPSSETDEAPLIFTARGETEERARGAPKQAWNSSFLEQLVKKPNWAHSVNPVHLEAQGIHISRHTRPKGQPLSSPKKNSGSAARPSTAIGLCRRSQTPGALQSTGPSNTELEPEERMAVPAGAQAHPDDIQSRLLGASGNPVGKGAVAMAPEMLPKHPHTPRDRRPQADTSLHGNLAGAPLPLLAGASTHFPSKRLIKVCSSAPPRPTRRFHTVCSQALSRPVVNAHLH

SEQ ID NO: 10281 - protein, 890 aa, Homo sapiens
MSRSATLLLCLLGCHVWKAVTKTLREPGAGAQEVTLKVHISDASTHQPVADALIEIFTNQASIASGTSGTDGVAFIKFQYKLGSQLIVTASKHAYVPNSAPWKPIRLPVFSSLSLGLLPERSATLMVYEDVVQIVSGFQGARPQPRVHFQRRALRLPENTSYSDLTAFLTAASSPSEVDSFPYLRGLDGNGTGNSTRHDLTPVTAVSVHLLSSNGTPVLVDGPIYVTVPLATQSSLRHNAYVAAWRFDQKLGTWLKSGLGLVHQEGSQLTWTYIAPQLGYWVAAMSPPIPGPVVTQDITTYHTVFLLAILGGMAFILLVLLCLLLYYCRRKCLKPRQHHRKLQLPAGLESSKRDQSTSMSHINLLFSRRASEFPGPLSVTSHGRPEAPGTKELMSGVHLEMMSPGGEGDLHTPMLKLSYSTSQEFSSREELLSCKEEDKSQISFDNLTPSGTLGKDYHKSVEVFPLKARKSMEREGYESSGNDDYRGSYNTVLSQPLFEKQDREGPASTGSKLTIQEHLYPAPSSPEKEQLLDRRPTECMMSRSVDHLERPTSFPRPGQLICCSSVDQVNDSVYRKVLPALVIPAHYMKLPGDHSYVSQPLVVPADQQLEIERLQAELSNPHAGIFPHPSSQIQPQPLSSQAISQQHLQDAGTREWSPQNASMSESLSIPASLNDAALAQMNSEVQLLTEKALMELGGGKPLPHPRAWFVSLDGRSNAHVRHSYIDLQRAGRNGSNDASLDSGVDMNEPKSARKGRGDALSLQQNYPPVQEHQQKEPRAPDSTAYTQLVYLDDVEQSGSECGTTVCTPEDSALRCLLEGSSRRSGGQLPSLQEETTRRTADAPSEPAASPHQRRSAHEEEEDDDDDDQGEDKKSPWQKREERPLMAFNIK

SEQ ID NO: 10282 - protein, 229 aa, Homo sapiens
MGDPNSRKKQALNRLRAQLRKKKESLADQFDFKMYIAFVFKEKKKKSALFEVSEVIPVMTNNYEENILKGVRDSSYSLESSLELLQKDVVQLHAPRYQSMRRDVIGCTQEMDFILWPRNDIEKIVCLLFSRWKESDEPFRPVQAKFEFHHGDYEKQFLHVLSRKDKTGIVVNNPNQSVFLFIDRQHLQTPKNKATIFKLCSICLYLPQEQLTHWAVGTIEDHLRPYMPE

SEQ ID NO: 10283 - protein, 842 aa, Homo sapiens
MLYSSRGDPEGQPLLLSLLILAMWVVGSGQLHYSVPEEAEHGTFVGRIAQDLGLELAELVPRLFQLDSKGRGDLLEVNLQNGILFVNSRIDREELCGRSAECSIHLEVIVDRPLQVFHVDVEVKDINDNPPVFPATQKNLFIAESRPLDSRFPLEGASDADIGENALLTYRLSPNEYFFLDVPTSNQQVKPLGLVLRKLLDREETPELHLLLTATDGGKPELTGTVQLLITVLDNNDNAPVFDRTLYTVKLPENVSIGTLVIHPNASDLDEGLNGDIIYSFSSDVSPDIKSKFHMDPLSGAITVIGHMDFEESRAHKIPVEAVDKGFPPLAGHCTLLVEVVDVNDNAPQLTIKTLSVPVKEDAQLGTVIALISVIDLDADANGQVTCSLTPHVPFKLVSTYKNYYSLVLDRALDRESVSAYELVVTARDGGSPSLWATARVSVEVADVNDNAPAFAQSEYTVFVKENNPPGCHIFTVSARDADAQENALVSYSLVERRLGERSLSSYVSVHAESGKVYALQPLDHEELELLQFQVSARDAGVPPLGSNVTLQVFVLDENDNAPALLTPRMRGTDGAVSEMVLRSVGAGVVVGKVRAVDADSGYNAWLSYELQPETASASIPFRVGLYTGEISTTRALDETDAPRQRLLVLVKDHGEPALTATATVLVSLVESGQAPKSSSRASVGATGPEVTLVDVNVYLIIAICAVSSLLVLTLLLYTVLRCSAMPTEGECAPGKPTLVCSSAVGSWSYSQQRRQRVCSGEGKQKTDLMAFSPGLSPCAGSTERTGEPSASSDSTGKVGFSSILFIYIIFFLERYYRLLPGAVQIVLFIFLEIQQIFFLIK

SEQ ID NO: 10284 - protein, 814 aa, Homo sapiens
MDYHWRGELGSWRLLLLLLLLAAWKVGSGQLHYSVPEEAKHGTFVGRIAQDLGLELAELVPRLFRVASKRHRDLLEVSLQNGILFVNSRIDREELCGRSAECSIHLEVIVDRPLQVFHVDVEVKDVNDNPPVFRVKDQKLFVSESRMPDSRFPLEGASDADVGANSVLTYRLSSHDYFMLDVNSKNDENKLVELVLRKSLDREDAPAHHLFLTATDGGKPELTGTVQLLVTVLDVNDNAPTFEQSEYEVRIFENADNGTTVIKLNASDPDEGANGAISYSFNSLVETMVIDHFSIDRNTGEIVIRGNLDFEQENLYKILIDATDKGHPPMAGHCTVLVRILDKNDNVPEIALTSLSLPVREDAQFGTVIALISVNDLDSGANGQVTCSLMPHVPFKLVSTFKNYYSLVLDSALDRERVSAYELVVTARDGGSPSLWATASLSVEVADVNDNAPAFAQPEYTVFVKENNPPGCHIFTVSARDADAQENALVSYSLVERRVGERSLSSYISVHTESGKVYALQPLDHEELELLQFQVSARDAGVPPLGSNVTLQVFVLDENDNAPALLEPRVGGTGGAASKLVPRSVGAGHVVAKVRAVDADSGYNAWLSYELQPAASSPRIPFRVGLYTGEISTTRVLDEADSPRHRLLVLVKDHGEPALTATATVLVSLVESGQAPKASSRQSAGVLGPEAALVDVNVYLIIAICAVSSLLVLTLLLYTALRCSALPTEGGCRAGKPTLVCSSAVGSWSYSQQQPQRVCSGEGPPKTDLMAFSPCLPPDLGSVDVGEEQDLNVDHGLKVSPFKFRTHKFYLWKL

SEQ ID NO: 10285 - protein, 776 aa, Homo sapiens
VVYSRVGQESRRLLLLLLLLAAWEAGNGQLHYSVSEEAKHGTFVGRIAQDLGLELAELVPRLFRVASKGRGGLLEVNLQNGILFVNSRIDREELCRRSAECSIHLEVIVDRPLQVFHVDVEVRDINDNPPVFPATQKNLSIAESRPLDSRFPLEGASDADIGENALLTYRLSPNEYFSLEKPPDDELVKGLGLILRKSLDREEAPEIFLVLTATDGGKPELTGTVQLLITVLDANDNAPAFDRTIYKVRLLENVPNGTLVIKLNASDLDEGLNGDIVYSFSNDISPNVKSKFHIDPITGQIIVKGYIDFEESKSYEIIVEGIDKGQLPLSGHCRVIVEVEDNNDNVPDLEFKSLSLPIREDAPLGTVIALISVSDKDMGVNGLVTCSLTSHVPFKLVSTFKNYYSLVLDSALDRESVSAYELVVTARDGGSPSLWATASVSVEVADVNDNAPAFAQPEYTVFVKENNPPGCHIFTVSAWDADAQENALVSYSLVERRVGERALSSYVSVHAESGKVYALQPLDHEELELLQFQVTARDAGVPPLGSNVTLQVFVLDENDNAPALLAPRAGGTGGAVSELVPWSVGVGHVVAKVRAVDADSGYNAWLSYELQPGTGGARIPFRVGLYTGEISTTRALDETDAPRHRLLVLVKDHGEPALTATATVLVSLVESGQAPKASSRALVGAVGPDAALVDVNVYLIIAICAVSSLLVLTLLLYTALRCSALPTEGACAPGKPTLVCSSAVGSWSYSQQRRPRVCSGEGPPKTDLMAFSPSLP

SEQ ID NO: 10286 - protein, 803 aa, Homo sapiens
MVFTPEDRLGKQCLLLPLLLLAAWKVGSGQLHYSVPEEAKHGTFVGRIAQDLGLELAELVPRLFRMASKDREDLLEVNLQNGILFVNSRIDREELCGRSAECSIHLEVIVDRPLQVFHVDVEVRDINDNPPLFPVEEQRVLIYESRLPDSVFPLEGASDADVGSNSILTYKLSSSEYFGLDVKINSDDNKQIGLLLKKSLDREEAPAHNLFLTATDGGKPELTGTVQLLVTVLDVNDNAPTFEQSEYEVRIFENADNGTTVIRLNASDRDEGANGAISYSFNSLVAAMVIDHFSIDRNTGEIVIRGNLDFEQENLYKILIDATDKGHPPMAGHCTVLVRILDKNDNVPEIALTSLSLPVREDAQFGTVIALISVNDLDSGANGQVNCSLTPHVPFKLVSTFKNYYSLVLDSALDRESVSAYELVVTARDGGSPSLWATASLSVEVADMNDNAPAFAQPEYTVFVKENNPPGCHIFTVSARDADAQENALVSYSLVERRVGERALSSYISVHAESGKVYALQPLDHEELELLQFQVSARDAGVPPLGSNVTLQVFVLDENDNAPALLAPRVGGTGGAVSELVPRSLGAGQVVAKVRAVDADSGYNAWLSYELQPPASSARFPFRVGLYTGEISTTRVLDEADSPRHRLLVLVKDHGEPALTATATVLVSLVESGQAPKASSRASVGAAGPEAALVDVNVYLIIAICAVSSLLVLTLLLYTALRCSAPPTEGACTADKPTLVCSSAVGSWSYSQQRRQRVCSGEGPPKMDLMAFSPSLSPCPIMMGKAENQDLNEDHDAKVSEFS

SEQ ID NO: 10287 - protein, 824 aa, Homo sapiens
MASSIRRGRGAWTRLLSLLLLAAWEVGSGQLRYSVPEEAKHGTFVGRIAQDLGLELEELVPRLFRVASKRHGDLLEVNLQNGILFVNSRIDREELCGRSAECSIHVEVIVDRPLQVFHVEVEVKDINDNPPIFPMTVKTIRFPESRLLDSRFPLEGASDADIGVNALLSYKLSSSEFFFLDIQANDELSESLSLVLGKSLDREETAEVNLLLVATDGGKPELTGTVQILIKVLDVNDNEPTFAQSVYKVKLLENTANGTLVVKLNASDADEGPNSEIVYSLGSDVSSTIQTKFTIDPISGEIRTKGKLDYEEAKSYEIQVTATDKGTPSMSGHCKISLKLVDINDNTPEVSITSLSLPISENASLGTVIALITVSDRDSGTNGHVTCSLTPHVPFKLVSTFKNYYSLVLDSALDRESVSAYELVVTARDGGSPSLWATTSVSIEVADVNDNAPAFAQPEYTVFVKENNPPGCHIFTVSAWDADAQENALVSYSLVERRVGERALSSYVSVHAESGKVYALQPLDHEEVELLQFQVSARDAGVPPLGSNVTLQVFVLDENDNAPALLAPRAGTAAGAVSELVPWSVGAGHVVAKVRAVDADSGYNAWLSYELQLGTGSARIPFRVGLYTGEISTTRALDEADSPRHRLLVLVKDHGEPALTATATVLVSLVESGQAPKASSRAWVGAAGSEATLVDVNVYLIIAICAVSSLLVLTVLLYTALRCSVPPTEGARAPGKPTLVCSSAVGSWSYSQQRRQRVCSGEDPPKTDLMAFSPSLSQGPDSAEEKQLSESEYVGKVSLLLFLANSKIVLFKKFYMISTSYLDS

SEQ ID NO: 10288 - protein, 807 aa, Homo sapiens
MVFSRRGGLGARDLLLWLLLLAAWEVGSGQLHYSIPEEAKHGTFVGRVAQDLGLELAELVPRLFRVASKTHRDLLEVNLQNGILFVNSRIDREELCQWSAECSIHLELIADRPLQVFHVEVKVKDINDNPPVFRGREQIIFIPESRLLNSRFPIEGAADADIGANALLTYTLSPSDYFSLDVEASDELSKSLWLELRKYLDREETPELHLLLTATDGGKPELQGTVELLITVLDVNDNAPLFDQAVYRVHLLETTANGTLVTTLNASDADEGVNGEVVFSFDSGISRDIQEKFKVDSSSGEIRLIDKLDYEETKSYEIQVKAVDKGSPPMSNHCKVLVKVLDVNDNAPELAVTSLYLPIREDAPLSTVIALITVSDRDSGANGQVTCSLMPHVPFKLVSTFKNYYSLVLDSALDRESLSVYELVVTARDGGSPSLWATARVSVEVADVNDNAPAFAQPEYTVFVKENNPPGCHIFTVSARDADAQENALVSYSLVERRVGERALSNYVSVHAESGKVYALQPLDHEELELLQFQVSARDAGVPPLGSNVTLQVFVLDENDNAPALLAPRVGGTIGAVSELVPRLVGAGHVVAKVRAVDADSGYNAWLSYELQPAAGGARIPFRVGLYTGEISTTRVLDEADLSRYRLLVLVKDHGEPALTATATVLVSLVESGQAPKASSRASVGVAGPEAALVDVNVYLIIAICAVSSLLVLTLLLYTALRCSVPPTEGAYVPGKPTLVCSSALGSWSNSQQRRQRVCSSEGPPKTDLMAFSPGLSPSLNTSERNEQPEANLDLSGNVSPTFEFWL

SEQ ID NO: 10289 - protein, 381 aa, Homo sapiens
MRSHTITMTTTSVSSWPYSSHRMRFITNHSDQPPQNFSATPNVTTCPMDEKLLSTVLTTSYSVIFIVGLVGNIIALYVFLGIHRKRNSIQIYLLNVAIADLLLIFCLPFRIMYHINQNKWTLGVILCKVVGTLFYMNMYISIILLGFISLDRYIKINRSIQQRKAITTKQSIYVCCIVWMLALGGFLTMIILTLKKGGHNSTMCFHYRDKHNAKGEAIFNFILVVMFWLIFLLIILSYIKIGKNLLRISKRRSKFPNSGKYATTARNSFIVLIIFTICFVPYHAFRFIYISSQLNVSSCYWKEIVHKTNEIMLVLSSFNSCLDPVMYFLMSSNIRKIMCQLLFRRFQGEPSRSESTSEFKPGYSLHDTSVAVKIQSSSKST

SEQ ID NO: 10290 - protein, 485 aa, Homo sapiens
MRRRRSTPKEVLEGIWEPKRKRRNRREKRRNQIPEAPSQTRHLIPRRLKFSSLRNTTPSGSRFQREQPWNPSVPMQKLQDIQRAMELLSACQGPARNIDEAAKHRYQFWDTQPVPKLDEVITSHGAIEPDKDNVRQEPYSLPQGFMWDTLDLSDAEVLKELYTLLNENYVEDDDNMFRFDYSPEFLLWALRPPGWLLQWHCGVRVSSNKKLVGFISAIPANIRIYDSVKKMVEINFLCVHKKLRSKRVAPVLIREITRRVNLEGIFQAVYTAGVVLPKPIATCRYWHRSLNPRKLVEVKFSHLSRNMTLQRTMKLYRLPDVTKTSGLRPMEPKDIKSVRELINTYLKQFHLAPVMDEEEVAHWFLPREHIIDTFVVESPNGKLTDFLSFYTLPSTVMHHPAHKSLKAAYSFYNIHTETPLLDLMSDALILAKSKGFDVFNALDLMENKTFLEKLKFGIGDGNLQYYLYNWRCPGTDSEKVGLVLQ

SEQ ID NO: 10291 - protein, 948 aa, Homo sapiens
MASLSTWSSPAEPREMEDFARGAASPGPSRPGLVPVSIIGAEDEDFENELETNSEEQNSQFQSLEQVKRRPAHLMALLQHVALQFEPGPLVLRVPVPPNVAFELDRTRADLISEDVQRRFVQEVVQSQQVAVGRQLEDFRSKRLMGMTPWEQELAQLEAWVGRDRASYEARERHVAERLLMHLEEMQHTISTDEEKSAAVVNAIGLYMRHLGVRTKSGDKKSGRNFFRKKVMGNRRSDEPAKTKKGLSSILDAARWNRGEPQVPDFRHLKAEVDAEKPGATDRKGGVGMPSRDRNIGAPGQDTPGVSLHPLSLDSPDREPGADAPLELGDSSPQGPMSLESLAPPESTDEGAETESPEPGDEGEPGRSGLELEPEEPPGWRELVPPDTLHSLPKSQVKRQEVISELLVTEAAHVRMLRVLHDLFFQPMAECLFFPLEELQNIFPSLDELIEVHSLFLDRLMKRRQESGYLIEEIGDVLLARFDGAEGSWFQKISSRFCSRQSFALEQLKAKQRKDPRFCAFVQEAESRPRCRRLQLKDMIPTEMQRLTKYPLLLQSIGQNTEEPTEREKVELAAECCREILHHVNQAVRDMEDLLRLKDYQRRLDLSHLRQSSDPMLSEFKNLDITKKKLVHEGPLTWRVTKDKAVEVHVLLLDDLLLLLQRQDERLLLKSHSRTLTPTPDGKTMLRPVLRLTSAMTREVATDHKAFYVLFTWDQEAQIYELVAQTVSERKNWCALITETAGSLKVPAPASRPKPRPSPSSTREPLLSSSENGNGGRETSPADARTERILSDLLPFCRPGPEGQLAATALRKGVGGGILPPETPPVSAWGELCPPAWLHLRFPPRKAFCKKERNGGEDVRDHPHPHSCRSISHPEGLRRGSCGPRLGGAQLGLLAPHEPRPSLPPALCLGDSGLHSGGHHGDPGHLSIACGGHPSTPTPKCLRSVFIP

SEQ ID NO: 10292 - protein, 1426 aa, Homo sapiens
MNDWHRIFTQNVLVPPHPQRARQPWKESTAFQCVLKWLDGPVIRQGVLEVLSEVECHLRVSFFDVTYRHFFGRTWKTTVKPTKRPPSRIVFNEPLYFHTSLNHPHIVAVVEVVAEGKKRDGSLQTLSCGFGILRIFSNQPDSPISASQDKRLRLYHGTPRALLHPLLQDPAEQNRHMTLIENCSLQYTLKPHPALEPAFHLLPENLLVSGLQQIPGLLPAHGESGDALRKPRLQKPITGHLDDLFFTLYPSLEKFEEELLELHVQDHFQEGCGPLDGGALEILERRLRVGVHNGLGFVQRPQVVVLVPEMDVALTRSASFSRKVVSSSKTSSGSQALVLRSRLRLPEMVGHPAFAVIFQLEYVFSSPAGVDGNAASVTSLSNLACMHMVRWAVWNPLLEADSGRVTLPLQGGIQPNPSHCLVYKVPSASMSSEEVKQVESGTLRFQFSLGSEEHLDAPTEPVSGPKVERRPSRKPPTSPSSPPAPVPRVLAAPQNSPVGPGLSISQLAASPRSPTQHCLARPTSQLPHGSQASPAQAQEFPLEAGISHLEADLSQTSLVLETSIAEQLQELPFTPLHAPIVVGTQTRSSAGQPSRASMVLLQSSGFPEILDANKQPAEAVSATEPVTFNPQKEESDCLQSNEMVLQFLAFSRVAQDCRGTSWPKTVYFTFQFYRFPPATTPRLQLVQLDEAGQPSSGALTHILVPVSRDGTFDAGSPGFQLRYMVGPGFLKPGERRCFARYLAVQTLQIDVWDGDSLLLIGSAAVQMKHLLRQGRPAVQASHELEVVATEYEQDNMVVSGDMLGFGRVKPIGVHSVVKGRLHLTLANVGHPCEQKVRGCSTLPPSRSRVISNDGASRFSGGSLLTTGSSRRKHVVQAQKLADVDSELAAMLLTHARQGKGPQDVSRESDATRRRKLERMRSVRLQEAGGDLGRRGTSVLAQQSVRTQHLRDLQVIAAYRERTKAESIASLLSLAITTEHTLHATLGVAEFFEFVLKNPHNTQHTVTVEIDNPELSVIVDSQEWRDFKGAAGLHTPVEEDMFHLRGSLAPQLYLRPHETAHVPFKFQSFSAGQLAMVQASPGLSNEKGMDAVSPWKSSAVPTKHAKVLFRASGGKPIAVLCLTVELQPHVVDQVFRFYHPELSFLKKAIRLPPWHTFPGAPVGMLGEDPPVHVRCSDPNVICETQNVGPGEPRDIFLKVASGPSPEIKDFFVIIYSDRWLATPTQTWQVYLHSLQRVDVSCVAGQLTRLSLVLRGTQTVRKVRAFTSHPQELKTDPKGVFVLPPRGVQDLHVGVRPLRAGSRFVHLNLVDVDCHQLVASWLVCLCCRQPLISKAFEIMLAAGEGKGVNKRITYTNPYPSRRTFHLHSDHPELLRFREDSFQVGGGETYTIGLQFAPSQRVGEEEILIYINDHEDKNEEAFCVKVIYQ

SEQ ID NO: 10293 - protein, 1199 aa, Homo sapiens
MPLTGVEPARMNRKKGDKGFESPRPYKLTHQVVCINNINFQRKSVVGFVELTIFPTVANLNRIKLNSKQCRIYRVRINDLEAAFIYNDPTLEVCHSESKQRNLNYFSNAYAAAVSAVDPDAGNGELCIKVPSELWKHVDELKVLKIHINFSLDQPKGGLHFVVPSVEGSMAERGAHVFSCGYQNSTRFWFPCVDSYSELCTWKLEFTVDAAMVAVSNGDLVETVYTHDMRKKTFHYMLTIPTAASNISLAIGPFEILVDPYMHEVTHFCLPQLLPLLKHTTSYLHEVFEFYEEILTCRYPYSCFKTVFIDEAYVEVAAYASMSIFSTNLLHSAMIIDETPLTRRCLAQSLAQQFFGCFISRMSWSDEWVLKGISGYIYGLWMKKTFGVNEYRHWIKEELDKIVAYELKTGGVLLHPIFGGGKEKDNPASHLHFSIKHPHTLSWEYYSMFQCKAHLVMRLIENRISMEFMLQVFNKLLSLASTASSQKFQSHMWSQMLVSTSGFLKSISNVSGKDIQPLIKQWVDQSGVVKFYGSFAFNRKRNVLELEIKQDYTSPGTQKYVGPLKVTVQELDGSFNHTLQIEENSLKHDIPCHSKSRRNKKKKIPLMNGEEVDMDLSAMDADSPLLWIRIDPDMSVLRKVEFEQADFMWQYQLRYERDVVAQQESILALEKFPTPASRLALTDILEQEQCFYRVRMSACFCLAKIANSMVSTWTGPPAMKSLFTRMFCCKSCPNIVKTNNFMSFQSYFLQKTMPVAMALLRDVHNLCPKEVLTFILDLIKYNDNRKNKFSDNYYRAEMIDALANSVTPAVSVNNEVRTLDNLNPDVRLILEEITRFLNMEKLLPSYRHTITVSCLRAIRVLQKNGHVPSDPALFKSYAEYGHFVDIRIAALEAVVDYTKVDRSYEELQWLLNMIQNDPVPYVRHKILNMLTKNPPFTKNMESPLCNEALVDQLWKLMNSGTSHDWRLRCGAVDLYFTLFGLSRPSCLPLPELGLVLNLKEKKAVLNPTIIPESVAGNQEAANNPSSHPQLVGFQNPFSSSQDEEEIDMDTVHDSQAFISHHLNMLERPSTPGLSKYRPASSRSALIPQHSAGCDSTPTTKPQWSLELARKGTGKEQAPLEMSMHPAASAPLSVFTKESTASKHSDHHHHHHHEHKKKKKKHKHKHKHKHKHDSKEKDKEPFTFSSPASGRSIRSPSLSD

SEQ ID NO: 10294 - protein, 498 aa, Homo sapiens
MAEDSESAASQQSLELDDQDTCGIDGDNEEETEHAKGSPGGYLGAKKKKKKQKRKKEKPNSGGTKSDSASDSQEIKIQQPSKNPSVPMQKLQDIQRAMELLSACQGPARNIDEAAKHRYQFWDTQPVPKLDEVITSHGAIEPDKDNVRQEPYSLPQGFMWDTLDLSDAEVLKELYTLLNENYVEDDDNMFRFDYSPEFLLWALRPPGWLLQWHCGVRVSSNKKLVGFISAIPANIRIYDSVKKMVEINFLCVHKKLRSKRVAPVLIREITRRVNLEGIFQAVYTAGVVLPKPIATCRYWHRSLNPRKLVEVKFSHLSRNMTLQRTMKLYRLPDVTKTSGLRPMEPKDIKSVRELINTYLKQFHLAPVMDEEEVAHWFLPREHIIDTFVVESPNGKLTDFLSFYTLPSTVMHHPAHKSLKAAYSFYNIHTETPLLDLMSDALILAKSKGFDVFNALDLMENKTFLEKLKFGIGDGNLQYYLYNWRCPGTDSEKVGLVLQ

SEQ ID NO: 10295 - protein, 411 aa, Homo sapiens
MWIQQLLGLSSMSIRWPGRPLGSHAWILIAMFQLAVDLPACEALGPGPEFWLLPRSPPRPPRLWSFRSGQPARVPAPVWSPRPPRVERIHGQMQMPRARRAHRPRDQAAALVPKAGLAKPPAAAKSSPSLASSSSSSSSAVAGGAPEQQALLRRGKRHLQGDGLSSFDSRGSRPTTETEFIAWGPTGDEEALESNTFPGVYGPTTVSILQTRKTTVAATTTTTTTATPMTLQTKGFTESLDPRRRIPGGVSTTEPSTSPSNNGEVTQPPRILGEASGLAVHQIITITVSLIMVIAALITTLVLKNCCAQSGNTRRNSHQRKTNQQEESCQNLTDFPSARVPSSLDIFTAYNETLQCSHECVRASVPVYTDETLHSTTGEYKSTFNGNRPSSSDRHLIPVAFVSEKWFEISC

SEQ ID NO: 10296 - protein, 746 aa, Homo sapiens
MQAKKRYFILLSAGSCLALLFYFGGLQFRASRSHSRREEHSGRNGLHHPSPDHFWPRFPDALRPFVPWDQLENEDSSVHISPRQKRDANSSIYKGKKCRMESCFDFTLCKKNGFKVYVYPQQKGEKIAESYQNILAAIEGSRFYTSDPSQACLFVLSLDTLDRDQLSPQYVHNLRSKVQSLHLWNNGRNHLIFNLYSGTWPDYTEDVGFDIGQAMLAKASISTENFRPNFDVSIPLFSKDHPRTGGERGFLKFNTIPPLRKYMLVFKGKRYLTGIGSDTRNALYHVHNGEDVVLLTTCKHGKDWQKHKDSRCDRDNTEYEKYDYREMLHNATFCLVPRGRRLGSFRFLEALQAACVPVMLSNGWELPFSEVINWNQAAVIGDERLLLQIPSTIRSIHQDKILALRQQTQFLWEAYFSSVEKIVLTTLEIIQDRIFKHISRNSLIWNKHPGGLFVLPQYSSYLGDFPYYYANLGLKPPSKFTAVIHAVTPLVSQSQPVLKLLVAAAKSQYCAQIIVLWNCDKPLPAKHRWPATAVPVVVIEGESKVMSSRFLPYDNIITDAVLSLDEDTVLSTTEVDFAFTVWQSFPERIVGYPARSHFWDNSKERWGYTSKWTNDYSMVLTGAAIYHKYYHYLYSHYLPASLKNMVDQLANCEDILMNFLVSAVTKLPPIKVTQKKQYKETMMGQTSRASRWADPDHFAQRQSCMNTFASWFGYMPLIHSQMRLDPVLFKDQVSILRKKYRDIERL

SEQ ID NO: 10297 - protein, 338 aa, Homo sapiens
MLQKPKSVKLRALRSPRKFGVAGRSCQEVLRKGCLRFQLPERGSRLCLYEDGTELTEDYFPSVPDNAELVLLTLGQAWQGYVSDIRRFLSAFHEPQVGLIQAAQQLLCDEQAPQRQRLLADLLHNVSQNIAAETRAEDPPWFEGLESRFQSKSGYLRYSCESRIRSYLREVSSYPSTVGAEAQEEFLRVLGSMCQRLRSMQYNGSYFDRGAKGGSRLCTPEGWFSCQGPFDMDSCLSRHSINPYSNRESRILFSTWNLDHIIEKKRTIIPTLVEAIKEQDGREVDWEYFYGLLFTSENLKLVHIVCHKKTTHKLNCDPSRIYKPQTRLKRKQPVRKRQ

SEQ ID NO: 10298 - protein, 1072 aa, Homo sapiens
MAPPTGVLSSLLLLVTIAGCARKQCSEGRTYSNAVISPNLETTRIMRVSHTFPVVDCTAACCDLSSCDLAWWFEGRCYLVSCPHKENCEPKKMGPIRSYLTFVLRPVQRPAQLLDYGDMMLNRGSPSGIWGDSPEDIRKDLTFLGKDWGLEEMSEYSDDYRELEKDLLQPSGKQEPRGSAEYTDWGLLPGSEGAFNSSVGDSPAVPAETQQDPELHYLNESASTPAPKLPERSVLLPLPTTPSSGEVLEKEKASQLQEQSSNSSGKEVLMPSHSLPPASLELSSVTVEKSPVLTVTPGSTEHSIPTPPTSAAPSESTPSELPISPTTAPRTVKELTVSAGDNLIITLPDNEVELKAFVAPAPPVETTYNYEWNLISHPTDYQGEIKQGHKQTLNLSQLSVGLYVFKVTVSSENAFGEGFVNVTVKPARRVNLPPVAVVSPQLQELTLPLTSALIDGSQSTDDTEIVSYHWEEINGPFIEEKTSVDSPVLRLSNLDPGNYSFRLTVTDSDGATNSTTAALIVNNAVDYPPVANAGPNHTITLPQNSITLNGNQSSDDHQIVLYEWSLGPGSEGKHVVMQGVQTPYLHLSAMQEGDYTFQLKVTDSSRQQSTAVVTVIVQPENNRPPVAVAGPDKELIFPVESATLDGSSSSDDHGIVFYHWEHVRGPSAVEMENIDKAIATVTGLQVGTYHFRLTVKDQQGLSSTSTLTVAVKKENNSPPRARAGGRHVLVLPNNSITLDGSRSTDDQRIVSYLWIRDGQSPAAGDVIDGSDHSVALQLTNLVEGVYTFHLRVTDSQGASDTDTATVEVQPDPRKSGLVELTLQVGVGQLTEQRKDTLVRQLAVLLNVLDSDIKVQKIRAHSDLSTVIVFYVQSRPPFKVLKAAEVARNLHMRLSKEKADFLLFKVLRVDTAGCLLKCSGHGHCDPLTKRCICSHLWMENLIQRYIWDGESNCEWSIFYVTVLAFTLIVLTGGFTWLCICCCKRQKRTKIRKKTKYTILDNMDEQERMELRPKYGIKHRSTEHNSSLMVSESEFDSDQDTIFSREKMERGNPKVSMNGSIRNGASFSYCSKDR

SEQ ID NO: 10299 - protein, 752 aa, Homo sapiens
MDVRRLKVNELREELQRRGLDTRGLKAELAERLQPPPPGLQPHAEPGGYSGPDGHYAMDNITRQNQFYDTQVIKQENESGYERRPLEMEQQQAYRPEMKTEMKQGAPTSFLPPEASQLKPDRQQFQSRKRPYEENRGRGYFEHREDRRGRSPQPPAEEDEDDFDDTLVAIDTYNCDLHFKVARDRSSGYPLTIEGFAYLWSGARASYGVRRGRVCFEMKDFECGNDVELSFTKNGKWMGIAFRIQKEALGGQALYPHVLVKNCAVEFNFGQRAEPYCSVLPGFTFIQHLPLSERIRGTVGPKSKAECEILMMVGLPAAGKTTWAIKHAASNPSKKYNILGTNAIMDKMRVMGLRRQRNYAGRWDVLIQQATQCLNRLIQIAARKKRNYILDQTNVYGSAQRRKMRPFEGFQRKAIVICPTDEDLKDRTIKRTDEEGKDVPDHAVLEMKANFTLPDVGDFLDEVLFIELQREEADKLVRQYNEEGRKAGPPPEKRFDNRGGGGFRGRGGGGGFQRYENRGPPGGNRGGFQNRGGGSGGGGNYRGGFNRSGGGGYSQNRWGNNNRDNNNSNNRGSYNRAPQQQPPPQQPPPPQPPPQQPPPPPSYSPARNPPGASTYNKNSNIPGSSANTSTPTVSSYSPPQSFGFFPSTFQPSYSQPPYNQGGYSQGYTAPPPPPPPPPAYNYGSYGGYNPAPYTPPPPPTAQTYPQPSYNQYQQYAQQWNQYYQNQGQWPPYYGNYDYGSYSGNTQGGTSTQ

SEQ ID NO: 10300 - protein, 318 aa, Homo sapiens
MERGDQPKRTRNENIFNCLYKNPEATFKLICFPWMGGGSTHFAKWGQDTHDLLEETASHHVAKAGLKLRRSSDPPASAYPCAGVSHRRREPPCLAKILGLFWILIFFMHSLRLPGRESRVEEPLENDISQLVDEVVCALQPVIQDKPFAFFGHSMGSYIAFRTALGLKENNQPEPLHLFLSSATPVHSKAWHRIPKDDELSEEQISHYLMEFGGTPKHFAEAKEFVKQCSPIIRADLNIVRSCTSNVPSKAVLSCDLTCFVGSEDIAKDMEAWKDVTSGNAKIYQLPGGHFYLLDPANEKLIKNYIIKCLEVSSISNF

SEQ ID NO: 10301 - protein, 522 aa, Homo sapiens
MVDDKEKNMKCLTFFLMLPETVKNRSKKSSKKANTSSSSSNSSKLPPVCYEIITLKTKKKKMAADIFPRKKPANSSSTSVQQYHQQNLSNNNLIPAPNWQGLYPTIRERNAMMFNNDLMADVHFVVGPPGGTQRLPGHKYVLAVGSSVFHAMFYGELAEDKDEIRIPDVEPAAFLAMLKYIYCDEIDLAADTVLATLYAAKKYIVPHLARACVNFLETSLSAKNACVLLSQSCLFEEPDLTQRCWEVIDAQAELALKSEGFCDIDFQTLESILRRETLNAKEIVVFEAALNWAEVECQRQDLALSIENKRKVLGKALYLIRIPTMALDDFANGAAQSGVLTLNETNDIFLWYTAAKKPELQFVSKARKGLVPQRCHRFQSCAYRSNQWRYRGRCDSIQFAVDKRVFIAGFGLYGSSCGSAEYSAKIELKRQGVVLGQNLSKYFSDGSSNTFPVWFEYPVQIEPDTFYTASVILDGNELSYFGQEGMTEVQCGKVTVQFQCSSDSTNGTGVQGGQIPELIFYA

SEQ ID NO: 10302 - protein, 265 aa, Homo sapiens
MERGDQPKRTRNENIFNCLYKNPEATFKLICFPWMGGGSTHFAKWGQDTHDLLEVHSLRLPGRESRVEEPLENDISQLVDEVVCALQPVIQDKPFAFFGHSMGSYIAFRTALGLKENNQPEPLHLFLSSATPVHSKAWHRIPKDDELSEEQISHYLMEFGGTPKHFAEAKEFVKQCSPIIRADLNIVRSCTSNVPSKAVLSCDLTCFVGSEDIAKDMEAWKDVTSGNAKIYQLPGGHFYLLDPANEKLIKNYIIKCLEVSSISNF

SEQ ID NO: 10303 - protein, 426 aa, Homo sapiens
MRQVCCSALPPPPLEKGRCSSYSDSSSSSSERSSSSSSSSSESGSSSRSSSNNSSISRPAAPPEPRPQQQPQPRSPAARRAAARSRAAAAGGMRRDPAPGFSMLLFGVSLACYSPSLKSVQDQAYKAPVVVEGKVQGLVPAGGSSSNSTREPPASGRVALVKVLDKWPLRSGGLQREQVISVGSCVPLERNQRYIFFLEPTEQPLVFKTAFAPLDTNGKNLKKEVGKILCTDCATRPKLKKMKSQTGQVGEKQSLKCEAAAGNPQPSYRWFKDGKELNRSRDIRIKYGNGRKNSRLQFNKVKVEDAGEYVCEAENILGKDTVRGRLYVNSVSTTLSSWSGHARKCNETAKSYCVNGGVCYYIEGINQLSCKCPNGFFGQRCLEKLPLRLYMPDPKQSVLWDTPGTGVSSSQWSTSPKPRSCTRRGS

SEQ ID NO: 10304 - protein, 583 aa, Homo sapiens
MAAAAVSESWPELELAERERRRELLLTGPGLEERVRAAGGQLPPRLFTLPLLHYLEVSGCGSLRAPGPGLAQGLPQLHSLVLRRNALGPGLSPELGPLPALRVLDLSGNALEALPPGQGLGPAEPPGLPQLQSLNLSGNRLRELPADLARCAPRLQSLNLTGNCLDSFPAELFRPGALPLLSELAAADNCLRELSPDIAHLASLKTLDLSNNQLSEIPAELADCPKLKEINFRGNKLRDKRLEKMVSGCQTRSILEYLRVGGRGGGKGKGRAEGSEKEESRRKRRERKQRREGGDGEEQDVGDAGRLLLRVLHVSENPVPLTVRVSPEVRDVRPYIVGAVVRGMDLQPGNALKRFLTSQTKLHEDLCEKRTAATLATHELRAVKGPLLYCARPPQDLKIVPLGRKEAKAKELVRQLQLEAEEQRKQKKRQSVSGLHRYLHLLDGNENYPCLVDADGDVISFPPITNSEKTKVKKTTSDLFLEVTSATSLQICKDVMDALILKMAEMKKYTLENKEEGSLSDTEADAVSGQLPDPTTNPSAGKDGPSLLVVEQVRVVDLEGSLKVVYPSKADLATAPPHVTVVR

SEQ ID NO: 10305 - protein, 572 aa, Homo sapiens
MFLFQGNNGTVLYTGDFRLAQGEAARMELLHSGGRVKDIQSVYLDTTFCDPRFYQIPSREECLSGVLELVRSWITRSPYHVVWLNCKAAYGYEYLFTNLSEELGVQVHVNKLDMFRNMPEILHHLTTDRNTQIHACRHPKAEEYFQWSKLPCGITSRNRIPLHIISIKPSTMWFGERSRKTNVIVRTGESSYRACFSFHSSYSEIKDFLSYLCPVNAYPNVIPVGTTMDKVVEILKPLCRSSQSTEPKYKPLGKLKRARTVHRDSEEEDDYLFDDPLPIPLRHKVPYPETFHPEVFSMTAVSEKQPEKLRQTPGCCRAECMQSSRFTNFVDCEESNSESEEEVGIPASLQGDLGSVLHLQKADGDVPQWEVFFKRNDEITDESLENFPSSTVAGGSQSPKLFSDSDGESTHISSQNSSQSTHITEQGSQGWDSQSDTVLLSSQERNSGDITSLDKADYRPTIKENIPASLMEQNVICPKDTYSDLKSRDKDVTIVPSTGEPTTLSSETHIPEEKSLLNLSTNADSQSSSDFEVPSTPEAELPKREHLQYLYEKLATGESIAVKKRKCSLLDT

SEQ ID NO: 10306 - protein, 142 aa, Homo sapiens
MDMRWHCENLQTTDDILVASAECPSDDEDIDPCEPSSGGLANPTRAGGREPYPGSAEVIRESSSTTGMVVGIVAAAALCILILLYAMYKYRNRDEGSYHVDESRNYISNSAQSNGAVVKEKQPSSAKSSNKNKKNKDKEYYV

SEQ ID NO: 10307 - protein, 692 aa, Homo sapiens
MSSFEGQMAEYPTISIDRFDRENLRARAYFLSHCHKDHMKGLRAPTLKRRLECSLKVYLYCSPVTKELLLTSPKYRFWKKRIISIEIETPTQISLVDEASGEKEEIVVTLLPAGHCPGSVMFLFQGNNGTVLYTGDFRLAQGEAARMELLHSGGRVKDIQSVYLDTTFCDPRFYQIPSREECLSGVLELVRSWITRSPYHVVWLNCKAAYGYEYLFTNLSEELGVQVHVNKLDMFRNMPEILHHLTTDRNTQIHACRHPKAEEYFQWSKLPCGITSRNRIPLHIISIKPSTMWFGERSRKTNVIVRTGESSYRACFSFHSSYSEIKDFLSYLCPVNAYPNVIPVGTTMDKVVEILKPLCRSSQSTEPKYKPLGKLKRARTVHRDSEEEDDYLFDDPLPIPLRHKVPYPETFHPEVFSMTAVSEKQPEKLRQTPGCCRAECMQSSRFTNFVDCEESNSESEEEVGIPASLQGDLGSVLHLQKADGDVPQWEVFFKRNDEITDESLENFPSSTVAGGSQSPKLFSDSDGESTHISSQNSSQSTHITEQGSQGWDSQSDTVLLSSQERNSGDITSLDKADYRPTIKENIPASLMEQNVICPKDTYSDLKSRDKDVTIVPSTGEPTTLSSETHIPEEKSLLNLSTNADSQSSSDFEVPSTPEAELPKREHLQYLYEKLATGESIAVKKRKCSLLDT

SEQ ID NO: 10308 - protein, 434 aa, Homo sapiens
MSSFEGQMAEYPTISIDRFDRENLRARAYFLSHCHKDHMKGLRAPTLKRRLECSLKVYLYCSPVTKELLLTSPKYRFWKKRIISIEIETPTQISLVDEASGEKEEIVVTLLPAGHCPGSVMFLFQGNNGTVLYTGDFRLAQGEAARMELLHSGGRVKDIQSVYLDTTFCDPRFYQIPSREECLSGVLELVRSWITRSPYHVVWLNCKAAYGYEYLFTNLSEELGVQVHVNKLDMFRNMPEILHHLTTDRNTQIHACRHPKAEEYFQWSKLPCGITSRNRIPLHIISIKPSTMWFGERSRKTNVIVRTGESSYRACFSFHSSYSEIKDFLSYLCPVNAYPNVIPVGTTMDKVVEILKPLCRSSQSTEPKYKPLGKLKRARTVHRDSGSHSVTQARMRWCHHDSLYPLTPGIKRSSCLSLLTSWITGAYRHAQLMI

SEQ ID NO: 10309 - protein, 2554 aa, Homo sapiens
MTATTRGSPVGGNDNQGQAPDGQSQPPLQQNQTSSPDSSNENSPATPPDEQGQGDAPPQLEDEEPAFPHTDLAKLDDMINRPRWVVPVLPKGELEVLLEAAIDLSKKGLDVKSEACQRFFRDGLTISFTKILTDEAVSGWKFEIHRCIINNTHRLVELCVAKLSQDWFPLLELLAMALNPHCKFHIYNGTRPCESVSSSVQLPEDELFARSPDPRSPKGWLVDLLNKFGTLNGFQILHDRFINGSALNVQIIAALIKPFGQCYEFLTLHTVKKYFLPIIEMVPQFLENLTDEELKKEAKNEAKNDALSMIIKSLKNLASRVPGQEETVKNLEIFRLKMILRLLQISSFNGKMNALNEVNKVISSVSYYTHRHGNPEEEEWLTAERMAEWIQQNNILSIVLRDSLHQPQYVEKLEKILRFVIKEKALTLQDLDNIWAAQAGKHEAIVKNVHDLLAKLAWDFSPEQLDHLFDCFKASWTNASKKQREKLLELIRRLAEDDKDGVMAHKVLNLLWNLAHSDDVPVDIMDLALSAHIKILDYSCSQDRDTQKIQWIDRFIEELRTNDKWVIPALKQIREICSLFGEAPQNLSQTQRSPHVFYRHDLINQLQHNHALVTLVAENLATYMESMRLYARDHEDYDPQTVRLGSRYSHVQEVQERLNFLRFLLKDGQLWLCAPQAKQIWKCLAENAVYLCDREACFKWYSKLMGDEPDLDPDINKDFFESNVLQLDPSLLTENGMKCFERFFKAVNCREGKLVAKRRAYMMDDLELIGLDYLWRVVIQSNDDIASRAIDLLKEIYTNLGPRLQVNQVVIHEDFIQSCFDRLKASYDTLCVLDGDKDSVNCARQEAVRMVRVLTVLREYINECDSDYHEERTILPMSRAFRGKHLSFVVRFPNQGRQVDDLEVWSHTNDTIGSVRRCILNRIKANVAHTKIELFVGGELIDPADDRKLIGQLNLKDKSLITAKLTQISSNMPSSPDSSSDSSTGSPGNHGNHYSDGPNPEVESCLPGVIMSLHPRYISFLWQVADLGSSLNMPPLRDGARVLMKLMPPDSTTIEKLRAICLDHAKLGESSLSPSLDSLFFGPSASQVLYLTEVVYALLMPAGAPLADDSSDFQFHFLKSGGLPLVLSMLTRNNFLPNADMETRRGAYLNALKIAKLLLTAIGYGHVRAVAEACQPGVEGVNPMTQINQVTHDQAVVLQSALQSIPNPSSECMLRNVSVRLAQQISDEASRYMPDICVIRAIQKIIWASGCGSLQLVFSPNEEITKIYEKTNAGNEPDLEDEQVCCEALEVMTLCFALIPTALDALSKEKAWQTFIIDLLLHCHSKTVRQVAQEQFFLMCTRCCMGHRPLLFFITLLFTVLGSTARERAKHSGDYFTLLRHLLNYAYNSNINVPNAEVLLNNEIDWLKRIRDDVKRTGETGIEETILEGHLGVTKELLAFQTSEKKFHIGCEKGGANLIKELIDDFIFPASNVYLQYMRNGELPAEQAIPVCGSPPTINAGFELLVALAVGCVRNLKQIVDSLTEMYYIGTAITTCEALTEWEYLPPVGPRPPKGFVGLKNAGATCYMNSVIQQLYMIPSIRNGILAIEGTGSDVDDDMSGDEKQDNESNVDPRDDVFGYPQQFEDKPALSKTEDRKEYNIGVLRHLQVIFGHLAASRLQYYVPRGFWKQFRLWGEPVNLREQHDALEFFNSLVDSLDEALKALGHPAMLSKVLGGSFADQKICQGCPHRYECEESFTTLNVDIRNHQNLLDSLEQYVKGDLLEGANAYHCEKCNKKVDTVKRLLIKKLPPVLAIQLKRFDYDWERECAIKFNDYFEFPRELDMEPYTVAGVAKLEGDNVNPESQLIQQSEQSESETAGSTKYRLVGVLVHSGQASGGHYYSYIIQRNGGDGERNRWYKFDDGDVTECKMDDDEEMKNQCFGGEYMGEVFDHMMKRMSYRRQKRWWNAYILFYERMDTIDQDDELIRYISELAITTRPHQIIMPSAIERSVRKQNVQFMHNRMQYSMEYFQFMKKLLTCNGVYLNPPPGQDHLLPEAEEITMISIQLAARFLFTTGFHTKKVVRGSASDWYDALCILLRHSKNVRFWFAHNVLFNVSNRFSEYLLECPSAEVRGAFAKLIVFIAHFSLQDGPCPSPFASPGPSSQAYDNLSLSDHLLRAVLNLLRREVSEHGRHLQQYFNLFVMYANLGVAEKTQLLKLSVPATFMLVSLDEGPGPPIKYQYAELGKLYSVVSQLIRCCNVSSRMQSSINGNPPLPNPFGDPNLSQPIMPIQQNVADILFVRTSYVKKIIEDCSNSEETVKLLRFCCWENPQFSSTVLSELLWQVAYSYTYELRPYLDLLLQILLIEDSWQTHRIHNALKGIPDDRDGLFDTIQRSKNHYQKRAYQCIKCMVALFSNCPVAYQILQGNGDLKRKWTWAVEWLGDELERRPYTGNPQYTYNNWSPPVQSNETSNGYFLERSHSARMTLAKACELCPEEEPDDQDAPDEHESPPPEDAPLYPHSPGSQYQQNNHVHGQPYTGPAAHHMNNPQRTGQRAQENYEGSEEVSPPQTKDQ

SEQ ID NO: 10310 - protein, 331 aa, Homo sapiens
MAQASPPRPERVLGASSPEARPAQEALLLPTGVFQVAEKMEKRTCALCPKDVEYNVLYFAQSENIAAHENCLLYSSGLVECEDQDPLNPDRSFDVESVKKEIQRGRKLKCKFCHKRGATVGCDLKNCNKNYHFFCAKKDDAVPQSDGVRGIYKLLCQQHAQFPIIAQSAKFSGVKRKRGRKKPLSGNHVQPPETMKCNTFIRQVKEEHGRHTDATVKVPFLKKCKEAGLLNYLLEEILDKVHSIPEKLMDETTSESDYEEIGSALFDCRLFEDTFVNFQAAIEKKIHASQQRWQQLKEEIELLQDLKQTLCSFQENRDLMSSSTSISSLSY

SEQ ID NO: 10311 - protein, 459 aa, Homo sapiens
MAPLCPSPWLPLLIPAPAPGLTVQLLLSLLLLVPVHPQRLPRMQEDSPLGGGSSGEDDPLGEEDLPSEEDSPREEDPPGEEDLPGEEDLPGEEDLPEVKPKSEEEGSLKLEDLPTVEAPGDPQEPQNNAHRDKEGDDQSHWRYGGDPPWPRVSPACAGRFQSPVDIRPQLAAFCPALRPLELLGFQLPPLPELRLRNNGHSVQLTLPPGLEMALGPGREYRALQLHLHWGAAGRPGSEHTVEGHRFPAEIHVVHLSTAFARVDEALGRPGGLAVLAAFLEEGPEENSAYEQLLSRLEEIAEEGSETQVPGLDISALLPSDFSRYFQYEGSLTTPPCAQGVIWTVFNQTVMLSAKQLHTLSDTLWGPGDSRLQLNFRATQPLNGRVIEASFPAGVDSSPRAAEPVQLNSCLAAGDILALVFGLLFAVTSVAFLVQMRRQHRRGTKGGVSYRPAEVAETGA

SEQ ID NO: 10312 - protein, 1257 aa, Homo sapiens
MRSKARARKLAKSDGDVVNNMYEPNRDLLASHSAEDEAEDSAMSPIPVGPPSPFPTSEDFTPKEGSPYEAPVYIPEDIPIPADFELRESSIPGAGLGVWAKRKMEAGERLGPCVVVPRAAAKETDFGWEQILTDVEVSPQEGCITKISEDLGSEKFCVDANQAGAGSWLKYIRVACSCDDQNLTMCQISEQIYYKVIKDIEPGEELLVHVKEGVYPLGTVPPGLDEEPTFRCDECDELFQSKLDLRRHKKYTCGSVGAALYEGLAEELKPEGLGGGSGQAHECKDCERMFPNKYSLEQHMVIHTEEREYKCDQCPKAFNWKSNLIRHQMSHDSGKRFECENCVKVFTDPSNLQRHIRSQHVGARAHACPDCGKTFATSSGLKQHKHIHSTVKPFICEVCHKSYTQFSNLCRHKRMHADCRTQIKCKDCGQMFSTTSSLNKHRRFCEGKNHYTPGGIFAPGLPLTPSPMMDKAKPSPSLNHASLGFNEYFPSRPHPGSLPFSTAPPTFPALTPGFPGIFPPSLYPRPPLLPPTSLLKSPLNHTQDAKLPSPLGNPALPLVSAVSNSSQGTTAAAGPEEKFESRLEDSCVEKLKTRSSDMSDGSDFEDVNTTTGTDLDTTTGTGSDLDSDVDSDPDKDKGKGKSAEGQPKFGGGLAPPGAPNSVAEVPVFYSQHSFFPPPDEQLLTATGAAGDSIKAIASIAEKYFGPGFMGMQEKKLGSLPYHSAFPFQFLPNFPHSLYPFTDRALAHNLLVKAEPKSPRDALKVGGPSAECPFDLTTKPKDVKPILPMPKGPSAPASGEEQPLDLSIGSRARASQNGGGREPRKNHVYGERKLGAGEGLPQVCPARMPQQPPLHYAKPSPFFMDPIYSRVEKRKVTDPVGALKEKYLRPSPLLFHPQMSAIETMTEKLESFAAMKADSGSSLQPLPHHPFNFRSPPPTLSDPILRKGKERYTCRYCGKIFPRSANLTRHLRTHTGEQPYRCKYCDRSFSISSNLQRHVRNIHNKEKPFKCHLCNRCFGQQTNLDRHLKKHEHENAPVSQHPGVLTNHLGTSASSPTSESDNHALLDEKEDSYFSEIRNFIANSEMNQASTRTEKRADMQIVDGSAQCPGLASEKQEDVEEEDDDDLEEDDEDSLAGKSQDDTVSPAPEPQAAYEDEEDEEPAASLAVGFDHTRRCAEDHEGGLLALEPMPTFGKGLDLRRAAEEAFEVKDVLNSTLDSEALKHTLCRQAKNQGSLDAWLKVTGATSESGAFHPINHL

SEQ ID NO: 10313 - protein, 311 aa, Homo sapiens
MGKENCTTVAEFILLGLSDVPELRVCLFLLFLLIYGVTLLANLGMTALIQVSSRLHTPVYFFLSHLSFVDFCYSSIIVPKMLANIFNKDKAISFLGCMVQFYLFCTCGVTEVFLLAVMAYDRFVAICNPLLYMVTMSQKLRVELTSCCYFCGTVCSLIHSSLALRILFYRSNVINHFFCDLPPLLSLACSDVTVNETLLFLVATLNESVTIMIILTSYLLILTTILKIHSAESRHKAFSTCASHLTAITVSHGTILYIYCRPSSGNSGDVDKVATVFYTVVIPMLNPLIYSLRNKDVNKALRKVMGSKIHS

SEQ ID NO: 10314 - protein, 4243 aa, Homo sapiens
MGHLWLLGIWGLCGLLLCAADPSTDGSQIIPKVTEIIPKYGSINGATRLTIRGEGFSQANQFNYGVDNAELGNSVQLISSFQSITCDVEKDASHSTQITCYTRAMPEDSYTVRVSVDGVPVTENNTCKGHINSWECTFNAKSFRTPTIRSITPLSGTPGTLITIQGRIFTDVYGSNIALSSNGKNVRILRVYIGGMPCELLIPQSDNLYGLKLDHPNGDMGSMVCKTTGTFIGHHNVSFILDNDYGRSFPQKMAYFVSSLNKIAMFQTYAEVTMIFPSQGSIRGGTTLTISGRFFDQTDFPVRVLVGGEPCDILNVTENSICCKTPPKPHILKTVYPGGRGLKLEVWNNSRPIRLEEILEYNEKTPGYMGASWVDSASYIWLMEQDTFVARFSGFLVAPDSDVYRFYIKGDDRYAIYFSQTGLPEDKVRIAYHSANANSYFSSPTQRSDDIHLQKGKEYYIEILLQEYRLSAFVDVGLYQYRNVYTEQQTGDAVNEEQVIKSQSTILQEVQVITLENWETTNAINEVQKIKVTSPCVEANSCSLYQYRLIYNMEKTVFLPADASEFILQSALNDLWSIKPDTVQVIRTQNPQSYVYMVTFISTRGDFDLLGYEVVEGNNVTLDITEQTKGKPNLETFTLNWDGIASKPLTLWSSEAEFQGAVEEMVSTKCPPQIANFEEGFVVKYFRDYETDFNLEHINRGQKTAETDAYCGRYSLKNPAVLFDSADVKPNRRPYGDILLFPYNQLCLAYKGFLANYIGLKFQYQDNSKITRSTDTQFTYNFAYGNNWTYTCIDLLDLVRTKYTGTNVSLQRISLHKASESQSFYVDVVYIGHTSTISTLDEMPKRRLPALANKGIFLEHFQVNQTKTNGPTMTNQYSVTMTSYNCSYNIPMMAVSFGQIITHETENEFVYRGNNWPGESKIHIQRIQAASPPLSGSFDIQAYGHILKGLPAAVSAADLQFALQSLEGMGRISVTREGTCAGYAWNIKWRSTCGKQNLLQINDSNIIGEKANMTVTRIKEGGLFRQHVLGDLLRTPSQQPQVEVYVNGIPAKCSGDCGFTWDSNITPLVLAISPSQGSYEEGTILTIVGSGFSPSSAVTVSVGPVGCSLLSVDEKELKCQILNGSAGHAPVAVSMADVGLAQNVGGEEFYFVYQSQISHIWPDSGSIAGGTLLTLSGFGFNENSKVLVGNETCNVIEGDLNRITCRTPKKTEGTVDISVTTNGFQATARDAFSYNCLQTPIITDFSPKVRTILGEVNLTIKGYNFGNELTQNMAVYVGGKTCQILHWNFTDIRCLLPKLSPGKHDIYVEVRNWGFASTRDKLNSSIQYVLEVTSMFPQRGSLFGGTEITIRGFGFSTIPAENTVLLGSIPCNVTSSSENVIKCILHSTGNIFRITNNGKDSVHGLGYAWSPPVLNVSVGDTVAWHWQTHPFLRGIGYRIFSVSSPGSVIYDGKGFTSGRQKSTSGSFSYQFTSPGIHYYSSGYVDEAHSIFLQGVINVLPAETRHIPLHLFVGRSEATYAYGGPENLHLGSSVAGCLATEPLCSLNNTRVKNSKRLLFEVSSCFSPSISNITPSTGTVNELITIIGHGFSNLPWANKVTIGSYPCVVEESSEDSITCHIDPQNSMDVGIRETVTLTVYNLGTAINTLSNEFDRRFVLLPNIDLVLPNAGSTTGMTSVTIKGSGFAVSSAGVKVLMGHFPCKVLSVNYTAIECETSPAAQQLVDVDLLIHGVPAQCQGNCTFSYLESITPYITGVFPNSVIGSVKVLIEGEGLGTVLEDIAVFIGNQQFRAIEVNENNITALVTPLPVGHHSVSVVVGSKGLALGNLTVSSPPVASLSPTSGSIGGGTTLVITGNGFYPGNTTVTIGDEPCQIISINPNEVYCRTPAGTTGMVDVKIFVNTIAYPPLLFTYALEDTPFLRGIIPSRGPPGTEIEITGSNFGFEILEISVMINNIQCNVTMANDSVVQCIVGDHAGGTFPVMMHHKTKGSAMSTVVFEYPLNIQNINPSQGSFGGGQTMTVTGTGFNPQNSIILVCGSECAIDRLRSDYTTLLCEIPSNNGTGAEQACEVSVVNGKDLSQSMTPFTYAVSLTPLITAVSPKRGSTAGGTRLTVVGSGFSENMEDVHITIAEAKCDVEYSNKTHIICMTDAHTLSGWAPVCVHIRGVGMAKLDNADFLYVDAWSSNFSWGGKSPPEEGSLVVITKGQTILLDQSTPILKMLLIQGGTLIFDEADIELQAENILITDGGVLQIGTETSPFQHKAVITLHGHLRSPELPVYGAKTLAVREGILDLHGVPVPVTWTRLAHTAKAGERILILQEAVTWKPGDNIVIASTGHRHSQGENEKMTIASVSADGINITLSNPLNYTHLGITVTLPDGTLFEARAEVGILTRNILIRGSDNVEWNNKIPACPDGFDTGEFATQTCLQGKFGEEIGSDQFGGCVMFHAPVPGANMVTGRIEYVEVFHAGQAFRLGRYPIHWHLLGDLQFKSYVRGCAIHQAYNRAVTIHNTHHLLVERNIIYDIKGGAFFIEDGIEHGNILQYNLAVFVQQSTSLLNDDVTPAAFWVTNPNNTIRHNAVAGGTHFGFWYRMNNHPDGPSYDRNICQKRVPLGEFFNNTVHSQGWFGMWIFEEYFPMQTGSCTSTVPAPAIFNSLTTWNCQKGAEWVNGGALQFHNFVMVNNYEAGIETKRILAPYVGGWGETNGAVIKNAKIVGHLDELGMGSAFCTAKGLVLPFSEGLTVSSVHFMNFDRPNCVALGVTSISGVCNDRCGGWSAKFVDVQYSHTPNKAGFRWEHEMVMIDVDGSLTGHKGHTVIPHSSLLDPSHCTQEAEWSIGFPGSVCDASVSFHRLAFNQPSPVSLLEKDVVLSDSFGTSIIPFQKKRLTHMSGWMALIPNANHINWYFKGVDHITNISYTSTFYGFKEEDYVIISHNFTQNPDMFNIIDMRNGSSNPLNWNTSKNGDWHLEANTSTLYYLVSGRNDLHQSQLISGNLDPDVKDVVINFQAYCCILQDCFPVHPPSRKPIPKKRPATYNLWSNDSFWQSSRENNYTVPHPGANVIIPEGTWIVADIDMPSMERLIIWGVLELEDKYNVGAAESSYREVVLNATYISLQGGRLIGGWEDNPFKGDLKIVLRGNHTTQDWALPEGPNQGAKVLGVFGELDLHGIPHSIYKTKLSETAFAGSKVLSLMDAVDWQEGEEIVITTTSYDFHQTETRSIVKILHDHKILILNDSLSYTHFAEKYHVPGTGESYTLAADVGILSRNIKIVGEDYPGWSEDSFGARVLVGSFTENMMTFKGNARISNVEFYHSGQEGFRDSTDPRYAVTFLNLGQIQEHGSSYIRGCAFHHGFSPAIGVFGTDGLDIDDNIIHFTVGEGIRIWGNANRVRGNLIALSVWPGTYQNRKDLSSTLWHAAIEINRGTNTVLQNNVVAGFGRAGYRIDGEPCPGQFNPVEKWFDNEAHGGLYGIYMNQDGLPGCSLIQGFTIWTCWDYGIYFQTTESVHIYNVTLVDNGMAIFPMIYMPAAISHKISSKNVQIKSSLIVGSSPGFNCSDVLTNDDPNIELTAAHRSPRSPSGGRSGICWPTFASAHNMAPRKPHAGIMSYNAISGLLDISGSTFVGFKNVCSGETNVIFITNPLNEDLQHPIHVKNIKLVDTTEQSKIFIHRPDISKVNPSDCVDMVCDAKRKSFLRDIDGSFLGNAGSVIPQAEYEWDGNSQVGIGDYRIPKAMLTFLNGSRIPVTEKAPHKGIIRDSTCKYLPEWQSYQCFGMEYAMMVIESLDPDTETRRLSPVAIMGNGYVDLINGPQDHGWCAGYTCQRRLSLFHSIVALNKSYEVYFTGTSPQNLRLMLLNVDHNKAVLVGIFFSTLQRLDVYVNNLLVCPKTTIWNAQQKHCELNNHLYKDQFLPNLDSTVLGENYFDGTYQMLYLLVKGTIPVEIHTATVIFVSFQLSVATEDDFYTSHNLVKNLALFLKIPSDKIRISKIRGKSLRRKRSMGFIIEIEIGDPPIQFISNGTTGQMQLSELQEIAGSLGQAVILGNISSILGFNISSMSITNPLPSPSDSGWIKVTAQPVERSAFPVHHVAFVSSLLVITQPVAAQPGQPFPQQPSVKATDSDGNCVSVGITALTLRAILKDSNNNQVNGLSGNTTIPFSSCWANYTDLTPLRTGKNYKIEFILDNVVGVESRTFSLLAESVSSSGSSSSSNSKASTVGTYAQIMTVVISCLVGRMWLLEIFMAAVSTLNITLRSY

SEQ ID NO: 10315 - protein, 377 aa, Homo sapiens
MFNPHALDSPAVIFDNGSGFCKAGLSGEFGPRHMVSSIVGHLKFQAPSAEANQKKYFVGEEALYKQEALQLHSPFERGLITGWDDVERLWKHLFEWELGVKPSDQPLLATEPSLNPRENREKMAEVMFENFGVPAFYLSDQAVLALYASACVTGLVVDSGDAVTCTVPIFEGYSLPHAVTKLHVAGRDITELLMQLLLASGHTFPCQLDKGLVDDIKKKLCYVALEPEKELSRRPEEVLREYKLPDGNIISLGDPLHQAPEALFVPQQLGSQSPGLSNMVSSSITKCDTDIQKILFGEIVLSGGTTLFHGLDDRLLKELEQLASKDTPIKITAPPDRWFSTWIGASIVTSLSSFKQMWVTAADFKEFGTSVVQRRCF

SEQ ID NO: 10316 - protein, 315 aa, Homo sapiens
MRQNNNITEFVLLGFSQDPGVQKALFVMFLLTYLVTVVGNLLIVVDIIASPSLGSPMYFFLACLSFIDAAYSTTISPKLIVGLFCDKKTISFQGCMGQLFIDHFFGGAEVFLLVVMACDRYVAICKPLHYLTIMNRQVCFLLLVVAMIGGFVHSAFQIVVYSLPFCGPNVIVHFSCDMHPLLELACTDTYFIGLTVVVNSGAICMVIFNLLLISYGVILSSLKTYSQEKRGKALSTCSSGSTVVVLFFVPCIFIYVRPVSNFPTDKFMTVFYTIITHMLSPLIYTLRNSEMRNAIEKLLGKKLTIFIIGGVSVLM

SEQ ID NO: 10317 - protein, 779 aa, Homo sapiens
MGKSEGPVGMVESAGRAGQKRPGFLEGGLLLLLLLVTAALVALGVLYADRRGKQLPRLASRLCFLQEERTFVKRKPRGIPEAQEVSEVCTTPGCVIAAARILQNMDPTTEPCDDFYQFACGGWLRRHVIPETNSRYSIFDVLRDELEVILKAVLENSTAKDRPAVEKARTLYRSCMNQSVIEKRGSQPLLDILEVVGGWPVAMDRWNETVGLEWELERQLALMNSQFNRRVLIDLFIWNDDQNSSRHIIYIDQPTLGMPSREYYFNGGSNRKVREAYLQFMVSVATLLREDANLPRDSCLVQEDMVQVLELETQLAKATVPQEERHDVIALYHRMGLEELQSQFGLKGFNWTLFIQTVLSSVKIKLLPDEEVVVYGIPYLQNLENIIDTYSARTIQNYLVWRLVLDRIGSLSQRFKDTRVNYRKALFGTMVEEVRWRECVGYVNSNMENAVGSLYVREAFPGDSKSMVRELIDKVRTVFVETLDELGWMDEESKKKAQEKAMSIREQIGHPDYILEEMNRRLDEEYSNLNFSEDLYFENSLQNLKVGAQRSLRKLREKVDPNLWIIGAAVVNAFYSPNRNQIVFPAGILQPPFFSKEQPQALNFGGIGMVIGHEITHGFDDNGRNFDKNGNMMDWWSNFSTQHFREQSECMIYQYGNYSWDLADEQNVNGFNTLGENIADNGGVRQAYKAYLKWMAEGGKDQQLPGLDLTHEQLFFINYAQVWCGSYRPEFAIQSIKTDVHSPLKYRVLGSLQNLAAFADTFHCARGTPMHPKERCRVW

SEQ ID NO: 10318 - protein, 349 aa, Homo sapiens
MAVFVVLLALVAGVLGNEFSILKSPGSVVFRNGNWPIPGERIPDVAALSMGFSVKEDLSWPGLAVGNLFHRPRATVMVMVKGVNKLALPPGSVISYPLENAVPFSLDSVANSIHSLFSEETPVVLQLAPSEERVYMVGKANSVFEDLSVTLRQLRNRLFQENSVLSSLPLNSLSRNNEVDLLFLSELQVLHDISSLLSRHKHLAKDHSPDLYSLELAGLDEIGKRYGEDSEQFRDASKILVDALQKFADDMYSLYGGNAVVELVTVKSFDTSLIRKTRTILEAKQANPASPYNLAYKYNFEYSVVFNMVLWIMIALALAVIITSYNIWNMDPGYDSIIYRMTNQKIRMD

SEQ ID NO: 10319 - protein, 85 aa, Homo sapiens
MSVHMPAMKICEKLKKLDSQICELKYEKTLDLASVDLRKMRVAELKQILHSWGEECRACAEKTDYVNLIQELAPKYAATHPKTEL

SEQ ID NO: 10320 - protein, 1755 aa, Homo sapiens
MLSATPLYGNVHSWMNSERVRMCGASEDRKILVNDGDASKARLELREENPLNHNVVDASTAHRIDGLAALSMDRTGLIREGLRVPGNIVYSSLCGLGSEKGREAATSTLGGLGFSSERNPEMQFKPNTPETVEASAVSGKPPNGFSAIYKTPPGIQKSAVATAEALGLDRPASDKQSPLNINGASYLRLPWVNPYMEGATPAIYPFLDSPNKYSLNMYKALLPQQSYSLAQPLYSPVCTNGERFLYLPPPHYVGPHIPSSLASPMRLSTPSASPAIPPLVHCADKSLPWKMGVSPGNPVDSHAYPHIQNSKQPRVPSAKAVTSGLPGDTALLLPPSPRPSPRVHLPTQPAADTYSEFHKHYARISTSPSVALSKPYMTVSSEFPAARLSNGKYPKAPEGGEGAQPVPGHARKTAVQDRKDGSSPPLLEKQTVTKDVTDKPLDLSSKVVDVDASKADHMKKMAPTVLVHSRAGSGLVLSGSEIPKETLSPPGNGCAIYRSEIISTAPSSWVVPGPSPNEENNGKSMSLKNKALDWAIPQQRSSSCPRMGGTDAVITNVSGSVSSAGRPASASPAPNANADGTKTSRSSVETTPSVIQHVGQPPATPAKHSSSTSSKGAKASNPEPSFKANENGLPPSSIFLSPNEAFRSPPIPYPRSYLPYPAPEGIAVSPLSLHGKGPVYPHPVLLPNGSLFPGHLAPKPGLPYGLPTGRPEFVTYQDALGLGMVHPMLIPHTPIEITKEEKPERRSRSHERARYEDPTLRNRFSEILETSSTKLHPDVPTDKNLKPNPNWNQGKTVVKSDKLVYVDLLREEPDAKTDTNVSKPSFAAESVGQSAEPPKPSVEPALQQHRDFIALREELGRISDFHETYTFKQPVFTVSKDSVLAGTNKENLGLPVSTPFLEPPLGSDGPAVTFGKTQEDPKPFCVGSAPPSVDVTPTYTKDGADEAESNDGKVLKPKPSKLAKRIANSAGYVGDRFKCVTTELYADSSQLSREQRALQMEGLQEDSILCLPAAYCERAMMRFSELEMKEREGGHPATKDSEMCKFSPADWERLKGNQDKKPKSVTLEEAIAEQNESERCEYSVGNKHRDPFEAPEDKDLPVEKYFVERQPVSEPPADQVASDMPHSPTLRVDRKRKVSGDSSHTETTAEEVPEDPLLKAKRRRVSKDDWPEREMTNSSSNHLEDPHYSELTNLKVCIELTGLHPKKQRHLLHLRERWEQQVSAADGKPGRQSRKEVTQATQPEAIPQGTNITEEKPGRKRAEAKGNRSWSEESLKPSDNEQGLPVFSGSPPMKSLSSTSAGGKKQAQPSCAPASRPPAKQQKIKENQKTDVLCADEEEDCQAASLLQKYTDNSEKPSGKRLCKTKHLIPQESRRGLPLTGEYYVENADGKVTVRRFRKRPEPSSDYDLSPAKQEPKPFDRLQQLLPASQSTQLPCSSSPQETTQSRPMPPEARRLIVNKNAGETLLQRAARLGYEEVVLYCLENKICDVNHRDNAGYCALHEACARGWLNIVRHLLEYGADVNCSAQDGTRPLHDAVENDHLEIVRLLLSYGADPTLATYSGRTIMKMTHSELMEKFLTDYLNDLQGRNDDDASGTWDFYGSSVCEPDDESGYDVLANPPGPEDQDDDDDAYSDVFEFEFSETPLLPCYNIQVSVAQGPRNWLLLSDVLKKLKMSSRIFRCNFPNVEIVTIAEAEFYRQVSASLLFSCSKDLEAFNPESKELLDLVEFTNEIQTLLGSSVEWLHPSDLASDNYW

SEQ ID NO: 10321 - protein, 1703 aa, Homo sapiens
MLSATPLYGNVHSWMNSERVRMCGASEDRKILVNDGDASKARLELREENPLNHNVVDASTAHRIDGLAALSMDRTGLIREGLRVPGNIVYSSLCGLGSEKGREAATSTLGGLGFSSERNPEMQFKPNTPETVEASAVSGKPPNGFSAIYKTPPGIQKSAVATAEALGLDRPASDKQSPLNINGASYLRLPWVNPYMEGATPAIYPFLDSPNKYSLNMYKALLPQQSYSLAQPLYSPVCTNGERFLYLPPPHYVGPHIPSSLASPMRLSTPSASPAIPPLVHCADKSLPWKMGVSPGNPVDSHAYPHIQNSKQPRVPSAKAVTSGLPGDTALLLPPSPRPSPRVHLPTQPAADTYSEFHKHYARISTSPSVALSKPYMTVSSEFPAARLSNGKYPKAPEGGEGAQPVPGHARKTAVQDRKDGSSPPLLEKQTVTKDVTDKPLDLSSKVVDVDASKADHMKKMAPTVLVHSRAGSGLVLSGSEIPKETLSPPGNGCAIYRSEIISTAPSSWVVPGPSPNEENNGKSMSLKNKALDWAIPQQRSSSCPRMGGTDAVITNVSGSVSSAGRPASASPAPNANADGTKTSRSSVETTPSVIQHVGQPPATPAKHSSSTSSKGAKASNPEPSFKANENGLPPSSIFLSPNEAFRSPPIPYPRSYLPYPAPEGIAVSPLSLHGKGPVYPHPVLLPNGSLFPGHLAPKPGLPYGLPTGRPEFVTYQDALGLGMVHPMLIPHTPIEITKEEKPERRSRSHERARYEDPTLRNRFSEILETSSTKLHPDVPTDKNLKPNPNWNQGKTVVKSDKLVYVDLLREEPDAKTDTNVSKPSFAAESVGQSAEPPKPSVEPALQQHRDFIALREELGRISDFHETYTFKQPVFTVSKDSVLAGTNKENLGLPVSTPFLEPPLGSDGPAVTFGKTQEDPKPFCVGSAPPSVDVTPTYTKDGADEAESNDGKVLKPKPSKLAKRIANSAGYVGDRFKCVTTELYADSSQLSREQRALQRAMMRFSELEMKEREGGHPATKDSEMCKFSPADWERLKGNQDKKPKSVTLEEAIAEQNESERCEYSVGNKHRDPFEAPEDKDLPVEKYFVERQPVSEPPADQVASDMPHSPTLRVDRKRKVSGDSSHTETTAEEVPEDPLLKAKRRRVSKGLHPKKQRHLLHLRERWEQQVSAADGKPGRQSRKEVTQATQPEAIPQGTNITEEKPGRKRAEAKGNRSWSEESLKPSDNEQGLPVFSGSPPMKSLSSTSAGGKKQAQPSCAPASRPPAKQQKIKENQKTDVLCADEEEDCQAASLLQKYTDNSEKPSGKRLCKTKHLIPQESRRGLPLTGEYYVENADGKVTVRRFRKRPEPSSDYDLSPAKQEPKPFDRLQQLLPASQSTQLPCSSSPQETTQSRPMPPEARRLIVNKNAGETLLQRAARLGYEEVVLYCLENKICDVNHRDNAGYCALHEACARGWLNIVRHLLEYGADVNCSAQDGTRPLHDAVENDHLEIVRLLLSYGADPTLATYSGRTIMKMTHSELMEKFLTDYLNDLQGRNDDDASGTWDFYGSSVCEPDDESGYDVLANPPGPEDQDDDDDAYSDVFEFEFSETPLLPCYNIQVSVAQGPRNWLLLSDVLKKLKMSSRIFRCNFPNVEIVTIAEAEFYRQVSASLLFSCSKDLEAFNPESKELLDLVEFTNEIQTLLGSSVEWLHPSDLASDNYW

SEQ ID NO: 10322 - protein, 801 aa, Homo sapiens
MLRNSTFKNMQRRHTTLREKGRRQAIRGPAYMFNEKGTSLTPEEERFLDSAEYGNIPVVRKMLEESKTLNFNCVDYMGQNALQLAVGNEHLEVTELLLKKENLARVGDALLLAISKGYVRIVEAILNHPAFAQGQRLTLSPLEQELRDDDFYAYDEDGTRFSHDITPIILAAHCQEYEIVHILLLKGARIERPHDYFCKCNECTEKQRKDSFSHSRSRMNAYKGLASAAYLSLSSEDPVLTALELSNELARLANIETEFKFVAHPNCQQQLLTMWYENLSGLRQQSIAVKFLAVFGVSIGLPFLAIAYWIAPCSKLGRTLRSPFMKFVAHAVSFTIFLGLLVVNASDRFEGVKTLPNETFTDYPKQIFRVKTTQFSWTEMLIMKWVLGMIWSECKEIWEEGPREYVLHLWNLLDFGMLSIFVASFTARFMAFLKATEAQLYVDQHVQDDTLHNVSLPPEVAYFTYARDKWWPSDPQIISEGLYAIAVVLSFSRIAYILPANESFGPLQISLGRTVKDIFKFMVIFIMVFVAFMIGMFNLYSYYRGAKYNPAFTTVEESFKTLFWSIFGLSEVISVVLKYDHKFIENIGYVLYGVYNVTMVVVLLNMLIAMINNSYQEIEEDADVEWKFARAKLWLSYFDEGRTLPAPFNLVPSPKSFYYLIMRIKMCLIKLCKSKAKSCENDLEMGMLNSKFKKTRYQAGMRNSENLTANNTLSKPTRYQKIMKRLIKRYVLKAQVDRENDEVNEGELKEIKQDISSLRYELLEEKSQATGELADLIQQLSEKFGKNLNKDHLRVNKGKDI

SEQ ID NO: 10323 - protein, 1436 aa, Homo sapiens
MLHLSAAPPAPPPEVTATARPCLCSVGRRGDGGKMAAAGALERSFVELSGAERERPRHFREFTVCSIGTANAVAGAVKYSESAGGFYYVESGKLFSVTRNRFIHWKTSGDTLELMEESLDINLLNNAIRLKFQNCSVLPGGVYVSETQNRVIILMLTNQTVHRLLLPHPSRMYRSELVVDSQMQSIFTDIGKVDFTDPCNYQLIPAVPGISPNSTASTAWLSSDGEALFALPCASGGIFVLKLPPYDIPGMVSVVELKQSSVMQRLLTGWMPTAIRGDQSPSDRPLSLAVHCVEHDAFIFALCQDHKLRMWSYKEQMCLMVADMLEYVPVKKDLRLTAGTGHKLRLAYSPTMGLYLGIYMHAPKRGQFCIFQLVSTESNRYSLDHISSLFTSQETLIDFALTSTDIWALWHDAENQTVVKYINFEHNVAGQWNPVFMQPLPEEEIVIRDDQDPREMYLQSLFTPGQFTNEALCKALQIFCRGTERNLDLSWSELKKEVTLAVENELQGSVTEYEFSQEEFRNLQQEFWCKFYACCLQYQEALSHPLALHLNPHTNMVCLLKKGYLSFLIPSSLVDHLYLLPYENLLTEDETTISDDVDIARDVICLIKCLRLIEESVTVDMSVIMEMSCYNLQSPEKAAEQILEDMITIDVENVMEDICSKLQEIRNPIHAIGLLIREMDYETEVEMEKGFNPAQPLNIRMNLTQLYGSNTAGYIVCRGVHKIASTRFLICRDLLILQQLLMRLGDAVIWGTGQLFQAQQDLLHRTAPLLLSYYLIKWGSECLATDVPLDTLESNLQHLSVLELTDSGALMANRFVSSPQTIVELFFQEVARKHIISHLFSQPKAPLSQTGLNWPEMITAITSYLLQLLWPSNPGCLFLECLMGNCQYVQLQDYIQLLHPWCQVNVGSCRFMLGRCYLVTGEGQKALECFCQAASEVGKEEFLDRLIRSEDGEIVSTPRLQYYDKVLRLLDVIGLPELVIQLATSAITEAGDDWKSQATLRTCIFKHHLDLGHNSQAYEALTQIPDSSRQLDCLRQLVVVLCERSQLQDLVEFPYVNLHNEVVGIIESRARAVDLMTHNYYELLYAFHIYRHNYRKAGTVMFEYGMRLGREVRTLRGLEKQGNCYLAALNCLRLIRPEYAWIVQPVSGAVYDRPGASPKRNHDGECTAAPTNRQIEILELEDLEKECSLARIRLTLAQHDPSAVAVAGSSSAEEMVTLLVQAGLFDTAISLCQTFKLPLTPVFEGLAFKCIKLQFGGEAAQAEAWAWLAANQLSSVITTKESSATDEAWRLLSTYLERYKVQNNLYHHCVINKLLSHGVPLPNWLINSYKKVDAAELLRLYLNYDLLEEAVDLVSEYVDAVLGKGHQYFGIEFPLSATAPMVWLPYSSIDQLLQALGENSANSHNIALSQKILDKLEDYQQKVDKATRDLLYRRTL

SEQ ID NO: 10324 - protein, 773 aa, Homo sapiens
MAECGASGSGSSGDSLDKSITLPPDEIFRNLENAKRFAIDIGGSLTKLAYYSTVQHKVAKVRSFDHSGKDTEREHEPPYEISVQEEITARLHFIKFENTYIEACLDFIKDHLVNTETKVIQATGGGAYKFKDLIEEKLRLKVDKEDVMTCLIKGCNFVLKNIPHEAFVYQKDSDPEFRFQTNHPHIFPYLLVNIGSGVSIVKVETEDRFEWVGGSSIGGGTFWGLGALLTKTKKFDELLHLASRGQHSNVDMLVRDVYGGAHQTLGLSGNLIASSFGKSATADQEFSKEDMAKSLLHMISNDIGQLACLHARLHSLDRVYFGGFFIRGHPVTMRTITYSINFFSKGEVQALFLRHEGYLGAIGAFLKGAEQDNPNQYSWGENYAGSSGLMSASPELGPAQRARSGTFDLLEMDRLERPLVDLPLLLDPPSYVPDTVDLTDDALARKYWLTCFEEALDGVVKRAVASQPDSVDAAERAEKFRQKYWNKLQTLRQQPFAYGTLTVRSLLDTREHCLNEFNFPDPYSKVKQRENGVALRCFPGVVRSLDALGWEERQLALVKGLLAGNVFDWGAKAVSAVLESDPYFGFEEAKRKLQERPWLVDSYSEWLQRLKGPPHKCALIFADNSGIDIILGVFPFVRELLLRGTEVILACNSGPALNDVTHSESLIVAERIAGMDPVVHSALQEERLLLVQTGSSSPCLDLSRLDKGLAALVRERGADLVVIEGMGRAVHTNYHAALRCESLKLAVIKNAWLAERLGGRLFSVIFKYEVPAE

SEQ ID NO: 10325 - protein, 1187 aa, Homo sapiens
MAKPYEFNWQKEVPSFLQEGAVFDRYEEESFVFEPNCLFKVDEFGFFLTWRSEGKEGQVLECSLINSIRSGAIPKDPKILAALEAVGKSENDLEGRIVCVCSGTDLVNISFTYMVAENPEVTKQWVEGLRSIIHNFRANNVSPMTCLKKHWMKLAFMTNTNGKIPVRSITRTFASGKTEKVIFQALKELGLPSGKNDEIEPTAFSYEKFYELTQKICPRTDIEDLFKKINGDKTDYLTVDQLVSFLNEHQRDPRLNEILFPFYDAKRAMQIIEMYEPDEDLKKKGLISSDGFCRYLMSDENAPVFLDRLELYQEMDHPLAHYFISSSHNTYLTGRQFGGKSSVEMYRQVLLAGCRCVELDCWDGKGEDQEPIITHGKAMCTDILFKDVIQAIKETAFVTSEYPVILSFENHCSKYQQYKMSKYCEDLFGDLLLKQALESHPLEPGRALPSPNDLKRKILIKNKRLKPEVEKKQLEALRSMMEAGESASPANILEDDNEEEIESADQEEEAHPEFKFGNELSADDLGHKEAVANSVKKASDDLEHENNKKGLVTVEDEQAWMASYKYVGATTNIHPYLSTMINYAQPVKFQGFHVAEERNIHYNMSSFNESVGLGYLKTHAIEFVNYNKRQMSRIYPKGGRVDSSNYMPQIFWNAGCQMVSLNYQTPDLAMQLNQGKFEYNGSCGYLLKPDFMRRPDRTFDPFSETPVDGVIAATCSVQVISGQFLSDKKIGTYVEVDMYGLPTDTIRKEFRTRMVMNNGLNPVYNEESFVFRKVILPDLAVLRIAVYDDNNKLIGQRILPLDGLQAGYRHISLRNEGNKPLSLPTIFCNIVLKTYVPDGFGDIVDALSDPKKFLSITEKRADQMRAMGIETSDIADVPSDTSKNDKKGKANTAKANVTPQSSSELRPTTTAALASGVEAKKGIELIPQVRIEDLKQMKAYLKHLKKQQKELNSLKKKHAKEHSTMQKLHCTQVDKIVAQYDKEKSTHEKILEKAMKKKGGSNCLEMKKETEIKIQTLTSDHKSKVKEIVAQHTKEWSEMINTHSAEEQEIRDLHLSQQCELLKKLLINAHEQQTQQLKLSHDRESKEMRAHQAKISMENSKAISQDKSIKNKAERERRVRELNSSNTKKFLEERKRLAMKQSKEMDQLKKVQLEHLEFLEKQNEQAKEMQQMVKLEAEMDRRPATVV

SEQ ID NO: 10326 - protein, 146 aa, Homo sapiens
MSSCSNVCGSRQAQAAAEGGYQRYGVRSYLHQFYEDCTASIWEYEDDFQIQRSPNRWSSVFWKQELGFHTSSHSQEWNRKLQHKNCPRCCFGSLSPPGEALLCRHWDWPYHPKAPGCSAEPGGGPFQSIPTLLCGPKRGCFASSEL

SEQ ID NO: 10327 - protein, 1416 aa, Homo sapiens
MSGPWPSPDSRTKGTVAWLAEVLLWVGGSVVLSSEWQLGPLVERCMGAMQEGMQMVKLRGGSKGLVRFYYLDEHRSCIRWRPSRKNEKAKISIDSIQEVSEGRQSEVFQRYPDGSFDPNCCFSIYHGSHRESLDLVSTSSEVARTWVTGLRYLMAGISDEDSLARRQRTRDQWLKQTFDEADKNGDGSLSIGEVLQLLHKLNVNLPRQRVKQMFREADTDDHQGTLGFEEFCAFYKMMSTRRDLYLLMLTYSNHKDHLDAASLQRFLQVEQKMAGVTLESCQDIIEQFEPCPENKSKGLLGIDGFTNYTRSPAGDIFNPEHHHVHQDMTQPLSHYFITSSHNTYLVGDQLMSQSRVDMYAWVLQAGCRCVEVDCWDGPDGEPIVHHGYTLTSKILFKDVIETINKYAFIKNEYPVILSIENHCSVIQQKKMAQYLTDILGDKLDLSSVSSEDATTLPSPQMLKGKILVKGKKLPANISEDAEEGEVSDEDSADEIDDDCKLLNGDASTNRKRVENTAKRKLDSLIKESKIRDCEDPNNFSVSTLSPSGKLGRKSKAEEDVESGEDAGASRRNGRLVVGSFSRRKKKGSKLKKAASVEEGDEGQDSPGGQSRGATRQKKTMKLSRALSDLVKYTKSVATHDIEMEAASSWQVSSFSETKAHQILQQKPAQYLRFNQQQLSRIYPSSYRVDSSNYNPQPFWNAGCQMVALNYQSEGRMLQLNRAKFSANGGCGYVLKPGCMCQGVFNPNSEDPLPGQLKKQLVLRIISGQQLPKPRDSMLGDRGEIIDPFVEVEIIGLPVDCSREQTRVVDDNGFNPTWEETLVFMVHMPEIALVRFLVWDHDPIGRDFIGQRTLAFSSMMPGYRHVYLEGMEEASIFVHVAVSDISGKVKQALGLKGLFLRGPKPGSLDSHAAGRPPARPSVSQRILRRTASAPTKSQKPGRRGFPELVLGTRDTGSKGVADDVVPPGPGPAPEAPAQEGPGSGSPRDTRPLSTQRPLPPLCSLETIAEEPAPGPGPPPPAAVPTSSSQGRPPYPTGPGANVASPLEDTEEPRDSRPRPCNGEGAGGAYERAPGSQTDGRSQPRTLGHLPVIRRVKSEGQVPTEPLGGWRPLAAPFPAPAVYSDATGSDPLWQRLEPCGHRDSVSSSSSMSSSDTVIDLSLPSLGLGRSRENLAGAHMGRLPPRPHSASAARPDLPPVTKSKSNPNLRATGQRPPIPDELQPRSLAPRMAGLPFRPPWGCLSLVGVQDCPVAAKSKSLGDLTADDFAPSFEGGSRRLSHSLGLPGGTRRVSGPGVRRDTLTEQLRWLTVFQQAGDITSPTSLGPAGEGVAGGPGFVRRSSSRSHSRVRAIASRARQAQERQQRLQGLGRQGPPEEERGTPEGACSVGHEGSVDAPAPSKGALGPASAAAENLVLLRL

SEQ ID NO: 10328 - protein, 1591 aa, Homo sapiens
MSLLCVRVKRAKFQGSPDKFNTYVTLKVQNVKSTTVAVRGDQPSWEQDFMFEISRLDLGLSVEVWNKGLIWDTMVGTVWIALKTIRQSDEEGPGEWSTLEAETLMKDDEICGTRNPTPHKILLDTRFELPFDIPEEEARYWTYKWEQINALGADNEYSSQEESQRKPLPTAAAQCSFEDPDSAVDDRDSDYRSETSNSFPPPYHTASQPNASVHQFPVPVRSPQQLLLQGSSRDSCNDSMQSYDLDYPERRAISPTSSSRYGSSCNVSQGSSQLSELDQYHEQDDDHRETDSIHSCHSSHSLSRDGQAGFGEQEKPLEVTGQAEKEAACEPKEMKEDATTHPPPDLVLQKDHFLGPQESFPEENASSPFTQARAHWIRAVTKVRLQLQEIPDDGDPSLPQWLPEGPAGGLYGIDSMPDLRRKKPLPLVSDLSLVQSRKAGITSAMATRTSLKDEELKSHVYKKTLQALIYPISCTTPHNFEVWTATTPTYCYECEGLLWGIARQGMRCSECGVKCHEKCQDLLNADCLQRAAEKSCKHGAEDRTQNIIMAMKDRMKIRERNKPEIFEVIRDVFTVNKAAHVQQMKTVKQSVLDGTSKWSAKITITVVCAQGLQAKDKTGSSDPYVTVQVSKTKKRTKTIFGNLNPVWEEKFHFECHNSSDRIKVRVWDEDDDIKSRVKQRLKRESDDFLGQTIIEVRTLSGEMDVWYNLEKRTDKSAVSGAIRLQISVEIKGEEKVAPYHVQYTCLHENLFHYLTDIQGSGGVRIPEARGDDAWKVYFDETAQEIVDEFAMRYGIESIYQAMTHFACLSSKYMCPGVPAVMSTLLANINAYYAHTTASTNVSASDRFAASNFGKERFVKLLDQLHNSLRIDLSTYRNNFPAGSPERLQDLKSTVDLLTSITFFRMKVQELQSPPRASQVVKDCVKACLNSTYEYIFNNCHDLYSRQYQLKQELPPEEQGPSIRNLDFWPKLITLIVSIIEEDKNSYTPVLNQFPQELNVGKVSAEVMWHLFAQDMKYALEEHEKDHLCKSADYMNLHFKVKWLHNEYVRDLPVLQGQVPEYPAWFEQFVLQWLDENEDVSLEFLRGALERDKKDGFQQTSEHALFSCSVVDVFTQLNQSFEIIRKLECPDPSILAHYMRRFAKTIGKVLMQYADILSKDFPAYCTKEKLPCILMNNVQQLRVQLEKMFEAMGGKELDLEAADSLKELQVKLNTVLDELSMVFGNSFQVRIDECVRQMADILGQVRGTGNASPDARASAAQDADSVLRPLMDFLDGNLTLFATVCEKTVLKRVLKELWRVVMNTMERMIVLPPLTDQTGTQLIFTAAKELSHLSKLKDHMVREETRNLTPKQCAVLDLALDTIKQYFHAGGNGLKKTFLEKSPDLQSLRYALSLYTQTTDTLIKTFVRSQTTQGSGVDDPVGEVSIQVDLFTHPGTGEHKVTVKVVAANDLKWQTAGMFRPFVEVTMVGPHQSDKKRKFTTKSKSNNWAPKYNETFHFLLGNEEGPESYELQICVKDYCFAREDRVLGLAVMPLRDVTAKGSCACWCPLGRKIHMDETGLTILRILSQRSNDEVAREFVKLKSESRSTEEGS

SEQ ID NO: 10329 - protein, 1197 aa, Homo sapiens [sequence omitted]

SEQ ID NO: 10330 - protein, 1194 aa, Homo sapiens
MAKPYEFNWQKEVPSFLQEGAVFDRYEEESFVFEPNCLFKVDEFGFFLTWRSEGKEGQVLECSLINSIRSGAIPKDPKILAALEAVGKSENDLEGRIVCVCSGTDLVNISFTYMVAENPEVTKQWVEGLRSIIHNFRANNVSPMTCLKKHWMKLAFMTNTNGKIPVRSITRTFASGKTEKVIFQALKELGLPSGKNDEIEPTAFSYEKFYELTQKICPRTDIEDLFKKINGDKTDYLTVDQLVSFLNEHQRDPRLNEILFPFYDAKRAMQIIEMYEPDEDLKKKGLISSDGFCRYLMSDENAPVFLDRLELYQEMDHPLAHYFISSSHNTYLTGRQFGGKSSVEMYRQVLLAGCRCVELDCWDGKGEDQEPIITHGKAMCTDILFKDVIQAIKETAFVTSEYPVILSFENHCSKYQQYKMSKYCEDLFGDLLLKQALESHPLEPGRALPSPNDLKRKILIKNKRLKPEVEKKQLEALRSMMEAGESASPANILEDDNEEEIESADQEEEAHPEFKFGNELSADDLGHKEAVANSVKKGLVTVEDEQAWMASYKYVGATTNIHPYLSTMINYAQPVKFQGFHVAEERNIHYNMSSFNESVGLGYLKTHAIEFVNYNKRQMSRIYPKGGRVDSSNYMPQIFWNAGCQMVSLNYQTPDLAMQLNQGKFEYNGSCGYLLKPDFMRRPDRTFDPFSETPVDGVIAATCSVQVISGQFLSDKKIGTYVEVDMYGLPTDTIRKEFRTRMVMNNGLNPVYNEESFVFRKVILPDLAVLRIAVYDDNNKLIGQRILPLDGLQAGYRHISLRNEGNKPLSLPTIFCNIVLKTYVPDGFGDIVDALSDPKKFLSITEKRADQMRAMGIETSDIADVPSDTSKNDKKGKANTAKANVTPQSSSELRPTTTAALASGVEAKKGIELIPQVRIEDLKQMKAYLKHLKKQQKELNSLKKKHAKEHSTMQKLHCTQVDKIVAQYDKEKSTHEKILEKAMKKKGGSNCLEMKKETEIKIQTLTSDHKSKVKEIVAQHTKEWSEMINTHSAEEQEIRDLHLSQQCELLKKLLINAHEQQTQQLKLSHDRESKEMRAHQAKISMENSKAISQDKSIKNKAERERRVRELNSSNTKKFLEERKRLAMKQSKEMDQLKKVQLEHLEFLEKQNEQLLKSCHAVSQTQGEGDAADGEIGSRDGPQTSNSSMKLQNAN

SEQ ID NO: 10331 - protein, 156 aa, Homo sapiens
MAAAGEGTPSSRGPRRDPPRRPPRNGHGKLLFKDGSYYEGAFVDGEITGEGRRHWAWSGDTFSGQFVLGEPQGYGVMEYKAGGCYEGEVSHGMREGHGFLVDRDGQVYQGSFHDNKRHGPGQMLFQNGDKYDGDWVRDRRQGHGVLRCADGSTYKL

SEQ ID NO: 10332 - protein, 1009 aa, Homo sapiens
MSLAFKIFFPQTLRALSRKELCLFRKHHWRDVRQFSQWSETDLLHGHPLFLRRKPVLSFQGSHLRSRATYLVFLPGLHVGLCSGPCEMAEQRFCVDYAKRGTAGCKKCKEKIVKGVCRIGKVVPNPFSESGGDMKEWYHIKCMFEKLERARATTKKIEDLTELEGWEELEDNEKEQITQHIADLSSKAAGTPKKKAVVQAKLTTTGQVTSPVKGASFVTSTNPRKFSGFSAKPNNSGEAPSSPTPKRSLSSSKCDPRHKDCLLREFRKLCAMVADNPSYNTKTQIIQDFLRKGSAGDGFHGDVYLTVKLLLPGVIKTVYNLNDKQIVKLFSRIFNCNPDDMARDLEQGDVSETIRVFFEQSKSFPPAAKSLLTIQEVDEFLLRLSKLTKEDEQQQALQDIASRCTANDLKCIIRLIKHDLKMNSGAKHVLDALDPNAYEAFKASRNLQDVVERVLHNAQEVEKEPGQRRALSVQASLMTPVQPMLAEACKSVEYAMKKCPNGMFSEIKYDGERVQVHKNGDHFSYFSRSLKPVLPHKVAHFKDYIPQAFPGGHSMILDSEVLLIDNKTGKPLPFGTLGVHKKAAFQDANVCLFVFDCIYFNDVSLMDRPLCERRKFLHDNMVEIPNRIMFSEMKRVTKALDLADMITRVIQEGLEGLVLKDVKGTYEPGKRHWLKVKKDYLNEGAMADTADLVVLGAFYGQGSKGGMMSIFLMGCYDPGSQKWCTVTKCAGGHDDATLARLQNELDMVKISKDPSKIPSWLKVNKIYYPDFIVPDPKKAAVWEITGAEFSKSEAHTADGISIRFPRCTRIRDDKDWKSATNLPQLKELYQLSKEKADFTVVAGDEGSSTTGGSSEENKGPSGSAVSRKAPSKPSASTKKAEGKLSNSNSKDGNMQTAKPSAMKVGEKLATKSSPVKVGEKRKAADETLCQTKVLLDIFTGVRLYLPPSTPDFSRLRRYFVAFDGDLVQEFDMTSATHVLGSRDKNPAAQQVSPEWIWACIRKRRLVAPC

SEQ ID NO: 10333 - protein, 350 aa, Homo sapiens
MAAAGEGTPSSRGPRRDPPRRPPRNGYGVYVYPNSFFRYEGEWKAGRKHGHGKLLFKDGSYYEGAFVDGEITGEGRRHWAWSGDTFSGQFVLGEPQGYGVMEYKAGGCYEGEVSHGMREGHGFLVDRDGQVYQGSFHDNKRHGPGQMLFQNGDKYDGDWVRDRRQGHGVLRCADGSTYKGQWHSDVFSGLGSMAHCSGVTYYGLWINGHPAEQATRIVILGPEVMEVAQGSPFSVNVQLLQDHGEIAKSESGRVLQISAGVRYVQLSAYSEVNFFKVDRDNQETLIQTPFGFECIPYPVSSPAAGVPGPRAAKGGAEADVPLPRGDLELHLGALHGQEDTPGGLLGSSLF

SEQ ID NO: 10334 - protein, 497 aa, Homo sapiens
MAAAGEGTPSSRGPRRDPPRRPPRNGYGVYVYPNSFFRYEGEWKAGRKHGHGKLLFKDGSYYEGAFVDGEITGEGRRHWAWSGDTFSGQFVLGEPQGYGVMEYKAGGCYEGEVSHGMREGHGFLVDRDGQVYQGSFHDNKRHGPGQMLFQNGDKYDGDWVRDRRQGHGVLRCADGSTYKGQWHSDVFSGLGSMAHCSGVTYYGLWINGHPAEQATRIVILGPEVMEVAQGSPFSVNVQLLQDHGEIAKSESGRVLQISAGVRYVQLSAYSEVNFFKVDRDNQETLIQTPFGFECIPYPVSSPAAGVPGPRAAKGGAEADVPLPRGDLELHLGALHGQEDTPGGLLARGHAPHCPGACQRVEQGCAEFTDVLLGPPPPGYHPFLFLDSLHKKAGGRSRGGLHPRGTPPTAQEPPGGSRPEGRATEEQAAAAHLGEYVLMIRDVTTPPFLGRRLPPAFKHLRVVAKRAGQPPHVLEEGPEASSSWQAAHSCTPEPPAPR

SEQ ID NO: 10335 - protein, 464 aa, Homo sapiens
MGSPAHRPALLLLLPPLLLLLLLRVPPSRSFPGSGDSPLEDDEVGYSHPRYKDTPWCSPIKVKYGDVYCRAPQGGYYKTALGTRCDIRCQKGYELHGSSLLICQSNKRWSDKVICKQKRCPTLAMPANGGFKCVDGAYFNSRCEYYCSPGYTLKGERTVTCMDNKAWSGRPASCVDMEPPRIKCPSVKERIAEPNKLTVRVSWETPEGRDTADGILTDVILKGLPPGSNFPEGDHKIQYTVYDRAENKGTCKFRVKVRVKRCGKLNAPENGYMKCSSDGDNYGATCEFSCIGGYELQGSPARVCQSNLAWSGTEPTCAAMNVNVGVRTAAALLDQFYEKRRLLIVSTPTARNLLYRLQLGMLQQAQCGLDLRHITVVELVGVFPTLIGRIGAKIMPPALALQLRLLLRIPLYSFSMVLVDKHGMDKERYVSLVMPVALFNLIDTFPLRKEEMVLQAEMSQTCNT

SEQ ID NO: 10336 - protein, 522 aa, Homo sapiens
MKAMPWNWTCLLSHLLMVGMGSSTLLTRQPAPLSQKQRSFVTFRGEPAEGFNHLVVDERTGHIYLGAVNRIYKLSSDLKVLVTHETGPDEDNPKCYPPRIVQTCNEPLTTTNNVNKMLLIDYKENRLIACGSLYQGICKLLRLEDLFKLGEPYHKKEHYLSGVNESGSVFGVIVSYSNLDDKLFIATAVDGKPEYFPTISSRKLTKNSEADGMFAYVFHDEFVASMIKIPSDTFTIIPDFDIYYVYGFSSGNFVYFLTLQPEMVSPPGSTTKEQVYTSKLVRLCKEDTAFNSYVEVPIGCERSGVEYRLLQAAYLSKAGAVLGRTLGVHPDDDLLFTVFSKGQKRKMKSLDESALCIFILKQINDRIKERLQSCYRGEGTLDLAWLKVKDIPCSSALLTIDDNFCGLDMNAPLGVSDMVRGIPVFTEDRDRMTSVIAYVYKNHSLAFVGTKSGKLKKSFGTGPQGGITQEWIGVEGDPPGANIASQEQMLCVYLQCSSHKAISDQRVQPLLCCFLNVPGNSS

SEQ ID NO: 10337 - protein, 387 aa, Homo sapiens
MGAFLDKPKTEKHNAHGAGNGLRYGLSSMQGWRVEMEDAHTAVVGIPHGLEDWSFFAVYDGHAGSRVANYCSTHLLEHITTNEDFRAAGKSGSALELSVENVKNGIRTGFLKIDEYMRNFSDLRNGMDRSGSTAVGVMISPKHIYFINCGDSRAVLYRNGQVCFSTQDHKPCNPREKERIQNAGGSVMIQRVNGSLAVSRALGDYDYKCVDGKGPTEQLVSPEPEVYEILRAEEDEFIILACDGIWDVMSNEELCEYVKSRLEVSDDLENVCNWVVDTCLHKGSRDNMSIVLVCFSNAPKVSDEAVKKDSELDKHLESRVEEIMEKSGEEGMPDLAHVMRILSAENIPNLPPGGGLAGKRNVIEAVYSRLNPHRESDGGAGDLEDPW

SEQ ID NO: 10338 - protein, 725 aa, Homo sapiens
MHPEPSEPATGGAAELDCAQEPGVEESAGDHGSAGRGGCKEEINDPKEICVGSSDTSYHSQQKQSGDNGSGGHFAHPREDREDRGPRMTKSSLQKLCKQHKLYITPALNDTLYLHFKGFDRIENLEEYTGLRCLWLQSNGIQKIENLEAQTELRCLFLQMNLLRKIENLEPLQKLDALNLSNNYIKTIENLSCLPVLNTLQMAHNHLETVEDIQHLQECLRLCVLDLSHNKLSDPEILSILESMPDLRVLNLMGNPVIRQIPNYRRTVTVRLKHLTYLDDRPVFPKDRACAEAWARGGYAAEKEERQQWESRERKKITDSIEALAMIKQRAEERKRQRESQERGEMTSSDDGENVPASAEGKEEPPGDRETRQKMELFVKESFEAKDELCPEKPSGEEPPVEAKREDGGPEPEGTLPAETLLLSSPVEVKGEDGDGEPEGTLPAEAPPPPPPVEVKGEDGDQEPEGTLPAETLLLSPPVKVKGEDGDREPEGTLPAEAPPPPPLGAAREEPTPQAVATEGVFVTELDGTRTEDLETIRLETKETFCIDDLPDLEDDDETGKSLEDQNMCFPKIEVISSLSDDSDPELDYTSLPVLENLPTDTLSNIFAVSKDTSKAARVPFTDIFKKEAKRDLEIRKQDTKSPRPLIQELSDEDPSGQLLMPPTCQRDAAPLTSSGDRDSDFLAASSPVPTESAATPPETCVGVAQPSQALPTWDLTAFPAPKAS

SEQ ID NO: 10339 - protein, 342 aa, Homo sapiens
MDILKSEILRKRQLVEDRNLLVENKKYFKRSELAKKEEEAYFERCGYKIQPKEEDQKPLTSSNPVLELELAEEKLPMTLSRQEVIRRLRERGEPIRLFGETDYDAFQRLRKIEILTPEVNKGLRNDLKAALDKIDQQYLNEIVGGQEPGEEDTQNDLKVHEENTTIEELEALGESLGKGDDHKDMDIITKFLKFLLGVWAKELNAREDYVKRSVQGKLNSATQKQTESYLRPLFRKLRKRNLPADIKESITDIIKFMLQREYVKANDAYLQMAIGNAPWPIGVTMVGIHARTGREKIFSKHVAHVLNDETQRKYIQGLKRLMTICQKHFPTDPSKCVEYNAL

SEQ ID NO: 10340 - protein, 452 aa, Homo sapiens [sequence omitted]

SEQ ID NO: 10341 - protein, 317 aa, Homo sapiens
GINGSEGDGAEIAEKFVFFIGSKNGGKTTIILRCLDRDEPPKPTLALEYTYGRRAKGHNTPKDIAHFWELGGGTSLLDLISIPITGDTLRTFSLVLVLDLSKPNDLWPTMENLLQATKSHVDKVIMKLGKTNAKAVSEMRQKIWNNMPKDHPDHELIDPFPVPLVIIGSKYDVFQDFESEKRKVICKTLRFVAHYYGASLMFTSKSEALLLKIRGVINQLAFGIDKSKSICVDQNKPLFITAGLDSFGQIGSPPVPENDIGKLHAHSPMELWKKVYEKLFPPKSINTLKDIKDPARDPQYAENEVDEMRIQKDLVLS

SEQ ID NO: 10342 - protein, 570 aa, Homo sapiens
MGNWAVNEGLSIFVILVWLGLNVFLFVWYYRVYDIPPKFFYTRKLLGSALALARAPAACLNFNCMLILLPVCRNLLSFLRGSSACCSTRVRRQLDRNLTFHKMVAWMIALHSAIHTIAHLFNVEWCVNARVNNSDPYSVALSELGDRQNESYLNFARKRIKNPEGGLYLAVTLLAGITGVVITLCLILIITSSTKTIRRSYFEVFWYTHHLFVIFFIGLAIHGAERIVRGQTAESLAVHNITVCEQKISEWGKIKECPIPQFAGNPPMTWKWIVGPMFLYLCERLVRFWRSQQKVVITKVVTHPFKTIELQMKKKGFKMEVGQYIFVKCPKVSKLEWHPFTLTSAPEEDFFSIHIRIVGDWTEGLFNACGCDKQEFQDAWKLPKIAVDGPFGTASEDVFSYEVVMLVGAGIGVTPFASILKSVWYKYCNNATNLKLKKIYFYWLCRDTHAFEWFADLLQLLESQMQERNNAGFLSYNIYLTGWDESQANHFAVHHDEEKDVITGLKQKTLYGRPNWDNEFKTIASQHPNTRIGVFLCGPEALAETLSKQSISNSESGPRGVHFIFNKENF

SEQ ID NO: 10343 - protein, 900 aa, Homo sapiens
MNREDRNVLRMKERERRNQEIQQGEDAFPPSSPLFAEPYKVTSKEDKLSSRIQSMLGNYDEMKDFIGDRSIPKLVAIPKPTVPPSADEKSNPNFFEQRHGGSHQSSKWTPVGPAPSTSQSQKRSSGLQSGHSSQRTSAGSSSGTNSSGQRHDRESYNNSGSSSRKKGQHGSEHSKSRSSSPGKPQAVSSLNSSHSRSHGNDHHSKEHQRSKSPRDPDANWDSPSRVPFSSGQHSTQSFPPSLMSKSNSMLQKPTAYVRPMDGQESMEPKLSSEHYSSQSHGNSMTELKPSSKAHLTKLKIPSQPLDASASGDVSCVDEILKEMTHSWPPPLTAIHTPCKTEPSKFPFPTKESQQSNFGTGEQKRYNPSKTSNGHQSKSMLKDDLKLSSSEDSDGEQDCDKTMPRSTPGSNSEPSHHNSEGADNSRDDSSSHSGSESSSGSDSESESSSSDSEANEPSQSASPEPEPPPTNKWQLDNWLNKVNPHKVSPASSVDSNIPSSQGYKKEGREQGTGNSYTDTSGPKETSSATPGRDSKTIQKGSESGRGRQKSPAQSDSTTQRRTVGKKQPKKAEKAAAEEPRGGLKIESETPVDLASSMPSSRHKAATKGSRKPNIKKESKSSPRPTAEKKKYKSTSKSSQKSREIIETDTSSSDSDESESLPPSSQTPKYPESNRTPVKPSSVEEEDSFFRQRMFSPMEEKELLSPLSEPDDRYPLIVKIDLNLLTRIPGKPYKETEPPKGEKKNVPEKHTREAQKQASEKVSNKGKRKHKNEDDNRASESKKPKTEDKNSAGHKPSSNRESSKQSAAKEKDLLPSPAGPVPSKDPKTEHGSRKRTISQSSSLKSSSNSNKETSGSSKNSSSTSKQKKTEGKTSSSSKEVKVKCWGPGAFENHSTCHVTFPG

SEQ ID NO: 10344 - protein, 388 aa, Homo sapiens
MDLCQKNETDLENAENNEIQFTEETEPTYTCPDGKSEKNHVYCLLDVSDITLEQDEKAKEFIIGTGWEEAVQGWGRTSPAACIWPRKIPKKARVGEGACSDCLVCVNLSHWSLQTKPPTEGGPEKDQSSPSQTQAAPQGPSTASRAISDICFPTYFRAEKKSLQIKEFIWCNKDWAIPGTNRGKASGNPSGGAHRGLSIPGPLTSRALLVLPPLKASLSNALDVLGKKSKNSFLQSEEKVLDVEKDGCVAYAYGLKTADGKGEKRASELAKHPMVNDTPSSPSPAAQISLLTDPEQRCLHWSLLSEKNLACPPDPSNVRYLAALQLLQKRGVQSYKSKFKAKEPRSPVITRKHVLPKAKQENRPQMLETKVFPRPVLPSLTHRKKKIK

SEQ ID NO: 10345 - protein, 444 aa, Homo sapiens
MKFPASVLASVFLFVAETTAALSLSSTYRSGGDRMWQALTLLFSLLPCALVQLTLLFVHRDLSRDRPLVLLLHLLQLGPLFRCFEVFCIYFQSGNNEEPYVSITKKRQMPKNGLSEEIEKEVGQAEGKLITHRSAFSRASVIQAFLGSAPQLTLQLYISVMQQDVTVGRSLLMTISLLSIVYGALRCNILAIKIKYDEYEVKVKPLAYVCIFLWRSFEIATRVVVLVLFTSVLKTWVVVIILINFFSFFLYPWILFWCSGSPFPENIEKALSRVGTTIVLCFLTLLYTGINMFCWSAVQLKIDSPDLISKSHNWYQLLVYYMIRFIENAILLLLWYLFKTDIYMYVCAPLLVLQLLIGYCTAILFMLVFYQFFHPCKKLFSSSVSEGFQRWLRCFCWACRQQKPCEPIGKEDLQSSRDRDETPSSSKTSPEPGQFLNAEDLCSA

SEQ ID NO: 10346 - protein, 1089 aa, Homo sapiens
MQKASVLLFLAWVCFLFYAGIALFTSGFLLTRLELTNHSSCQEPPGPGSLPWGSQGKPGACWMASRFSRVVLVLIDALRFDFAQPQHSHVPREPPVSLPFLGKLSSLQRILEIQPHHARLYRSQVDPPTTTMQRLKALTTGSLPTFIDAGSNFASHAIVEDNLIKQLTSAGRRVVFMGDDTWKDLFPGAFSKAFFFPSFNVRDLDTVDNGILEHLYPTMDSGEWDVLIAHFLGVDHCGHKHGPHHPEMAKKLSQMDQVIQGLVERLENDTLLVVAGDHGMTTNGDHGGDSELEVSAALFLYSPTAVFPSTPPEEPEVIPQVSLVPTLALLLGLPIPFGNIGEVMAELFSGGEDSQPHSSALAQASALHLNAQQVSRFLHTYSAATQDLQAKELHQLQNLFSKASADYQWLLQSPKGAEATLPTVIAELQQFLRGARAMCIESWARFSLVRMAGGTALLAASCFICLLASQWAISPGFPFCPLLLTPVAWGLVGAIAYAGLLGTIELKLDLVLLGAVAAVSSFLPFLWKAWAGWGSKRPLATLFPIPGPVLLLLLFRLAVFFSDSFVVAEARATPFLLGSFILLLVVQLHWEGQLLPPKLLTMPRLGTSATTNPPRHNGAYALRLGIGLLLCTRLAGLFHRCPEETPVCHSSPWLSPLASMVGGRAKNLWYGACVAALVALLAAVRLWLRRYGNLKSPEPPMLFVRWGLPLMALGTAAYWALASGADEAPPRLRVLVSGASMVLPRAVAGLAASGLALLLWKPVTVLVKAGAGAPRTRTVLTPFSGPPTSQADLDYVVPQIYRHMQEEFRGRLERTKSQGPLTVAAYQLGSVYSAAMVTALTLLAFPLLLLHAERISLVFLLLFLQSFLLLHLLAAGIPVTTPGPFTVPWQAVSAWALMATQTFYSTGHQPVFPAIHWHAAFVGFPEGHGSCTWLPALLVGANTFASHLLFAVGCPLLLLWPFLCESQGLRKRQQPPGNEADARVRPEEEEEPLMEMRLRDAPQHFYAALLQLGLKYLFILGIQILACALAASILRRHLMVWKVFAPKFIFEAVGFIVSSVGLLLGIALVMRVDGAVSSWFRQLFLAQQR

SEQ ID NO: 10347 - protein, 420 aa, Homo sapiens
MDTKRCFANRFDDYQGSLLAGQCEEAVAPLVTATIERILQELPPLGGGAEARGATAGASACQGGLYGGVAGVAYMLYHVSQSPLFATARERYLRSAKRLIDACARAEEWGEPDADTRAAFLLGGAGVYAVATLVYHALGRSDYVQPLGKFRALCAVCAPVSFLECGSDELFVGRAGYLCAALVLKQKLAQEVLTPAQIKSICQAILDSGKQYAIKKRKPFPLMYSYYGTEYLGAAHGLSSILQMLLSYHEHLKPSDRELVWQSVDFLMEQEQNCNWPPELGETIERENELVHWCHGAPGIAYLFAKAYLVSKKPQYLDTCIRCGELTWQKGLLKKGPGICHGVAGSAYVFLLLYRLTGNSKYIYRAQRFAQFLFTEEFKAGSRVLESIYSLYEGFSGTVCFLIDLLQPNQAEFPLFSVFV

SEQ ID NO: 10348 - protein, 388 aa, Homo sapiens
MDTKRCFANRFDDYQGSLLAGQCEEAVAPLVTATIERILQELPPLGGGAEARGATAGASACQGGLYGGVAGVAYMLYHVSQSPLFATARERYLRSAKRLIDACARAEEWGEPDADTRAAFLLGGAGVYAVATLVYHALGRSDYVQPLGKFRALCAVCAPVSFLECGSDELFVGRAGYLCAALVLKQKLAQEVLTPAQIKSICQAILDSGKQYAIKKRKPFPLMYSYYGTEYLGAAHGLSSILQMLLSYHEHLKPSDRELVWQSVDFLMEQEQNCNWPPELGETIERENELVHWCHGAPGIAYLFAKAYLVSKKPQYLDTCIRCGELTWQKGLLKKGPGICHGVAGSAYVFLLLYRLTGNSKYIYRAQSSFPVNLIKMEHLLYTRQHCF

SEQ ID NO: 10349 - protein, 1905 aa, Homo sapiens
MRRQWGALLLGALLCAHGLASSPECACGRSHFTCAVSALGECTCIPAQWQCDGDNDCGDHSDEDGCILPTCSPLDFHCDNGKCIRRSWVCDGDNDCEDDSDEQDCPPRECEEDEFPCQNGYCIRSLWHCDGDNDCGDNSDEQCDMRKCSDKEFRCSDGSCIAEHWYCDGDTDCKDGSDEENCPSAVPAPPCNLEEFQCAYGRCILDIYHCDGDDDCGDWSDESDCSSHQPCRSGEFMCDSGLCINAGWRCDGDADCDDQSDERNCTTSMCTAEQFRCHSGRCVRLSWRCDGEDDCADNSDEENCENTGSPQCALDQFLCWNGRCIGQRKLCNGVNDCGDNSDESPQQNCRPRTGEENCNVNNGGCAQKCQMVRGAVQCTCHTGYRLTEDGHTCQDVNECAEEGYCSQGCTNSEGAFQCWCETGYELRPDRRSCKALGPEPVLLFANRIDIRQVLPHRSEYTLLLNNLENAIALDFHHRRELVFWSDVTLDRILRANLNGSNVEEVVSTGLESPGGLAVDWVHDKLYWTDSGTSRIEVANLDGAHRKVLLWQNLEKPRAIALHPMEGTIYWTDWGNTPRIEASSMDGSGRRIIADTHLFWPNGLTIDYAGRRMYWVDAKHHVIERANLDGSHRKAVISQGLPHPFAITVFEDSLYWTDWHTKSINSANKFTGKNQEIIRNKLHFPMDIHTLHPQRQPAGKNRCGDNNGGCTHLCLPSGQNYTCACPTGFRKISSHACAQSLDKFLLFARRMDIRRISFDTEDLSDDVIPLADVRSAVALDWDSRDDHVYWTDVSTDTISRAKWDGTGQEVVVDTSLESPAGLAIDWVTNKLYWTDAGTDRIEVANTDGSMRTVLIWENLDRPRDIVVEPMGGYMYWTDWGASPKIERAGMDASGRQVIISSNLTWPNGLAIDYGSQRLYWADAGMKTIEFAGLDGSKRKVLIGSQLPHPFGLTLYGERIYWTDWQTKSIQSADRLTGLDRETLQENLENLMDIHVFHRRRPPVSTPCAMENGGCSHLCLRSPNPSGFSCTCPTGINLLSDGKTCSPGMNSFLIFARRIDIRMVSLDIPYFADVVVPINITMKNTIAIGVDPQEGKVYWSDSTLHRISRANLDGSQHEDIITTGLQTTDGLAVDAIGRKVYWTDTGTNRIEVGNLDGSMRKVLVWQNLDSPRAIVLYHEMGFMYWTDWGENAKLERSGMDGSDRAVLINNNLGWPNGLTVDKASSQLLWADAHTERIEAADLNGANRHTLVSPVQHPYGLTLLDSYIYWTDWQTRSIHRADKGTGSNVILVRSNLPGLMDMQAVDRAQPLGFNKCGSRNGGCSHLCLPRPSGFSCACPTGIQLKGDGKTCDPSPETYLLFSSRGSIRRISLDTSDHTDVHVPVPELNNVISLDYDSVDGKVYYTDVFLDVIRRADLNGSNMETVIGRGLKTTDGLAVDWVARNLYWTDTGRNTIEASRLDGSCRKVLINNSLDEPRAIAVFPRKGYLFWTDWGHIAKIERANLDGSERKVLINTDLGWPNGLTLDYDTRRIYWVDAHLDRIESADLNGKLRQVLVSHVSHPFALTQQDRWIYWTDWQTKSIQRVDKYSGRNKETVLANVEGLMDIIVVSPQRQTGTNACGVNNGGCTHLCFARASDFVCACPDEPDSRPCSLVPGLVPPAPRATGMSEKSPVLPNTPPTTLYSSTTRTRTSLEEVEGRCSERDARLGLCARSNDAVPAAPGEGLHISYAIGGLLSILLILVVIAALMLYRHKKSKFTDPGMGNLTYSNPSYRTSTQEVKIEAIPKPAMYNQLCYKKEGGPDHNYTKEKIKIVEGICLLSGDDAEWDDLKQLRSSRGGLLRDHVCMKTDTVSIQASSGSLDDTETEQLLQEEQSECSSVHTAATPERRGSLPDTGWKHERKLSSESQV

SEQ ID NO: 10350 - protein, 591 aa, Homo sapiens
MEMEQEKMTMNKELSPDAAAYCCSACHGDETWSYNHPIRGRAKSRSLSASPALGSTKEFRRTRSLHGPCPVTTFGPKACVLQNPQTIIATPLSLASQLLPSPAVSHSGQGGVTGQVHVLPQPSDQGVLSGPRAARGQTAPQEEAVTQEEVEALVCGHTQRWVPGPVYDAAAGGSGWAQLSLRAGMGVGQATGHIQDPASQRLTWNKSPKSVLVIKKMRDASLLQPFKELCTHLMEARGAGGKGAWGAHGVGGASIHITAPRVGSAGGMSRLALCFQENMIVYVEKKVLEDPAIASDESFGAVKKKFCTFREDYDDISNQIDFIICLGGDGTLLYASSLFQGSVPPVMAFHLGSLGFLTPFSFENFQSQVTQVIEGNAAVVLRSRLKVRVVKELRGKKTAVHNGLGENGSQAAGLDMDVGKQAMQYQVLNEVVIDRGPSSYLSNVDVYLDGHLITTVQGDGVIVSTPTGSTAYAAAAGASMIHPNVPAIMITPICPHSLSFRPIVVPAGVELKIMLSPEARNTAWVSFDGRKRQEIRHGDSISITTSCYPLPSICVRDPVSDWFESLAQCLHWNVRKKQAHFEEEEEEEEEG

SEQ ID NO: 10351 - protein, 218 aa, Homo sapiens
MGRVFLTGEKANSILKRYPRANGFFEEIRQGNIERECKEEFCTFEEAREAFENNEKTKEFWSTYTKAQQGESNRGSDWFQFYLTFPLIFGLFIILLVIFLIWRCFLRNKTRRQTVTEGHIPFPQHLNIITPPPPPDEVFDSSGLSPGFLGYVVGRSDSVSTRLSNCDPPPTYEEATGQVNLQRSETEPHLDPPPEYEDIVNSNSASAIPMVPVVTTIK

SEQ ID NO: 10352 - protein, 783 aa, Homo sapiens
MGDEKDSWKVKTLDEILQEKKRRKEQEEKAEIKRLKNSDDRDSKRDSLEEGELRDHCMEITIRNSPYRREDSMEDRGEEDDSLAIKPPQQMSRKEKVHHRKDEKRKEKWKHARVKEREHERRKRHREEQDKARREWERQKRREMAREHSRRERDRLEQLERKRERERKMREQQKEQREQKERERRAEERRKEREARREVSAHHRTMREDYSDKVKASHWSRSPPRPPRERFELGDGRKPGEARPAPAQKPAQLKEEKMEERDLLSDLQDISDSERKTSSAESSSAESGSGSEEEEEEEEEEEEEGSTSEESEEEEEEEEEEEEETGSNSEEASEQSAEEVSEEEMSEDEERENENHLLVVPESRFDRDSGESEEAEEEVGEGTPQSSALTEGDYVPDSPALLPIELKQELPKYLPALQGCRSVEEFQCLNRIEEGTYGVVYRAKDKKTDEIVALKRLKMEKEKEGFPITSLREINTILKAQHPNIVTVREIVVGSNMDKIYIVMNYVEHDLKSLMETMKQPFLPGEVKTLMIQLLRGVKHLHDNWILHRDLKTSNLLLSHAGILKVGDFGLAREYGSPLKAYTPVVVTQWYRAPELLLGAKEYSTAVDMWSVGCIFGELLTQKPLFPGNSEIDQINKVFKELGTPSEKIWPGYSELPVVKKMTFSEHPYNNLRKRFGALLSDQGFDLMNKFLTYFPGRRISAEDGLKHEYFRETPLPIDPSMFPTWPAKSEQQRVKRGTSPRPPEGGLGYSQLGDDDLKETGFHLTTTNQGASAAGPGFSLKF

SEQ ID NO: 10353 - protein, 1173 aa, Homo sapiens
MAGAQPGVHALQLKPVCVSDSLKKGTKFVKWDDDSTIVTPIILRTDPQGFFFYWTDQNKETELLDLSLVKDARCGRHAKAPKDPKLRELLDVGNIGRLEQRMITVVYGPDLVNISHLNLVAFQEEVAKEWTNEVFSLATNLLAQNMSRDAFLEKAYTKLKLQVTPEGRIPLKNIYRLFSADRKRVETALEACSLPSSRNDSIPQEDFTPEVYRVFLNNLCPRPEIDNIFSEFGAKSKPYLTVDQMMDFINLKQRDPRLNEILYPPLKQEQVQVLIEKYEPNNSLARKGQISVDGFMRYLSGEENGVVSPEKLDLNEDMSQPLSHYFINSSHNTYLTAGQLAGNSSVEMYRQVLLSGCRCVELDCWKGRTAEEEPVITHGFTMTTEISFKEVIEAIAECAFKTSPFPILLSFENHVDSPKQQAKMAEYCRLIFGDALLMEPLEKYPLESGVPLPSPMDLMYKILVKNKKKSHKSSEGSGKKKLSEQASNTYSDSSSMFEPSSPGAGEADTESDDDDDDDDCKKSSMDEGTAGSEAMATEEMSNLVNYIQPVKFESFEISKKRNKSFEMSSFVETKGLEQLTKSPVEFVEYNKMQLSRIYPKGTRVDSSNYMPQLFWNAGCQMVALNFQTMDLAMQINMGMYEYNGKSGYRLKPEFMRRPDKHFDPFTEGIVDGIVANTLSVKIISGQFLSDKKVGTYVEVDMFGLPVDTRRKAFKTKTSQGNAVNPVWEEEPIVFKKVVLPTLACLRIAVYEEGGKFIGHRILPVQAIRPGYHYICLRNERNQPLTLPAVFVYIEVKDYVPDTYADVIEALSNPIRYVNLMEQRAKQLAALTLEDEEEVKKEADPGETPSEAPSEARTTPAENGVNHTTTLTPKPPSQALHSQPAPGSVKAPAKTEDLIQSVLTEVEAQTIEELKQQKSFVKLQKKHYKEMKDLVKRHHKKTTDLIKEHTTKYNEIQNDYLRRRAALEKSAKKDSKKKSEPSSPDHGSSTIEQDLAALDAEMTQKLIDLKDKQQQQLLNLRQEQYYSEKYQKREHIKLLIQKLTDVAEECQNNQLKKLKEICEKEKKELKKKMDKKRQEKITEAKSKDKSQMEEEKTEMIRSYIQEVVQYIKRLEEAQSKRQEKLVEKHKEIRQQILDEKPKGEGSSSFLSETCHEDPSVSPNFTPPNPQALKW

SEQ ID NO: 10354 - protein, 1035 aa, Homo sapiens
MGDQRPQDRPSSPGMDSTPWYCDKPPSKYFAKRKHRRLRFPPVDTQNWVFVTEGMDDFRYGCQSPEDTLVCRRDEFLLPKISLRGPQADPKSRKKKLLKKAALFSKLSPAQPARKAFVEEVEAQLMTKHPLAMYPNLGEDMPPDLLLQVLKPLDPERKLEDAGSCEGQEKTTDEPTEPGKYPCGEFSPRPPETRVSCLPPEPPKTPVSSLRPEPPETGVSHLRPQPPKTQVSSLHLEPPETGVSHLRPEPPKTQVSSLHLEPPETGVSHLYLEPPGTGVSHLCPEPPKTRVSHLHREPPETGVPDLCLEPPKSRVSHLRPEPSETGVSHLHPEPPKTLVSSLHPEPPETGVSHLCPEPPETRVSPLRQLPPEAGVSHLCPEPPKTRVPPLRPETPKNGVSPLFPEPPKTRISNLRSEPPKIGVSHLCLEPPKTRGSHLRPEPPETGVSHLRPEPPKTRVSSLHLEPPETGVSHLCPEPPEKDVSHLRPEPPDTGVSHLCPEPPKTRVSHLRPEPSETGVSHLRPEPPKILVSSLHQAPPESSVSHLRPEPPETGVSHLRPEPPKTRMYSLRPEPPDTGVSHLCPEPPKTRVSSLPPEPPETGVSHLCPEPPETRVSHLRPEPPETGVSHLRPEPPKTRMYSLRPEPPNTGVSHLCPEPPKTRVSSLPPEPPETGVSHLCPEPPETRVSHLRPEPPETGVSRLHPEPPKTRVSSLHAEPPESRVSHLCPEPPETGVSHLRPEPPKPRVSSLRPEPLETRVSHLRPEPPETGVSHLHPELPKPRVSSLHLEPPKTRRVSSLRLEPPKTGRVSSLCPEPTKTGASHLKELFQEGTSSTMECVSDSLQRRHTSRKLRDFKWAGDLGVNEESISSLFDFTPECRATYQDQKNKKANECSSGLKYSMELDEMDEVKFFSQEKDLDGKIQNAPNSHSAQHVKMGYGAWYLKPKLGKKLRSDEPLIDPKLVLEKPDEPDILDGLYGPIAFKDFILSKGYEMPGIIQRLFARRGWTYDSVKTPIQRAMQVYKYKEDVTDASEED

SEQ ID NO: 10355 - protein, 3187 aa, Homo sapiens
MNTQKGSLTINVHRGSLAMSIQRGSLVPRDMDSSGRDMQLRVIPAEVKFLDTMAGRVYRLPITVHNICRWNQKIRFKEPVKPQFKLMLTSLDKELASGLQMTAMVEYHPDKDEDTFDRLLISIENKTTEIPLIGLIPSCQLEIESVVNFGTLVANSKVYSKEITITNHGKAPGIFKAEYHGQLPILIFPTSGIVDAKSSMVIKVDFCADQPRIVDEEAIVILQGQPEMLLSIKAHVVEQIIELLSMSSDRRLECIHFGPVFFGSSKIKHARVYNNSPEPINWVAIIQDDAVGEELGTDIQQRTDIALNNLTYIRKIKNIDTTIIISCLPNEGTLQPYQKTVITFCFTPKLMAVGKKDIGPSYRQDYALFLRFESVGSKDGFLRDDDYKTIKSERFQKVELALTGTGLPVLLQFDPGPVLNFKPCFMGERSEIQCIIKNQCELLPVTYHFKKTANFEIDPEKGKITGGGMVDVMCSFVPHQLGVFKVKQMIEIIGLVAEEDLQSLSVKSFHHVYLAFNSICKASTKKVVMKFDPGILPSIRNPTGKFVVKDLAKRKNYAPVAMLQSAMTRTHNHRSCEEPVKDMLLAFPNDRAATIRSKDHHKHFRPIFTKVPRFNYVNHDFAYTTFEKQQKKLHENYYAMYLKYLRSVRLQKKQAERERMYSYDDTDIGLEPGSGLKSPSLSEAEIEEELSSAANSIRANRLLTTRGIASQEEESVRRKVLKGLKSEPSTPQEKHDCSLMLTPKQIHQVIVGPSVLNFGNICVNSPNTHLLHVINMLPMHVLLQLDTDLEELQKTNQFSYVILPTSSTYISMVFDSPTIGKFWKSFTFTVNNVPSGHILVVAVVQPVTLELSSNELVLRPRGFFMKTCFRGTVRLYNRQNCCAQFQWQPVNTGRGIAFSICPAKGTVEAYSSLECEVTWQQGFSSPEEGEFILHVFQGNALKLKCVAHLGRTKVLLLQPRILFSNCPQGLTTWRKAILQNVGQNHAYFKVCSQSLLPIINIIPSQGIVPFGGITVLNISCKPTVAEKFDTRAKVSIRHANVIDLRIGGSAEIADVEINPDVFNFSGAYIGGTQIIPFVIKNKGITRARVEFNLKDFPDFSMDLKDKSEEFKDPAVPYIYSLELEENTSLECSITFSPKEVTVVEFIIQVQINFFESSKLYTKYLSSSPSNPKTVPLIRPCYVQATALQSPLNLSSTKFVFEIPLHEMNPNNKVTKTQNLVLYNITKHHVTWTLDLSNTGKLFKDGTFKFSVLNGILRPNEKYNVSISFCPNRPGTYTADIPMLLNYIPVCYKILHLTGEVKSPELLFDPPFIFFTPVPLDITTVMDINILPQNYFRNSTLCVQIPTVRLLDGEEIHPLSVKFPKGRVIPGSHSGINNKLTCHLSFKSSKPVSFFTNLLFCDDRKNWFSLPVTATAENCILTIYPYMAIHLDKQNIILKNDKDEYLKKTRDGVLPPYQDAKPPSPASIKKTYTTSKFNDAEPAKGNLFIGVEVLPENLHLDESETSEEDHGSLEKEKYEQFLSLEEGTKAHYFFEKVVNAAQTWFSLFGWPEGPHSFSIPETIRRDVYKMQFYSSTSPPQKFSRQNDFSKYNKTIYDVLLHLSGKMPPGINSSQSLPVDNHEKRVIQLHLQHSSLLDFLNAQGGCISHVLPEFLLEPEDYKRWIEIMSSTNTMPVSSCTPKKKCSIVIEMSKFEAWSKRAWTDVFLQIYKVLVLSRVVPYCSNNMPPICVQNTPKVNPCFASSNIYSDSERILLSWMNINYENTRHVIWKNCHKDVIPSERWIVNFDKDLSDGLVFATQLGAYCPFLIESHFINMYTRPKSPEEYLHNCLIIVNTLYEIDFDVEIQATDICDPNPILMLMLCVYMYERLPTYLPKKVVSFECTLHDTVLNKILLKNSSSRNLVYNARIVGRDAADFSLSQKGNVVTISPRNEINVTLKFTSRFIRPAEASLLLISKPKNAVRGITMTFALKGKVLDFKAIDIIKCESPCYQFQEVTVNVKNPFHTAGDFSVILVESSTFVSSPTKLTESRQYPKHDDDMSSSGSDTDQGCSDSPNVLHTSIKSTFIREFFCSMHTVHLGVKGTSSLELRFLPFNMHVRYCVIILSNKKIGQLIYVAEGKGMTPLPSSCLPMNTSSSPVYYSTTREEGPNKKYPVLYLKCKPYQILYVDLKLPMTNEAKEKALAFAAQQQMSSIEYERRLITGTLESSSIRVAIALLGLTKIETLMLFRISKLRKPKTVSYTTEVSLPKYFYIPEKISIPWIPEPQVIKLSKAKASDGSVPLPLQFLPLQSGRYPCKILLKSRYDVRAYYVEGIVNEEQPEAKFEFETPAFEALTQNIPIKNQTNDKWTFQVTIEGEWFYGPVDLHVGPDEIVEYPLTFKPIFECVITGKLILQNEVDGREHIFDIKGVGKKPSALEHITVECQVGNVTQKHITLPHFTNTALTFKVTADLPIVWGNPQITVYPYKEILYLIHVRPWKRGILKGTITFSTTRRCTTRRKHDDYEEDTDQDQALSCLDSITEQSSILDDADTYGNFNNLRFWYNLEIHSTPGPPIEIMEMTCIALDSTCIEIPLSNPKDRGLHLEVQLTSAALNGDNEIILSPLQCTKYIVWYSPATTGYSDESIIFQPEMAEEFWYLLKLTIELPKPTTMPEIQCDLGKHVTQIIPLVNCTHETLKLQVTNSNPENFVLDINRKSQLIISPHSTTELPVLFYPSALGRADHQACINFYCTQFTEWKFYLSGVGLFPQPLDTERITTRIGLQSTIVIPFKNPTMEDVLIDIILTSVEHPRNLVMDHCWDSFIYESSAFRFSSPSEIQGIALPPKGNIDISLLFIPQIMKLHKTMVIIEMTKANGKYWPIDNFDELDIKFKSIVGIDSEEIQAIHWIYPIVGLPQAPPPKSPPVVIQCQSRKRAEEKVEIILNAGFFGFSLTPDLTEVLVIPKRNSHNFCEDPNEIPKIHEFEYEIQFESEAMKSKLESCVALYMIEKSYDIMAKRITFIFNLVFTPKKPLRSHITLKIECVTEGIWKFPIMLIATEPDTDAVIDIEGVGLFKESVFELRLKSQTRNPEPFTAHFLPGSDLEFFVKPQAGELLPFNTNGTLITVGFKPKMYCRKYKATLVIQTEEMYWKYEINGLTPTTVPPKNAKAKIDATHKTHDNMPVRPHNFVRENTKLIRTGVSSTIKGAPLVKNQ

SEQ ID NO: 10356 - protein, 783 aa, Homo sapiens
MEALGPGGDRASPASSTSSLDLWHLSMRADSAYSSFSAASGGPEPRTQSPGTDLLPYLDWDYVRVVWGGPGPAPPDAALCTSPRPRPAVAARSGPQPTEVPGTPGPLNRQATPLLYALAAEAEAAAQAAEPPSPPASRAAYRQRLQGAQRRVLRETSFQRKELRMSLPARLRPTVPARPPATHPRSASLSHPGGEGEPARSRAPAPGTAGRGPLANQQRKWCFSEPGKLDRVGRGGGPARECLGEACSSSGLPGPEPLEFQHPALAKFEDHEVGWLPETQPQGSMNLDSGSLKLGDAFRPASRSRSASGEVLGSWGGSGGTIPIVQAVPQGAETPRPLFQTKLSSVHASDQPYGTGLGQRTGQVTVPTEYPLHECPGTAGADDCWQGVNGSVGISRPTSHTPTGTANDNIPTIDPTGLTTNPPTAAESDLLKPVPADALGLSGNDTPGPSHNTALARGTGQPGSRPTWPSQCLEELVQELARLDPSLCDPLASQPSPEPPLGLLDGLIPLAEVRAAMRPACGEAGEEAASTFEPGSYQFSFTQLLPAPREETRLENPATHPVLDQPCGQGLPAPNNSIQGKKVELAARLQKMLQDLHTEQERLQGEAQAWARRQAALEAAVRQACAPQELERFSRFMADLERVLGLLLLLGSRLARVRRALARAASDSDPDEQASLLQRLRLLQRQEEDAKELKEHVARRERAVREVLVRALPVEELRVYCALLAGKAAVLAQQRNLDERIRLLQDQLDAIRDDLGHHAPSPSPARPPGTCPPVQPPFPLLLT

SEQ ID NO: 10357 - protein, 3681 aa, Homo sapiens
MSEVSSDEREDVQKKTFTKWVNAQFSKFGKQHIENLFSDLQDGRRLLDLLEGLTGQKLPKEKGSTRVHALNNVNKALRVLQNNNVDLVNIGSTDIVDGNHKLTLGLIWNIILHWQVKNVMKNIMAGLQQTNSEKILLSWVRQSTRNYPQVNVINFTTSWSDGLALNALIHSHRPDLFDWNSVVCQQSATQRLEHAFNIARYQLGIEKLLDPEDVDTTYPDKKSILMYITSLFQVLPQQVSIEAIQEVEMLPRPPKVTKEEHFQLHHQMHYSQQITVSLAQGYERTSSPKPRFKSYAYTQAAYVTTSDPTRSPFPSQHLEAPEDKSFGSSLMESEVNLDRYQTALEEVLSWLLSAEDTLQAQGEISNDVEVVKDQFHTHEGYMMDLTAHQGRVGNILQLGSKLIGTGKLSEDEETEVQEQMNLLNSRWECLRVASMEKQSNLHRVLMDLQNQKLKELNDWLTKTEERTRKMEEEPLGPDLEDLKRQVQQHKVLQEDLEQEQVRVNSLTHMVVVVDESSGDHATAALEEQLKVLGDRWANICRWTEDRWVLLQDILLKWQRLTEEQCLFSAWLSEKEDAVNKIHTTGFKDQNEMLSSLQKLAVLKADLEKKKQSMGKLYSLKQDLLSTLKNKSVTQKTEAWLDNFARCWDNLVQKLEKSTAQISQAVTTTQPSLTQTTVMETVTTVTTREQILVKHAQEELPPPPPQKKRQITVDSEIRKRLDVDITELHSWITRSEAVLQSPEFAIFRKEGNFSDLKEKVNAIEREKAEKFRKLQDASRSAQALVEQMVNEGVNADSIKQASEQLNSRWIEFCQLLSERLNWLEYQNNIIAFYNQLQQLEQMTTTAENWLKIQPTTPSEPTAIKSQLKICKDEVNRLSDLQPQIERLKIQSIALKEKGQGPMFLDADFVAFTNHFKQVFSDVQAREKELQTIFDTLPPMRYQETMSAIRTWVQQSETKLSIPQLSVTDYEIMEQRLGELQALQSSLQEQQSGLYYLSTTVKEMSKKAPSEISRKYQSEFEEIEGRWKKLSSQLVEHCQKLEEQMNKLRKIQNHIQTLKKWMAEVDVFLKEEWPALGDSEILKKQLKQCRLLVSDIQTIQPSLNSVNEGGQKIKNEAEPEFASRLETELKELNTQWDHMCQQVYARKEALKGGLEKTVSLQKDLSEMHEWMTQAEEEYLERDFEYKTPDELQKAVEEMKRAKEEAQQKEAKVKLLTESVNSVIAQAPPVAQEALKKELETLTTNYQWLCTRLNGKCKTLEEVWACWHELLSYLEKANKWLNEVEFKLKTTENIPGGAEEISEVLDSLENLMRHSEDNPNQIRILAQTLTDGGVMDELINEELETFNSRWRELHEEAVRRQKLLEQSIQSAQETEKSLHLIQESLTFIDKQLAAYIADKVDAAQMPQEAQKIQSDLTSHEISLEEMKKHNQGKEAAQRVLSQIDVAQKKLQDVSMKFRLFQKPANFEQRLQESKMILDEVKMHLPALETKSVEQEVVQSQLNHCVNLYKSLSEVKSEVEMVIKTGRQIVQKKQTENPKELDERVTALKLHYNELGAKVTERKQQLEKCLKLSRKMRKEMNVLTEWLAATDMELTKRSAVEGMPSNLDSEVAWGKATQKEIEKQKVHLKSITEVGEALKTVLGKKETLVEDKLSLLNSNWIAVTSRAEEWLNLLLEYQKHMETFDQNVDHITKWIIQADTLLDESEKKKPQQKEDVLKRLKAELNDIRPKVDSTRDQAANLMANRGDHCRKLVEPQISELNHRFAAISHRIKTGKASIPLKELEQFNSDIQKLLEPLEAEIQQGVNLKEEDFNKDMNEDNEGTVKELLQRGDNLQQRITDERKREEIKIKQQLLQTKHNALKDLRSQRRKKALEISHQWYQYKRQADDLLKCLDDIEKKLASLPEPRDERKIKEIDRELQKKKEELNAVRRQAEGLSEDGAAMAVEPTQIQLSKRWREIESKFAQFRRLNFAQIHTVREETMMVMTEDMPLEISYVPSTYLTEITHVSQALLEVEQLLNAPDLCAKDFEDLFKQEESLKNIKDSLQQSSGRIDIIHSKKTAALQSATPVERVKLQEALSQLDFQWEKVNKMYKDRQGRFDRSVEKWRRFHYDIKIFNQWLTEAEQFLRKTQIPENWEHAKYKWYLKELQDGIGQRQTVVRTLNATGEEIIQQSSKTDASILQEKLGSLNLRWQEVCKQLSDRKKRLEEQKNILSEFQRDLNEFVLWLEEADNIASIPLEPGKEQQLKEKLEQVKLLVEELPLRQGILKQLNETGGPVLVSAPISPEEQDKLENKLKQTNLQWIKVSRALPEKQGEIEAQIKDLGQLEKKLEDLEEQLNHLLLWLSPIRNQLEIYNQPNQEGPFDVKETEIAVQAKQPDVEEILSKGQHLYKEKPATQPVKRKLEDLSSEWKAVNRLLQELRAKQPDLAPGLTTIGASPTQTVTLVTQPVVTKETAISKLEMPSSLMLEVPALADFNRAWTELTDWLSLLDQVIKSQRVMVGDLEDINEMIIKQKATMQDLEQRRPQLEELITAAQNLKNKTSNQEARTIITDRIERIQNQWDEVQEHLQNRRQQLNEMLKDSTQWLEAKEEAEQVLGQARAKLESWKEGPYTVDAIQKKITETKQLAKDLRQWQTNVDVANDLALKLLRDYSADDTRKVHMITENINASWRSIHKRVSEREAALEETHRLLQQFPLDLEKFLAWLTEAETTANVLQDATRKERLLEDSKGVKELMKQWQDLQGEIEAHTDVYHNLDENSQKILRSLEGSDDAVLLQRRLDNMNFKWSELRKKSLNIRSHLEASSDQWKRLHLSLQELLVWLQLKDDELSRQAPIGGDFPAVQKQNDVHRAFKRELKTKEPVIMSTLETVRIFLTEQPLEGLEKLYQEPRELPPEERAQNVTRLLRKQAEEVNTEWEKLNLHSADWQRKIDETLERLRELQEATDELDLKLRQAEVIKGSWQPVGDLLIDSLQDHLEKVKALRGEIAPLKENVSHVNDLARQLTTLGIQLSPYNLSTLEDLNTRWKLLQVAVEDRVRQLHEAHRDFGPASQHFLSTSVQGPWERAISPNKVPYYINHETQTTCWDHPKMTELYQSLADLNNVRFSAYRTAMKLRRLQKALCLDLLSLSAACDALDQHNLKQNDQPMDILQIINCLTTIYDRLEQEHNNLVNVPLCVDMCLNWLLNVYDTGRTGRIRVLSFKTGIISLCKAHLEDKYRYLFKQVASSTGFCDQRRLGLLLHDSIQIPRQLGEVASFGGSNIEPSVRSCFQFANNKPEIEAALFLDWMRLEPQSMVWLPVLHRVAAAETAKHQAKCNICKECPIIGFRYRSLKHFNYDICQSCFFSGRVAKGHKMHYPMVEYCTPTTSGEDVRDFAKVLKNKFRTKRYFAKHPRMGYLPVQTVLEGDNMETPVTLINFWPVDSAPASSPQLSHDDTHSRIEHYASRLAEMENSNGSYLNDSISPNESIDDEHLLIQHYCQSLNQDSPLSQPRSPAQILISLESEERGELERILADLEEENRNLQAEYDRLKQQHEHKGLSPLPSPPEMMPTSPQSPRDAELIAEAKLLRQHKGRLEARMQILEDHNKQLESQLHRLRQLLEQPQAEAKVNGTTVSSPSTSLQRSDSSQPMLLRVVGSQTSDSMGEEDLLSPPQDTSTGLEEVMEQLNNSFPSSRGRNTPGKPMREDTM

SEQ ID NO: 10358 - protein, 852 aa, Homo sapiens
MEALGPGGDRASPASSTSSLDLWHLSMRADSAYSSFSAASGGPEPRTQSPGTDLLPYLDWDYVRVVWGGPGPAPPDAALCTSPRPRPAVAARSGPQPTEVPGTPGPLNRQATPLLYALAAEAEAAAQAAEPPSPPASRAAYRQRLQGAQRRVLRETSFQRKELRMSLPARLRPTVPARPPATHPRSASLSHPGGEGEPARSRAPAPGTAGRGPLANQQRKWCFSEPGKLDRVGRGGGPARECLGEACSSSGLPGPEPLEFQHPALAKFEDHEVGWLPETQPQGSMNLDSGSLKLGDAFRPASRSRSASGEVLGSWGGSGGTIPIVQAVPQGAETPRPLFQTKLSRFLPQKEAAVMYPAELPQSSPADSEQRVSETCIVPAWLPSLPDEVFLEEAPLVRMRSPPDPHASQGPPASVHASDQPYGTGLGQRTGQVTVPTEYPLHECPGTAGADDCWQGVNGSVGISRPTSHTPTGTANDNIPTIDPTGLTTNPPTAAESDLLKPVPADALGLSGNDTPGPSHNTALARGTGQPGSRPTWPSQCLEELVQELARLDPSLCDPLASQPSPEPPLGLLDGLIPLAEVRAAMRPACGEAGEEAASTFEPGSYQFSFTQLLPAPREETRLENPATHPVLDQPCGQGLPAPNNSIQGKKVELAARLQKMLQDLHTEQERLQGEAQAWARRQAALEAAVRQACAPQELERFSRFMADLERVLGLLLLLGSRLARVRRALARAASDSDPDEQASLLQRLRLLQRQEEDAKELKEHVARRERAVREVLVRALPVEELRVYCALLAGKAAVLAQQRNLDERIRLLQDQLDAIRDDLGHHAPSPSPARPPGTCPPVQPPFPLLLT

SEQ ID NO: 10359 - protein, 525 aa, Homo sapiens
MREQLKGHETQTTCWDHPKMTELYQSLADLNNVRFSAYRTAMKLRRLQKALCLDLLSLSAACDALDQHNLKQNDQPMDILQIINCLTTIYDRLEQEHNNLVNVPLCVDMCLNWLLNVYDTGRTGRIRVLSFKTGIISLCKAHLEDKYRYLFKQVASSTGFCDQRRLGLLLHDSIQIPRQLGEVASFGGSNIEPSVRSCFQFANNKPEIEAALFLDWMRLEPQSMVWLPVLHRVAAAETAKHQAKCNICKECPIIGFRYRSLKHFNYDICQSCFFSGRVAKGHKMHYPMVEYCTPTTSGEDVRDFAKVLKNKFRTKRYFAKHPRMGYLPVQTVLEGDNMETNLQAEYDRLKQQHEHKGLSPLPSPPEMMPTSPQSPRDAELIAEAKLLRQHKGRLEARMQILEDHNKQLESQLHRLRQLLEQPQAEAKVNGTTVSSPSTSLQRSDSSQPMLLRVVGSQTSDSMGEEDLLSPPQDTSTGLEEVMEQLNNSFPSSRGHNVGSLFHMADDLGRAMESLVSVMTDEEGAE

SEQ ID NO: 10360 - protein, 471 aa, Homo sapiens
MDILCEENTSLSSTTNSLMQLNDDTRLYSNDFNSGEANTSDAFNWTVDSENRTNLSCEGCLSPSCLSLLHLQEKNWSALLTAVVIILTIAGNILVIMAVSLEKKLQNATNYFLMSLAIADMLLGFLVMPVSMLTILYGYRWPLPSKLCAVWIYLDVLFSTASIMHLCAISLDRYVAIQNPIHHSRFNSRTKAFLKIIAVWTISVGISMPIPVFGLQDDSKVFKEGSCLLADDNFVLIGSFVSFFIPLTIMVITYFLTIKSLQKEATLCVSDLGTRAKLASFSFLPQSSLSSEKLFQRSIHREPGSYTGRRTMQSISNEQKACKVLGIVFFLFVVMWCPFFITNIMAVICKESCNEDVIGALLNVFVWIGYLSSAVNPLVYTLFNKTYRSAFSRYIQCQYKENKKPLQLILVNTIPALAYKSSQLQMGQKKNSKQDAKTTDNDCSMVALGKQHSEEASKDNSDGVNEKVSCV

SEQ ID NO: 10361 - protein, 237 aa, Homo sapiens
MVHPKFYGIGENMWVGPENEFTASIAIRSWHAEKKMYNFENGSCSGDCSNYIQLVWDHSYKVGCAVTPCSKIGHIIHAAIFICNYAPGGTLTRRPYEPGIFCTRCGRRDKCTDFLCSNADRDQATYYRFWYPKWEMPRPVVCDPLCTFILLLRILCFILCVITVLIVQSQFPNILLEQQMIFTPEESEAGNEEEEKEEEKKEKEEMEMEIMEMEEEKEEREEEEEETQKEKMEEEEK

SEQ ID NO: 10362 - protein, 855 aa, Homo sapiens
MDEEEDNLSLLTALLEENESALDCNSEENNFLTRENGEPDAFDELFDADGDGESYTEEADDGETGETRDEKENLATLFGDMEDLTDEEEVPASQSTENRVLPAPAPRREKTNEELQEELRNLQEQMKALQEQLKVTTIKQTASPARLQKSPEKSPRPPLKERRVQRIQESTCFSAELDVPALPRTKRVARTPKASPPDPKSSSSRMTSAPSQPLQTISRNKPSGITRGQIVGTPGSSGETTQPICVEAFSGLRLRRPRVSSTEMNKKMTGRKLIRLSQIKEKMAREKLEEIDWVTFGVILKKVTPQSVNSGKTFSIWKLNDLRDLTQCVSLFLFGEVHKALWKTEQGTVVGILNANPMKPKDGSEEVCLSIDHPQKVLIMGEALDLGTCKAKKKNGEPCTQTVNLRDCEYCQYHVQAQYKKLSAKRADLQSTFSGGRIPKKFARRGTSLKERLCQDGFYYGGVSSASYAASIAAAVAPKKKIQTTLSNLVVKGTNLIIQETRQKLGIPQKSLSCSEEFKELMDLPTCGARNLKQHLAKATASGIMGSPKPAIKSISASALLKQQKQRMLEMRRRKSEEIQKRFLQSSSEVESPAVPSSSRQPPAQPPRTGSEFPRLEGAPATMTPKLGRGVLEGDDVLFYDESPPPRPKLSALAEAKKLAAITKLRAKGQVLTKTNPNSIKKKQKDPQDILEVKERVEKNTMFSSQAEDELEPARKKRREQLAYLESEEFQKILKAKSKHTGILKEAEAEMQERYFEPLVKKEQMEEKMRNIREVKCRVVTCKTCAYTHFKLLETCVSEQHEYHWHDGVKRFFKCPCGNRSISLDRLPNKHCSNCGLYKWERDGMLKVCHLRTNF

SEQ ID NO: 10363 - protein, 617 aa, Homo sapiens
MREQLKGHETQTTCWDHPKMTELYQSLADLNNVRFSAYRTAMKLRRLQKALCLDLLSLSAACDALDQHNLKQNDQPMDILQIINCLTTIYDRLEQEHNNLVNVPLCVDMCLNWLLNVYDTGRTGRIRVLSFKTGIISLCKAHLEDKYRYLFKQVASSTGFCDQRRLGLLLHDSIQIPRQLGEVASFGGSNIEPSVRSCFQFANNKPEIEAALFLDWMRLEPQSMVWLPVLHRVAAAETAKHQAKCNICKECPIIGFRYRSLKHFNYDICQSCFFSGRVAKGHKMHYPMVEYCTPTTSGEDVRDFAKVLKNKFRTKRYFAKHPRMGYLPVQTVLEGDNMETPVTLINFWPVDSAPASSPQLSHDDTHSRIEHYASRLAEMENSNGSYLNDSISPNESIDDEHLLIQHYCQSLNQDSPLSQPRSPAQILISLESEERGELERILADLEEENRNLQAEYDRLKQQHEHKGLSPLPSPPEMMPTSPQSPRDAELIAEAKLLRQHKGRLEARMQILEDHNKQLESQLHRLRQLLEQPQAEAKVNGTTVSSPSTSLQRSDSSQPMLLRVVGSQTSDSMGEEDLLSPPQDTSTGLEEVMEQLNNSFPSSRGRNTPGKPMREDTM

SEQ ID NO: 10364 - protein, 1225 aa, Homo sapiens
MPSSLMLEVPALADFNRAWTELTDWLSLLDQVIKSQRVMVGDLEDINEMIIKQKATMQDLEQRRPQLEELITAAQNLKNKTSNQEARTIITDRIERIQNQWDEVQEHLQNRRQQLNEMLKDSTQWLEAKEEAEQVLGQARAKLESWKEGPYTVDAIQKKITETKQLAKDLRQWQTNVDVANDLALKLLRDYSADDTRKVHMITENINASWRSIHKRVSEREAALEETHRLLQQFPLDLEKFLAWLTEAETTANVLQDATRKERLLEDSKGVKELMKQWQDLQGEIEAHTDVYHNLDENSQKILRSLEGSDDAVLLQRRLDNMNFKWSELRKKSLNIRSHLEASSDQWKRLHLSLQELLVWLQLKDDELSRQAPIGGDFPAVQKQNDVHRAFKRELKTKEPVIMSTLETVRIFLTEQPLEGLEKLYQEPRELPPEERAQNVTRLLRKQAEEVNTEWEKLNLHSADWQRKIDETLERLRELQEATDELDLKLRQAEVIKGSWQPVGDLLIDSLQDHLEKVKALRGEIAPLKENVSHVNDLARQLTTLGIQLSPYNLSTLEDLNTRWKLLQVAVEDRVRQLHEAHRDFGPASQHFLSTSVQGPWERAISPNKVPYYINHETQTTCWDHPKMTELYQSLADLNNVRFSAYRTAMKLRRLQKALCLDLLSLSAACDALDQHNLKQNDQPMDILQIINCLTTIYDRLEQEHNNLVNVPLCVDMCLNWLLNVYDTGRTGRIRVLSFKTGIISLCKAHLEDKYRYLFKQVASSTGFCDQRRLGLLLHDSIQIPRQLGEVASFGGSNIEPSVRSCFQFANNKPEIEAALFLDWMRLEPQSMVWLPVLHRVAAAETAKHQAKCNICKECPIIGFRYRSLKHFNYDICQSCFFSGRVAKGHKMHYPMVEYCTPTTSGEDVRDFAKVLKNKFRTKRYFAKHPRMGYLPVQTVLEGDNMETPVTLINFWPVDSAPASSPQLSHDDTHSRIEHYASRLAEMENSNGSYLNDSISPNESIDDEHLLIQHYCQSLNQDSPLSQPRSPAQILISLESEERGELERILADLEEENRNLQAEYDRLKQQHEHKGLSPLPSPPEMMPTSPQSPRDAELIAEAKLLRQHKGRLEARMQILEDHNKQLESQLHRLRQLLEQPQAEAKVNGTTVSSPSTSLQRSDSSQPMLLRVVGSQTSDSMGEEDLLSPPQDTSTGLEEVMEQLNNSFPSSRGRNTPGKPMREDTM

SEQ ID NO: 10365 - protein, 919 aa, Homo sapiens
MDPDPQAGVQVGMRVVRGVDWKWGQQDGGEGGVGTVVELGRHGSPSTPDRTVVVQWDQGTRTNYRAGYQGAHDLLLYDNAQIGVRHPNIICDCCKKHGLRGMRWKCRVCLDYDLCTQCYMHNKHELAHAFDRYETAHSRPVTLSPRQGLPRIPLRGIFQGAKVVRGPDWEWGSQDGGEGKPGRVVDIRGWDVETGRSVASVTWADGTTNVYRVGHKGKVDLKCVGEAAGGFYYKDHLPRLGKPAELQRRVSADSQPFQHGDKVKCLLDTDVLREMQEGHGGWNPRMAEHHSFWVGDVVRVIGDLDTVKRLQAGHGEWTDDMAPALGRVGKVVKVFGDGNLRVAVAGQRWTFSPSCLVAYRPEEDANLDVAERARENKSSLSVALDKLRAQKSDPEHPGRLVVEVALGNAARALDLLRRRPEQVDTKNQGRTALQVAAYLGQVELIRLLLQARAGVDLPDDEGNTALHYAALGNQPEATRVLLSAGCRADAINSTQSTALHVAVQRGFLEVVRALCERGCDVNLPDAHSDTPLHSAISAGTGASGIVEVLTEVPNIDVTATNSQGFTLLHHASLKGHALAVRKILARARQLVDAKKEDGFTALHLAALNNHREVAQILIREGRCDVNVRNRKLQSPLHLAVQQAHVGLVPLLVDAGCSVNAEDEEGDTALHVALQRHQLLPLVADGAGGDPGPLQLLSRLQASGLPGSAELTVGAAVACFLALEGADVSYTNHRGRSPLDLAAEGRVLKALQGCAQRFRERQAGGGAAPGPRQTLGTPNTVTNLHVGAAPGPEAAECLVCSELALLVLFSPCQHRTVCEECARRMKKCIRCQVVVSKKLRPDGSEVASAAPAPGPPRQLVEELQSRYRQMEERITCPICIDSHIRLVFQCGHGACAPCGSALSACPICRQPIRDRIQIFV

SEQ ID NO: 10366 - protein, 753 aa, Homo sapiens
MDPDPQAGVQVGMRVVRGVDWKWGQQDGGEGGVGTVVELGRHGSPSTPDRTVVVQWDQGTRTNYRAGYQGAHDLLLYDNAQIGVRHPNIICDCCKKHGLRGMRWKCRVCLDYDLCTQCYMHNKHELAHAFDRYETAHSRPVTLSPRQGLPRIPLRGIFQGAKVVRGPDWEWGSQDGKPAELQRRVSADSQPFQHGDKVKCLLDTDVLREMQEGHGGWNPRMAEFIGQTGTVHRITDRGDVRVQFNHETRWTFHPGALTKHHSFWVGDVVRVIGDLDTVKRLQAGHGEWTDDMAPALGRVGKVVKVFGDGNLRVAVAGQRWTFSPSCLVAYRPEEDANLDVAERARENKSSLSVALDKLRAQKSDPEHPGRLVVEVALGNAARALDLLRRRPEQVDTKNQGRTALQVAAYLGQVELIRLLLQARAGVDLPDDEGNTALHYAALGNQPEATRVLLSAGCRADAINSTQSTALHVAVQRGFLEVVRALCERGCDVNLPDAHSDTPLHSAISAGTGASGIVEVLTEVPNIDVTATNSQGFTLLHHASLKGHALAVRKILARARQLVDAKKEDGFTALHLAALNNHREVAQILIREGRCDVNVRNRKLQSPLHLAVQQAHVGLVPLLVDAGCSVNAEDEEGDTALHVALQRHQLLPLVADGAGGDPGPLQLLSRLQASGLPGSAELTVGAAVACFLALEGADVSYTNHRGRSPLDLAAEGRVLKALQGCAQRFRVRAQDEEVHQVPGGRQQETAPRRL

SEQ ID NO: 10367 - protein, 874 aa, Homo sapiens
MDEEEDNLSLLTALLEENESALDCNSEENNFLTRENGEPDAFDELFDADGDGESYTEEADDGETGETRDEKENLATLFGDMEDLTDEEEVPASQSTENRVLPAPAPRREKTNEELQEELRNLQEQMKALQEQLKVTTIKQTASPARLQKSPEKSPRPPLKERRVQRIQESTCFSAELDVPALPRTKRVARTPKASPPDPKSSSSRMTSAPSQPLQTISRNKPSGITRGQIVGTPGSSGETTQPICVEAFSGLRLRRPRVSSTEMNKKMTGRKLIRLSQIKEKMAREKLEEIDWVTFGVILKKVTPQSVNSGKTFSIWKLNDLRDLTQCVSLFLFGEVHKALWKTEQGTVVGILNANPMKPKDGSEEVCLSIDHPQKVLIMGEALDLGTCKAKKKNGEPCTQTVNLRDCEYCQYHVQAQYKKLSAKRADLQSTFSGGRIPKKFARRGTSLKERLCQDGFYYGGVSSASYAASIAAAVAPKKKIQTTLSNLVVKGTNLIIQETRQKLGIPQKSLSCSEEFKELMDLPTCGARNLKQHLAKATASGIMGSPKPAIKSISASALLKQQKQRMLEMRRRKSEEIQKRFLQSSSEVESPAVPSSSRQPPAQPPRTGSEFPRLEGAPATMTPKLGRGVLEGDDVLFYDESPPPRPKLSALAEAKKLAAITKLRAKGQVLTKTNPNSIKKKQKDPQDILEVKERVEKNTMFSSQAEDELEPARKKRREQLAYLESEEFQKILKAKSKHTGILKEAEAEMQERYFEPLVKKEQMEEKMRNIREVKCRVVTCKTCAYTHFKLLETCVSEQHEYHWHDGVKRFFKCPCGNRSISLDRLPNKHCSNCGLYKWERDGMLKEKTGPKIGGETLLPRGEEHAKFLNSLK

SEQ ID NO: 10368 - protein, 635 aa, Homo sapiens
MREQLKGHETQTTCWDHPKMTELYQSLADLNNVRFSAYRTAMKLRRLQKALCLDLLSLSAACDALDQHNLKQNDQPMDILQIINCLTTIYDRLEQEHNNLVNVPLCVDMCLNWLLNVYDTGRTGRIRVLSFKTGIISLCKAHLEDKYRYLFKQVASSTGFCDQRRLGLLLHDSIQIPRQLGEVASFGGSNIEPSVRSCFQFANNKPEIEAALFLDWMRLEPQSMVWLPVLHRVAAAETAKHQAKCNICKECPIIGFRYRSLKHFNYDICQSCFFSGRVAKGHKMHYPMVEYCTPTTSGEDVRDFAKVLKNKFRTKRYFAKHPRMGYLPVQTVLEGDNMETPVTLINFWPVDSAPASSPQLSHDDTHSRIEHYASRLAEMENSNGSYLNDSISPNESIDDEHLLIQHYCQSLNQDSPLSQPRSPAQILISLESEERGELERILADLEEENRNLQAEYDRLKQQHEHKGLSPLPSPPEMMPTSPQSPRDAELIAEAKLLRQHKGRLEARMQILEDHNKQLESQLHRLRQLLEQPQAEAKVNGTTVSSPSTSLQRSDSSQPMLLRVVGSQTSDSMGEEDLLSPPQDTSTGLEEVMEQLNNSFPSSRGHNVGSLFHMADDLGRAMESLVSVMTDEEGAE

SEQ ID NO: 10369 - protein, 702 aa, Homo sapiens
MPINKSEKPESCDNVKVVVRCRPLNEREKSMCYKQAVSVDEMRGTITVHKTDSSNEPPKTFTFDTVFGPESKQLDVYNLTARPIIDSVLEGYNGTIFAYGQTGTGKTFTMEGVRAIPELRGIIPNSFAHIFGHIAKAEGDTRFLVRVSYLEIYNEEVRDLLGKDQTQRLEVKERPDVGVYIKDLSAYVVNNADDMDRIMTLGHKNRSVGATNMNEHSSRSHAIFTITIECSEKGIDGNMHVRMGKLHLVDLAGSERQAKTGATGQRLKEATKINLSLSTLGNVISALVDGKSTHVPYRNSKLTRLLQDSLGGNSKTMMCANIGPADYNYDETISTLRYANRAKNIKNKARINEDPKDALLRQFQKEIEELKKKLEEGEEISGSDISGSEEDDDEEGEVGEDGEKRKKRRDQAGKKKVSPDKMIEMQAKIDEERKALETKLDMEEEERNKARAELEKREKDLLKAQQEHQSLLEKLSALEKKVIVGGVDLLAKAEEQEKLLEESNMELEERRKRAEQLRRELEEKEQERLDIEEKYTSLQEEAQGKTKKLKKVWTMLMAAKSEMADLQQEHQREIEGLLENIRQLSRELRLQMLIIDNFIPRDYQEMIENYVHWNEDIGEWQLKCVAYTGNNMRKQTPVPDKKEKDPFEVDLSHVYLAYTEESLRQSLMKLERPRTSKGKARPKTGRRKRSAKPETVIDSLLQ

SEQ ID NO: 10370 - protein, 348 aa, Homo sapiens
MHQDGISSMNQLGGLFVNGRPLPLDTRQQIVRLAVSGMRPCDISRILKVSNGCVSKILGRYYRTGVLEPKGIGGSKPRLATPPVVARIAQLKGECPALFAWEIQRQLCAEGLCTQDKTPSVSSINRVLRALQEDQGLPCTRLRSPAVLAPAVLTPHSGSETPRGTHPGTGHRNRTIFSPSQAEALEKEFQRGQYPDSVARGKLATATSLPEDTVRVWFSNRRAKWRRQEKLKWEMQLPGASQGLTVPRVAPGIISAQQSPGSVPTAALPALEPLGPSCYQLCWATAPERCLSDTPPKACLKPCWDCGSFLLPVIAPSCVDVAWPCLDASLAHHLIGGAGKATPTHFSH

SEQ ID NO: 10371 - protein, 1989 aa, Homo sapiens
MATADTPAPASSGLSPKEEGELEDGEISDDDNNSQIRSRSSSSSSGGGLLPYPRRRPPHSARGGGSGGGGGSSSSSSSSQQQLRNFSRSRHASERGHLRGPSSYRPKEPFRSHPPSVRMPSSSLSESSPRPSFWERSHLALDRFRFRGRPYRGGSRWSRGRGVGERGGKPGCRPPLGGGAGSGFSSSQSWREPSPPRKSSKSFGRSPSRKQNYSSKNENCVEETFEDLLLKYKQIQLELECINKDEKLALSSKEENVQEDPKTLNFEDQTSTDNVSITKDSSKEVAPEEKTQVKTFQAFELKPLRQKLTLPGDKNRLKKVKDGAKPLSLKSDTTDSSQGLQDKEQNLTRRISTSDILSEKKLGEDEEELSELQLRLLALQSASKKWQQKEQQVMKESKEKLTKTKTVQQKVKTSTKTHSAKKVSTTAKQALRKQQTKAWKKLQQQKEQERQKEEDQRKQAEEEERRKREEEIRKIRDLSNQEEQYNRFMKLVGGKRRSRSKSSDPDLRRSLDKQPTDSGGGIYQYDNYEEVAMDTDSETSSPAPSPVQPPFFSECSLGYFSPAPSLSLPPPPQVSSLPPLSQPYVEGLCVSLEPLPPLPPLPPLPPEDPEQPPKPPFADEEEEEEMLLREELLKSLANKRAFKPEETSSNSDPPSPPVLNNSHPVPRSNLSIVSINTVSQPRIQNPKFHRGPRLPRTVISLPKHKSVVVTLNDSDDSESDGEASKSTNSVFGGLESMIKEARRTAEQASKPKVPPKSEKENDPLRTPEALPEEKKIEYRLLKEEIANREKQRLIKSDQLKTSSSSPANSDVEIDGIGRIAMVTKQVTDAESKLKKHRILLMKDESVLKNLVQQEAKKKESVRNAEAKITKLTEQLQATEKILNVNRMFLKKLQEQIHRVQQRVTIKKALTLKYGEELARAKAVASKEIGKRKLEQDRFGPNKMMRLDSSPVSSPRKHSAELIAMEKRRLQKLEYEYALKIQKLKEARALKAKEQQNISPVVEEEPEFSLPQPSLHDLTQDKLTLDTEENDVDDEILSGSSRERRRSFLESNYFTKPNLKHTDTANKECINKLNKNTVEKPELFLGLKIGELQKLYSKADSLKQLILKTTTGITEKVLHGQEISVDVDFVTAQSKTMEVKPCPFRPYHSPLLVFKSYRFSPYYRTKEKLPLSSVSYSNMIEPDQCFCRFDLTGTCNDDDCQWQHIQDYTLSRKQLFQDILSYNLSLIGCAETSTNEEITASAEKYVEKLFGVNKDRMSMDQMAVLLVSNINESKGHTPPFTTYKDKRKWKPKFWRKPISDNSFSSDEEQSTGPIKYAFQPENQINVPALDTVVTPDDVRYFTNETDDIANLEASVLENPSHVQLWLKLAYKYLNQNEGECSESLDSALNVLARALENNKDNPEIWCHYLRLFSKRGTKDEVQEMCETAVEYAPDYQSFWTFLHLESTFEEKDYVCERMLEFLMGAAKQETSNILSFQLLEALLFRVQLHIFTGRCQSALAILQNALKSANDGIVAEYLKTSDRCLAWLAYIHLIEFNILPSKFYDPSNDNPSRIVNTESFVMPWQAVQDVKTNPDMLLAVFEDAVKACTDESLAVEERIEACLPLYTNMIALHQLLERYEAAMELCKSLLESCPINCQLLEALVALYLQTNQHDKARAVWLTAFEKNPQNAEVFYHMCKFFILQNRGDNLLPFLRKFIASFFKPGFEKYNNLDLFRYLLNIPGPIDIPSRLCKGNFDDDMFNHQVPYLWLIYCLCHPLQSSIKETVEAYEAALGVAMRCDIVQKIWMDYLVFANNRAAGSRNKVQEFKFFTDLVNRCLVTVPARYPIPFSSADYWSNYEFHNRVIFFYLSCVPKTQHSKTLERFCSVMPANSGLALRLLQHEWEESNVQILKLQAKMFTYNIPTCLATWKIAIAAEIVLKGQREVHRLYQRALQKLPLCASLWKDQLLFEASEGGKTDNLRKLVSKCQEIGVSLNELLNLNSNKTESKNH

SEQ ID NO: 10372 - protein, 699 aa, Homo sapiens
MPINKSEKPESCDNVKVVVRCRPLNEREKSMCYKQAVSVDEMRGTITVHKTDSSNEPPKTFTFDTVFGPESKQLDVYNLTARPIIDSVLEGYNGTIFAYGQTGTGKTFTMEGVRAIPELRGIIPNSFAHIFGHIAKAEGDTRFLVRVSYLEIYNEEVRDLLGKDQTQRLEVKERPDVGVYIKDLSAYVVNNADDMDRIMTLGHKNRSVGATNMNEHSSRSHAIFTITIECSEKGIDGNMHVRMGKLHLVDLAGSERQAKTGATGQRLKEATKINLSLSTLGNVISALVDGKSTHVPYRNSKLTRLLQDSLGGNSKTMMCANIGPADYNYDETISTLRYANRAKNIKNKARINEDPKDALLRQFQKEIEELKKKLEEGEEISGSDISGSEEDDDEEGEVGEDGEKRKKRRGKKKVSPDKMIEMQAKIDEERKALETKLDMEEEERNKARAELEKREKDLLKAQQEHQSLLEKLSALEKKVIVGGVDLLAKAEEQEKLLEESNMELEERRKRAEQLRRELEEKEQERLDIEEKYTSLQEEAQGKTKKLKKVWTMLMAAKSEMADLQQEHQREIEGLLENIRQLSRELRLQMLIIDNFIPRDYQEMIENYVHWNEDIGEWQLKCVAYTGNNMRKQTPVPDKKEKDPFEVDLSHVYLAYTEESLRQSLMKLERPRTSKGKARPKTGRRKRSAKPETVIDSLLQ

SEQ ID NO: 10373 - protein, 2873 aa, Homo sapiens
MSSPRLIPLWKDLKLLLNDTINKSKQPSEDPKNCLIVLSDRSQAVAWMKSKTEDMVEKRTFSMTERLPPIQSMVHAGSFHILVVYCGDLILRLFGDHFRAFKPLGKVPCRFNISCLCYDPEMKMLLSGILGAVVTWVIELGGTGLQIAHMVSMPGDELVQDIVLNGPSGSLLALCETVVRVLMHQGKGQLGEVKRFTSTSSGSSITCCFTCFDQGFLYAGNQAGEIQVWSLQQGHPLHSFQAHQSGVICIRSRPEAHTLLTAGSDSLIKEWNLTSGSLLRRLELGEELYRLQFIDSITFFCQTAHSFSLHRLPCFYSLFNVCGSAPQQLRRVCCGNNWFRILCTTEDGLLRFVSPVTGDLLVITWPFSILDQAVDWAYDPGKEELFVATGSSEVLVFDTTRCPCPAKYLLGTSPNSQDFVQCLAYGHFNLGRGLEGLIFSGHQSGVIRVLSQHSCARLEKFMHFGAVLALSTLSGGIFGGQGNSLLCSYGMDDYVHLSEAVLDGVKVQLRPLASILSSCHLTHLILLPKSVGAITETNCLRLWKFHDFLSSGSQNGLKFIETLPLHLCAITSFDVCLSLSLFVTGSADGSVRIWDFHGRLIGILDSSLHFGPVCFANDRGDLLVTFNQSLYLVSCLKLLPPALLTRLSFMSISDEVLEVPKPFIPSFFFSFETMFVPKYIYPGQAQQKLVGLEKLVNNRAIAFDHSVPHVIEEDEEGSPVLLRSSMHYSLQDMEDWMQVSKRYQCHYVLPPQLQLTSWDGLNPYQILRYYFGHGREWLFAPDCYIPNSVIRARLWPEGTPIYLQCNLHAPQRELEWDRSQEFFFWHSRVRAISNTEYPKNKEEDEHFLEMRLSKDVTYSVLTDGANRSWLGRKMSEITINSMIETMLNIMVHASLLKYQCCVGALGQIFASYQVSPALRSETARRLLNDTTNSNPLIRELAWEGLKRLGMITHLFAMPLAQGLMDKDERVRIKTLSLMAEIGIHSRTSLLQLTQKQETFREMQQQMIGEEPLDHLLGMRATDLQILSTQVEQRLNENLTLSHRDEKPAFSLDVSMPSELKSSLKPPTVSEESEVAIKPSKGQRRGQAGVKKHSQKWLRGLKKTKERDSKQMSTEPGLLEDESGTEAAPIEMEEASVYSQWSSSTSVIKLSKDVDSQEKDISKDHIALTLKRLQKIRDKRDKKATAQKLKKKHKKKGKEAKVINEETTPPVMEQPVTKKVKIQGRGASGISGRRSTAGDGSSWRDDLCRLMALRISGSQTKMSENLNAELVTFAQEMLVDRHPSWELFQEICPLLKKESKVLLEDLDWDVVPPEKKPIFIQEGAIREDMIQGVTQEVIRHKEVMPREEEQAQKKARDMLGLEETQVILKKGKKVIFLEPGNVTMGKEISKKEEKKTFQKSPKQGRKAVQKERKVGKIKREMTKEERDMSEEVEEMATLEEKVVKQEGKLVMIERTPSWQDWKKAWDEWKQVHGETRKSWKAWKEEWEKRLLQEEEKLHQAGEKLSPEEEMLQEDKKLKWEEWKQVWENMLSSKSKEQQYKDEEEVTLEEEVSREGEEKEQQVTEEQRHIQEEHKWARIHRKRARAEKKRAQEERKLAQEEEKLAQEERQLAQEERKLAQAYVKITQDDREMAQAEGKFAQKEETLAQRGEKLSQEAEKLAQKRKKLAKKWEKVAREEEKLAKKGGKLAEVKNILAQKVEELPQREQNLDWQEKELAQELEELEWDMEELSWKEEELNQEEGKLVEEKKKLAEEEEALAWQREKLSEEETKLAQEEELLIQEKEKLAQHKEKMPEEEERLGRKREQLIEKKMKLAQKRERWINSMEELTKNKMILYQKKNLAQEKKNLAQEKEKLAQRKENLLYNKERLTHSKKQLVQVKNKLGMFNKILAQVEEKLTQEKETVIKKKEKLAETEKKLVQVEDSLAKKQEKLAQEKMKLALEKAMVQGKKRLRGELDIAKEEKALNLEMKRLAEEKMRLVEGKETLSKGETPETSRQRKMTQVEQELFERKLSLEEKILLHEDRILAMEESEIAKGKLEFTRGQRIFVQGQRKLAKASRKLIKKRESLSKEPAKLNKILKALQKLTRDERKLTQEEIKMTKMKRALFVKERRLSIEQSKLDIKEWDFSEKRSELTKDEKKLARKQRKLANKMRRMINKEEKMTEEESKLARKHSEVILDDEEEGGIEEEEVIPFLKRRWRKRKEAKRGDKPKEKFSSQVDEVESEEHFSEEMESLLDELEKQESLSSEEEEEREEEEEREEEEEREEEEERKEEEEGEEKQVEKEEEEKKKKKKEKKKEEVQEKEEVFEEKEEIMSEEETESLSDEEEEEESCSLEEEVDREKEILKKEKQFKLQEQRRKSLRGRERVLSILRGVPHGKGRAIRLGVLKSPLKKLMSTALEMKEKTPVPVPEKQISWEDKKATVVEIPRKFLGTMDKEREVMGKYEPIPPHVLGTVLESQAQDLKTPFMSHILRRTVEAEELQHKPLGAWWKWFLQHPPLMGQTEVQLPLSQIPAKEQHADVSLSDVEWIRHVLERMEAGEQLSRDGFHRLCQLLKDLASKGNLEWLHLAKHEAIVYRHRQALESQDTRISSRQSMSPKYLKVIPPIKAKEKESWPKPLAVPTQKSPLATKRIPDPRAKNWHLLGEPYRSERAQQISIAHKEMEMQYFYPATRDIFPSAHASVEKQTLALMFQKDFWDFKDKRRFPKLPKLEKKTQPISKKKEELPLWETFVALYHVLRMLQQRYPKDSTAWMEQFYQLMDLYQLKSPRIQKLLQELLMREEPQPQEIIYEEALKATELVPGERLFCCLFCGSSHTPRSPQEFQGAVPLPWQNCVRTILPVGIARYGILELAWKSLPEADLHLTKALTHTVAPTL

SEQ ID NO: 10374 - protein, 571 aa, Homo sapiens
MSHQPLSCLTEKEDSPSESTGNGPPHLAHPNLDTFTPEELLQQMKELLTENHQLKEAMKLNNQAMKGRFEELSAWTEKQKEERQFFEIQSKEAKERLMALSHENEKLKEELGKLKGKSERSSEDPTDDSRLPRAEAEQEKDQLRTQVVRLQAEKADLLGIVSELQLKLNSSGSSEDSFVEIRMAEGEAEGSVKEIKHSPGPTRTVSTGTSRSADGAKNYFEHEELTVSQLLLCLREGNQKVERLEVALKEAKERVSDFEKKTSNRSEIETQTEGSTEKENDEEKGPETVGSEVEALNLQVTSLFKELQEAHTKLSEAELMKKRLQEKCQALERKNSAIPSELNEKQELVYTNKKLELQVESMLSEIKMEQAKTEDEKSKLTVLQMTHNKLLQEHNNALKTIEELTRKESEKVDRAVLKELSEKLELAEKALASKQLQMDEMKQTIAKQEEDLETMTILRAQMEVYCSDFHAERAAREKIHEEKEQLALQLAVLLKENDAFEDGGRQSLMEMQSRHGARTSDSDQQAYLVQRGAEDRDWRQQRNIPIHSCPKCGEVLPDIDTLQIHVMDCII

SEQ ID NO: 10375 - protein, 451 aa, Homo sapiens
MNQKNVLQGQHEADKIWSKEGFYAVVIFLSIFVIIVTCLMILYRLKERFQLSLRQDKEKNQEIHLSPITLQPALSEAKTVHSMVQPEQAPKVLNVVVDPQGRGAPEIKATTATSVCPSPFKMKPIGLQERRGSNVSLTLDMSSLGNIEPFVSIPTPREKVAMEYLQSASRILTRSQLRDVVASSHLLQSEFMEIPMNFVDPKEIDIPRHGTKNRYKTILPNPLSRVCLRPKNVTDSLSTYINANYIRGYSGKEKAFIATQGPMINTVDDFWQMVWQEDSPVIVMITKLKEKNEKCVLYWPEKRGIYGKVEVLVISVNECDNYTIRNLVLKQGSHTQHVKHYWYTSWPDHKTPDSAQPLLQLMLDVEEDRLASQGRGPVVVHCSAGIGRTGCFIATSIGCQQLKEEGVVDALSIVCQLRMDRGGMVQTSEQYEFVHHALCLYESRLSAETVQ

SEQ ID NO: 10376 - protein, 505 aa, Homo sapiens
MVSNHYFLLCVNLPLREIHTPGAVQVSRRTISSNSFSPEVFVLPVDVEKENAHFYVADMIISAMEKMKCNILSQQQTESWSKEVSGLLGSDQPDSEMTFDTNIKQESGSSTSSYSGYEGCAVLQVSPVTETRTYHDVKEICKCDVDEFVILELGDFNDITETCSCSCSSSKSVTYEPDFNSAELLAKELYRVFQKCWILSVVNSQLAGSLSAAGSIVVNEECVRKDFESSMNVVQEIKFKSRIRGTEDWAPPRFQIIFNIHPPLKRDLVVAAQNFFCAGCGTPVEPKFVKRLRYCEYLGKYFCDCCHSYAESCIPARILMMWDFKKYYVSNFSKQLLDSIWHQPIFNLLSIGQSLYAKAKELDRVKEIQEQLFHIKKLLKTCRFANSALKEFEQVPGHLTDELHLFSLEDLVRIKKGLLAPLLKDILKASLAHVAGCELCQGKGFICEFCQNTTVIFPFQTATCRRCSACRACFHKQCFQSSECPRCARITARRKLLESVASAAT

SEQ ID NO: 10377 - protein, 595 aa, Homo sapiens
MVSNHYFLLCVNLPLREIHTPGPSPSCLGDSLAETTLSEDTTDSVGSASPHGSSEKSSSFSLSSTEVHMVRPGYSHRVSLPTSPGILATSPYPETDSAFFEPSHLTSAADEGAVQVSRRTISSNSFSPEVFVLPVDVEKENAHFYVADMIISAMEKMKCNILSQQQTESWSKEVSGLLGSDQPDSEMTFDTNIKQESGSSTSSYSGYEGCAVLQVSPVTETRTYHDVKEICKCDVDEFVILELGDFNDITETCSCSCSSSKSVTYEPDFNSAELLAKELYRVFQKCWILSVVNSQLAGSLSAAGSIVVNEECVRKDFESSMNVVQEIKFKSRIRGTEDWAPPRFQIIFNIHPPLKRDLVVAAQNFFCAGCGTPVEPKFVKRLRYCEYLGKYFCDCCHSYAESCIPARILMMWDFKKYYVSNFSKQLLDSIWHQPIFNLLSIGQSLYAKAKELDRVKEIQEQLFHIKKLLKTCRFANSALKEFEQVPGHLTDELHLFSLEDLVRIKKGLLAPLLKDILKASLAHVAGCELCQGKGFICEFCQNTTVIFPFQTATCRRCSACRACFHKQCFQSSECPRCARITARRKLLESVASAAT

SEQ ID NO: 10378 - protein, 635 aa, Homo sapiens
MVSQSTVRQDSPVEPWEGISDHSGIIDGSPRLLNTDHPPCQLDIRLMRHKAVWINPQDVQQQPQDLQSQVPAAGNSGTHFVTDAASPSGPSPSCLGDSLAETTLSEDTTDSVGSASPHGSSEKSSSFSLSSTEVHMVRPGYSHRVSLPTSPGILATSPYPETDSAFFEPSHLTSAADEGAVQVSRRTISSNSFSPEVFVLPVDVEKENAHFYVADMIISAMEKMKCNILSQQQTESWSKEVSGLLGSDQPDSEMTFDTNIKQESGSSTSSYSGYEGCAVLQVSPVTETRTYHDVKEICKCDVDEFVILELGDFNDITETCSCSCSSSKSVTYEPDFNSAELLAKELYRVFQKCWILSVVNSQLAGSLSAAGSIVVNEECVRKDFESSMNVVQEIKFKSRIRGTEDWAPPRFQIIFNIHPPLKRDLVVAAQNFFCAGCGTPVEPKFVKRLRYCEYLGKYFCDCCHSYAESCIPARILMMWDFKKYYVSNFSKQLLDSIWHQPIFNLLSIGQSLYAKAKELDRVKEIQEQLFHIKKLLKTCRFANSCVKERALFVNFARIRLSSSHFRQQHVEDVQRAGLAFTNSASSPPSAPGVRGSQRGENFWKVWPLQQHDAPEYCEKDCSTCLMITPICVYYW

SEQ ID NO: 10379 - protein, 370 aa, Homo sapiens
MLPRLICINDYEQHAKSVLPKSIYDYYRSGANDEETLADNIAAFSRWKLYPRMLRNVAETDLSTSVLGQRVSMPICVGATAMQRMAHVDGELATVRACQSLGTGMMLSSWATSSIEEVAEAGPEALRWLQLYIYKDREVTKKLVRQAEKMGYKAIFVTVDTPYLGNRLDDVRNRFKLPPQLRMKNFETSTLSFSPEENFGDDSGLAAYVAKAIDPSISWEDIKWLRRLTSLPIVAKGILRGDDAREAVKHGLNGILVSNHGARQLDGVPATIDVLPEIVEAVEGKVEVFLDGGVRKGTDVLKALALGAKAVFVGRPIVWGLAFQGEKGVQDVLEILKEEFRLAMALSGCQNVKVIDKTLVRKNPLAVSKI

SEQ ID NO: 10380 - protein, 447 aa, Homo sapiens
MIISAMEKMKCNILSQQQTESWSKEVSGLLGSDQPDSEMTFDTNIKQESGSSTSSYSGYEGCAVLQVSPVTETRTYHDVKEICKCDVDEFVILELGDFNDITETCSCSCSSSKSVTYEPDFNSAELLAKELYRVFQKCWILSVVNSQLAGSLSAAGSIVVNEECVRKDFESSMNVVQEIKFKSRIRGTEDWAPPRFQIIFNIHPPLKRDLVVAAQNFFCAGCGTPVEPKFVKRLRYCEYLGKYFCDCCHSYAESCIPARILMMWDFKKYYVSNFSKQLLDSIWHQPIFNLLSIGQSLYAKAKELDRVKEIQEQLFHIKKLLKTCRFANSALKEFEQVPGHLTDELHLFSLEDLVRIKKGLLAPLLKDILKASLAHVAGCELCQGKGFICEFCQNTTVIFPFQTATCRRCSACRACFHKQCFQSSECPRCARITARRKLLESVASAAT

SEQ ID NO: 10381 - protein, 525 aa, Homo sapiens
MAGLWLGLVWQKLLLWGAASALSLAGASLVLSLLQRVASYARKWQQMRPIPTVARAYPLVGHALLMKPDGREFFQQIIEYTEEYRHMPLLKLWVGPVPMVALYNAENVEVILTSSKQIDKSSMYKFLEPWLGLGLLTSTGNKWRSRRKMLTPTFHFTILEDFLDIMNEQANILVKKLEKHINQEAFNCFFYITLCALDIICETAMGKNIGAQSNDDSEYVRAVYRMSEMIFRRIKMPWLWLDLWYLMFKEGWEHKKSLQILHTFTNSVIAERANEMNANEDCRGDGRGSAPSKNKRRAFLDLLLSVTDDEGNRLSHEDIREEVDTFMFEGHDTTAAAINWSLYLLGSNPEVQKKVDHELDDVFGKSDRPATVEDLKKLRYLECVIKETLRLFPSVPLFARSVSEDCEVAGYRVLKGTEAVIIPYALHRDPRYFPNPEEFQPERFFPENAQGRHPYAYVPFSAGPRNCIGQKFAVMEEKTILSCILRHFWIESNQKREELGLEGQLILRPSNGIWIKLKRRNADER

SEQ ID NO: 10382 - protein, 506 aa, Homo sapiens
MQKPPLLLRRPLPPKFTKLSLHEKKTHTAKTGKIESLHVAFTEDETTSIKMDRTRFPDVLRNQSLTPINIQNIFLDHCVQERVTAISSPQKSTKHVREQIPDTATGSIFFPHCNSASTRIFGKQTNKMESSRKFKTMKDVYTEKRLENILILSSKFSKPKSTPGSVIAQKLEKMHPKHQPLPESPGYTYQHISRDLSATVPSPPPMTVSMKPEGQWPEHFKSTATLTLRVTEFPGFVSLPTPVLPRKPHRQSVIETLVTENGNIESVPKQIPPRPPEGLTKTEKIESEIHVVRGEGFKTVAATRYETITAMTNLAIVNCQVYGRNALNLKGFFILNCPDLTPLAFQLIYLNLSFNDLHYFPTEILCLKNLQILKLRNNPIKEIPSEIQQLEFLRIFTIAFNLITVLPIGLFSLSYLEELDVSYNELTFIPNEIQKLRSLEKLTVDGNELSFFPHGILKLNLTKIQFENNFTHPCFWRDNYLNNPQQLTQIISLFIVQNKLHKFYDK

SEQ ID NO: 10383 - protein, 1749 aa, Homo sapiens
MSDTKVKVAVRVRPMNRRELELNTKCVVEMEGNQTVLHPPPSNTKQGERKPPKVFAFDYCFWSMDESNTTKYAGQEVVFKCLGEGILEKAFQGYNACIFAYGQTGSGKSFSMMGHAEQLGLIPRLCCALFKRISLEQNESQTFKVEVSYMEIYNEKVRDLLDPKGSRQSLKVREHKVLGPYVDGLSQLAVTSFEDIESLMSEGNKSRTVAATNMNEESSRSHAVFNIIITQTLYDLQSGNSGEKVSKVSLVDLAGSERVSKTGAAGERLKEGSNINKSLTTLGLVISSLADQAAGKGKSKFVPYRDSVLTWLLKDNLGGNSQTSMIATISPAADNYEETLSTLRYADRAKRIVNHAVVNEDPNAKVIRELREEVEKLREQLSQAEAMKAPELKEKLEESEKLIKELTVTWEEKLRKTEEIAQERQRQLESMGISLEMSGIKVGDDKCYLVNLNADPALNELLVYYLKDHTRVGADTSQDIQLFGIGIQPQHCEIDIASDGDVTLTPKENARSCVNGTLVCSTTQLWHGDRILWGNNHFFRINLPKRKRRDWLKDFEKETGPPEHDLDAASEASSEPDYNYEFAQMEVIMKTLNSNDPVQNVVQVLEKQYLEEKRSALEEQRLMYERELEQLRQQLSPDRQPQSSGPDRLAYSSQTAQQKVTQWAEERDELFRQSLAKLREQLVKANTLVREANFLAEEMSKLTDYQVTLQIPAANLSANRKRGAIVSEPAIQVRRKGKSTQVWTIEKLENKLIDMRDLYQEWKEKVPEAKRLYGKRGDPFYEAQENHNLIGVANVFLECLFCDVKLQYAVPIISQQGEVAGRLHVEVMRVTGAVPERVVEDDSSENSSESGSLEVVDSSGEIIHRVKKLTCRVKIKEATGLPLNLSNFVFCQYTFWDQCESTVAAPVVDPEVPSPQSKDAQYTVTFSHCKDYVVNVTEEFLEFISDGALAIEVWGHRCAGNGSSIWEVDSLHAKTRTLHDRWNEVTRRIEMWISILELNELGEYAAVELHQAKDVNTGGIFQLRQGHSRRVQVTVKPVQHSGTLPLMVEAILSVSIGCVTARSTKLQRGLDSYQEEDLNCVRERWSDALIKRREYLDEQIKKVSNKTEKTEDDVEREAQLVEQWVGLTEERNAVLVPAPGSGIPGAPADWIPPPGMETHIPVLFLDLNADDLSANEQLVGPHASGVNSILPKEHGSQFFYLPIIKHSDDEVSATASWDSSVHDSVHLNRVTPQNERIYLIVKTTVQLSHPAAMELVLRKRIAANIYNKQSFTQSLKRRISLKNIFYSCGVTYEIVSNIPKATEEIEDRETLALLAARSENEGTSDGETYIEKYTRGVLQVENILSLERLRQAVTVKEALSTKARHIRRSLSTPNVHNVSSSRPDLSGFDEDDKGWPENQLDMSDYSSSYQDVACYGTLPRDSPRRNKEGCTSETPHALTVSPFKAFSPQPPKFFKPLMPVKEEHKKRIALEARPLLSQEDSEEEENELEAINRKLISSQPYVPVEFADFSVYNASLENREWFSSKVDLSNSRVLEKEVSRSPTTSSITSGYFSHSASNATLSDMVVPSSDSSDQLAIQTKDADSTEHSTPSLVHDFRPSSNKELTEVEKGLVKDKIIVVPLKENSALAKGSPSSQSIPEKNSKSLCRTGSCSELDACPSKISQPARGFCPREVTVEHTTNILEDHSFTEFMGVSEGKDFDGLTDSSAGELSSRRSLPNKTGGKTVSDGLHHPSQLHSKLENDQGGTTSR

SEQ ID NO: 10384 - protein, 1312 aa, Homo sapiens
MSRIEKMSILGVRSFGIEDKDKQIITFFSPLTILVGPNGAGKTTIIECLKYICTGDFPPGTKGNTFVHDPKVAQETDVRAQIRLQFRDVNGELIAVQRSMVCTQKSKKTEFKTLEGVITRTKHGEKVSLSSKCAEIDREMISSLGVSKAVLNNVIFCHQEDSNWPLSEGKALKQKFDEIFSATRYIKALETLRQVRQTQGQKVKEYQMELKYLKQYKEKACEIRDQITSKEAQLTSSKEIVKSYENELDPLKNRLKEIEHNLSKIMKLDNEIKALDSRKKQMEKDNSELEEKMEKVFQGTDEQLNDLYHNHQRTVREKERKLVDCHRELEKLNKESRLLNQEKSELLVEQGRLQLQADRHQEHIRARDSLIQSLATQLELDGFERGPFSERQIKNFHKLVRERQEGEAKTANQLMNDFAEKETLKQKQIDEIRDKKTGLGRIIELKSEILSKKQNELKNVKYELQQLEGSSDRILELDQELIKAERELSKAEKNSNVETLKMEVISLQNEKADLDRTLRKLDQEMEQLNHHTTTRTQMEMLTKDKADKDEQIRKIKSRHSDELTSLLGYFPNKKQLEDWLHSKSKEINQTRDRLAKLNKELASSEQNKNHINNELKRKEEQLSSYEDKLFDVCGSQDFESDLDRLKEEIEKSSKQRAMLAGATAVYSQFITQLTDENQSCCPVCQRVFQTEAELQEVISDLQSKLRLAPDKLKSTESELKKKEKRRDEMLGLVPMRQSIIDLKEKEIPELRNKLQNVNRDIQRLKNDIEEQETLLGTIMPEEESAKVCLTDVTIMERFQMELKDVERKIAQQAAKLQGIDLDRTVQQVNQEKQEKQHKLDTVSSKIELNRKLIQDQQEQIQHLKSTTNELKSEKLQISTNLQRRQQLEEQTVELSTEVQSLYREIKDAKEQVSPLETTLEKFQQEKEELINKKNTSNKIAQDKLNDIKEKVKNIHGYMKDIENYIQDGKDDYKKQKETELNKVIAQLSECEKHKEKINEDMRLMRQDIDTQKIQERWLQDNLTLRKRNEELKEVEEERKQHLKEMGQMQVLQMKSEHQKLEENIDNIKRNHNLALGRQKGYEEEIIHFKKELREPQFRDAEEKYREMMIVMRTTELVNKDLDIYYKTLDQAIMKFHSMKMEEINKIIRDLWRSTYRGQDIEYIEIRSDADENVSASDKRRNYNYRVVMLKGDTALDMRGRCSAGQKVLASLIIRLALAETFCLNCGIIALDEPTTNLDRENIESLAHALVEIIKSRSQQRNFQLLVITHDEDFVELLGRSEYVEKFYRIKKNIDQCSEIVKCSVSSLGFNVH

SEQ ID NO: 10385 - protein, 270 aa, Homo sapiens
MLRQLLLAALCLAGPPAPARACQLPSEWRPLSEGCRAELAETIVYARVLALHPEAPGLYNHLPWQYHAGQGGLFYSAEVEMLCDQAWGSMLEVPAGSRLNLTGLGYFSCHSHTVVQDYSYFFFLRMDENYNLLPHGVNFQDAIFPDTQENRRMFSSLFQFSNCSQGQQLATFSSDWEIQEDSRLMCSSVQKALFEEEDHVKKLQQKVATLEKRNRQLRERVKKVKRSLRQARKKGRHLELANQKLSEKLAAGALPHINARGPVRPPYLRG

SEQ ID NO: 10386 - protein, 1770 aa, Homo sapiens
MSDTKVKVAVRVRPMNRRELELNTKCVVEMEGNQTVLHPPPSNTKQGERKPPKVFAFDYCFWSMDESNTTKYAGQEVVFKCLGEGILEKAFQGYNACIFAYGQTGSGKSFSMMGHAEQLGLIPRLCCALFKRISLEQNESQTFKVEVSYMEIYNEKVRDLLDPKGSRQSLKVREHKVLGPYVDGLSQLAVTSFEDIESLMSEGNKSRTVAATNMNEESSRSHAVFNIIITQTLYDLQSGNSGEKVSKVSLVDLAGSERVSKTGAAGERLKEGSNINKSLTTLGLVISSLADQAAGKGKSKFVPYRDSVLTWLLKDNLGGNSQTSMIATISPAADNYEETLSTLRYADRAKRIVNHAVVNEDPNAKVIRELREEVEKLREQLSQAEAMKAPELKEKLEESEKLIKELTVTWEEKLRKTEEIAQERQRQLESMGISLEMSGIKVGDDKCYLVNLNADPALNELLVYYLKDHTRVGADTSQDIQLFGIGIQPQHCEIDIASDGDVTLTPKENARSCVNGTLVCSTTQLWHGDRILWGNNHFFRINLPKRKRRDWLKDFEKETGPPEHDLDAASEASSEPDYNYEFAQMEVIMKTLNSNDPVQNVVQVLEKQYLEEKRSALEEQRLMYERELEQLRQQLSPDRQPQSSGPDRLAYSSQTAQQKVTQWAEERDELFRQSLAKLREQLVKANTLVREANFLAEEMSKLTDYQVTLQIPAANLSANRKRGAIVSEPAIQVRRKGKSTQVWTIEKLENKLIDMRDLYQEWKEKVPEAKRLYGKRGDPFYEAQENHNLIGVANVFLECLFCDVKLQYAVPIISQQGEVAGRLHVEVMRVTGAVPERVVEDDSSENSSESGSLEVVDSSGEIIHRVKKLTCRVKIKEATGLPLNLSNFVFCQYTFWDQCESTVAAPVVDPEVPSPQSKDAQYTVTFSHCKDYVVNVTEEFLEFISDGALAIEVWGHRCAGNGSSIWEVDSLHAKTRTLHDRWNEVTRRIEMWISILELNELGEYAAVELHQAKDVNTGGIFQLRQGHSRRVQVTVKPVQHSGTLPLMVEAILSVSIGCVTARSTKLQRGLDSYQRDDEDGDDMDSYQEEDLNCVRERWSDALIKRREYLDEQIKKVSNKTEKTEDDVEREAQLVEQWVGLTEERNAVLVPAPGSGIPGAPADWIPPPGMETHIPVLFLDLNADDLSANEQLVGPHASGVNSILPKEHGSQFFYLPIIKHSDDEVSATASWDSSVHDSVHLNRVTPQNERIYLIVKTTVQLSHPAAMELVLRKRIAANIYNKQSFTQSLKRRISLKNIFYSCGVTYEIVSNIPKATEEIEDRETLALLAARSENEGTSDGETYIEKYTRGVLQVENILSLERLRQAVTVKEALSTKARHIRRSLSTPNVHNVSSSRPDLSGFDEDDKGWPENQLDMSDYSSSYQDVACYGTLPRDSPRRNKEGCTSETPHALTVSPFKAFSPQPPKFFKPLMPVKEEHKKRIALEARPLLSQEDSEEEENELEAINRKLISSQPYVPVEFADFSVYNASLENREWFSSKVDLSNSRVLEKEVSRSPTTSSITSGYFSHSASNATLSDMVVPSSDSSDQLAIQTKDADSTEHSTPSLVHDFRPSSNKELTEVEKGLVKDKIIVVPLKENSALAKGSPSSQSIPEKNSKSLCRTGSCSELDACPSKISQPARGFCPREVTVEHTTNILEDHSFTEFMGVSEGKDFDGLTDSSAGELSSRRSLPNKTGGKTVSDGLHHPSQLHSKLENDQVIIPEAAFWVLCCQ

SEQ ID NO: 10387 - protein, 379 aa, Homo sapiens
MSRSGTDPQQRQQASEADAAAATFRANDHQHIRYNPLQDEWVLVSAHRMKRPWQGQVEPQLLKTVPRHDPLNPLCPGAIRANGEVNPQYDSTFLFDNDFPALQPDAPSPGPSDHPLFQAKSARGVCKVMCFHPWSDVTLPLMSVPEIRAVVDAWASVTEELGAQYPWVQIFENKGAMMGCSNPHPHCQVWASSFLPDIAQREERSQQAYKSQHGEPLLMEYSRQELLRKERLVLTSEHWLVLVPFWATWPYQTLLLPRRHVRRLPELTPAERDDLASIMKKLLTKYDNLFETSFPYSMGWHGAPTGSEAGANWNHWQLHAHYYPPLLRSATVRKFMVGYEMLAQAQRDLTPEQAAERLRALPEVHYHLGQKDRETATIA

SEQ ID NO: 10388 - protein, 1757 aa, Homo sapiens
MSDTKVKVAVRVRPMNRRELELNTKCVVEMEGNQTVLHPPPSNTKQGERKPPKVFAFDYCFWSMDESNTTKYAGQEVVFKCLGEGILEKAFQGYNACIFAYGQTGSGKSFSMMGHAEQLGLIPRLCCALFKRISLEQNESQTFKVEVSYMEIYNEKVRDLLDPKGSRQSLKVREHKVLGPYVDGLSQLAVTSFEDIESLMSEGNKSRTVAATNMNEESSRSHAVFNIIITQTLYDLQSGNSGEKVSKVSLVDLAGSERVSKTGAAGERLKEGSNINKSLTTLGLVISSLADQAAGKGKSKFVPYRDSVLTWLLKDNLGGNSQTSMIATISPAADNYEETLSTLRYADRAKRIVNHAVVNEDPNAKVIRELREEVEKLREQLSQAEAMKAPELKEKLEESEKLIKELTVTWEEKLRKTEEIAQERQRQLESMGISLEMSGIKVGDDKCYLVNLNADPALNELLVYYLKDHTRVGADTSQDIQLFGIGIQPQHCEIDIASDGDVTLTPKENARSCVNGTLVCSTTQLWHGDRILWGNNHFFRINLPKRKRRDWLKDFEKETGPPEHDLDAASEASSEPDYNYEFAQMEVIMKTLNSNDPVQNVVQVLEKQYLEEKRSALEEQRLMYERELEQLRQQLSPDRQPQSSGPDRLAYSSQTAQQKVTQWAEERDELFRQSLAKLREQLVKANTLVREANFLAEEMSKLTDYQVTLQIPAANLSANRKRGAIVSEPAIQVRRKGKSTQVWTIEKLENKLIDMRDLYQEWKEKVPEAKRLYGKRGDPFYEAQENHNLIGVANVFLECLFCDVKLQYAVPIISQQGEVAGRLHVEVMRVTGAVPERVVEDDSSENSSESGSLEVVDSSGEIIHRVKKLTCRVKIKEATGLPLNLSNFVFCQYTFWDQCESTVAAPVVDPEVPSPQSKDAQYTVTFSHCKDYVVNVTEEFLEFISDGALAIEVWGHRCAGNGSSIWEVDSLHAKTRTLHDRWNEVTRRIEMWISILELNELGEYAAVELHQAKDVNTGGIFQLRQGHSRRVQVTVKPVQHSGTLPLMVEAILSVSIGCVTARSTKLQRGLDSYQEEDLNCVRERWSDALIKRREYLDEQIKKVSNKTEKTEDDVEREAQLVEQWVGLTEERNAVLVPAPGSGIPGAPADWIPPPGMETHIPVLFLDLNADDLSANEQLVGPHASGVNSILPKEHGSQFFYLPIIKHSDDEVSATASWDSSVHDSVHLNRVTPQNERIYLIVKTTVQLSHPAAMELVLRKRIAANIYNKQSFTQSLKRRISLKNIFYSCGVTYEIVSNIPKATEEIEDRETLALLAARSENEGTSDGETYIEKYTRGVLQVENILSLERLRQAVTVKEALSTKARHIRRSLSTPNVHNVSSSRPDLSGFDEDDKGWPENQLDMSDYSSSYQDVACYGTLPRDSPRRNKEGCTSETPHALTVSPFKAFSPQPPKFFKPLMPVKEEHKKRIALEARPLLSQEDSEEEENELEAINRKLISSQPYVPVEFADFSVYNASLENREWFSSKVDLSNSRVLEKEVSRSPTTSSITSGYFSHSASNATLSDMVVPSSDSSDQLAIQTKDADSTEHSTPSLVHDFRPSSNKELTEVEKGLVKDKIIVVPLKENSALAKGSPSSQSIPEKNSKSLCRTGSCSELDACPSKISQPARGFCPREVTVEHTTNILEDHSFTEFMGVSEGKDFDGLTDSSAGELSSRRSLPNKTGGKTVSDGLHHPSQLHSKLENDQVIIPEAAFWVLCCQ

SEQ ID NO: 10389 - protein, 357 aa, Homo sapiens
MARENGESSSSWKKQAEDIKKIFEFKETLGTGAFSEVVLAEEKATGKLFAVKCIPKKALKGKESSIENEIAVLRKIKHENIVALEDIYESPNHLYLVMQLVSGGELFDRIVEKGFYTEKDASTLIRQVLDAVYYLHRMGIVHRDLKPENLLYYSQDEESKIMISDFGLSKMEGKGDVMSTACGTPGYVAPEVLAQKPYSKAVDCWSIGVIAYILLCGYPPFYDENDSKLFEQILKAEYEFDSPYWDDISDSAKDFIRNLMEKDPNKRYTCEQAARHPWIAGDTALNKNIHESVSAQIRKNFAKSKWRQAFNATAVVRHMRKLHLGSSLDSSNASVSSSLSLASQKDCAYVAKPESLS

SEQ ID NO: 10390 - protein, 740 aa, Homo sapiens
MRQTLPLLLLTVLRPSWADPPQEKVPLFRVTQQGPWGSSGSNATDSPCEGLPAADATALTLANRNLERLPGCLPRTLRSLDASHNLLRALSTSELGHLEQLQVLTLRHNRIAALRWGPGGPAGLHTLDLSYNQLAALPPCTGPALSSLRALALAGNPLRALQPRAFACFPALQLLNLSCTALGRGAQGGIAEAAFAGEDGAPLVTLEVLDLSGTFLERVESGWIRDLPKLTSLYLRKMPRLTTLEGDIFKMTPNLQQLDCQDSPALASVATHIFQDTPHLQVLLFQNCNLSSFPPWTLDSSQVLSINLFGNPLTCSCDLSWLLTDAKRTVLSRAADTMCAPAAGSSGPFSASLSLSQLPGVCQSDQSTTLGASHPPCFNRSTYAQGTTVAPSAAPATRPAGDQQSVSKAPNVGSRTIAAWPHSDAREGTAPSTTNSVAGHSNSSVFPRAASTTRTQHRGEHAPELVLEPDISAASTPLASKLLGPFPTSWDRSISSPQPGQRTHATPQAPNPSLSEGEIPVLLLDDYSEEEEGRKEEVGTPHQDVPCDYHPCKHLQTPCAELQRRWRCRCPGLSGEDTIPDPPRLQGVTETTDTSALVHWCAPNSVVHGYQIRYSAEGWAGNQSVVGVIYATARQHPLYGLSPGTTYRVCVLAANRAGLSQPRSSGWRSPCAAFTTKPSFALLLSGLCAASGLLLASTVVLSACLCRRGQTLGLQRCDTHLVAYKNPAFDDYPLGLQTVS

SEQ ID NO: 10391 - protein, 793 aa, Homo sapiens
MNGEYRGRGFGRGRFQSWKRGRGGGNFSGKWREREHRPDLSKTTGKRTSEQTPQFLLSTKTPQSMQSTLDRFIPYKGWKLYFSEVYSDSSPLIEKIQAFEKFFTRHIDLYDKDEIERKGSILVDFKELTEGGEVTNLIPDIATELRDAPEKTLACMGLAIHQVLTKDLERHAAELQAQEGLSNDGETMVNVPHIHARVYNYEPLTQLKNVRANYYGKYIALRGTVVRVSNIKPLCTKMAFLCAACGEIQSFPLPDGKYSLPTKCPVPVCRGRSFTALRSSPLTVTMDWQSIKIQELMSDDQREAGRIPRTIECELVHDLVDSCVPGDTVTITGIVKVSNAEEGSRNKNDKCMFLLYIEANSISNSKGQKTKSSEDGCKHGMLMEFSLKDLYAIQEIQAEENLFKLIVNSLCPVIFGHEAACNVAPRGVYVCGNTTTTSGLTVTLSKDSSSGDFALEAGALVLGDQGICGIDEFDKMGNQHQALLEAMEQQSISLAKAGVVCSLPARTSIIAAANPVGGHYNKAKTVSENLKMGSALLSRFDLVFILLDTPNEHHDHLLSEHVIAIRAGKQRTISSATVARMNSQDSNTSVLEVVSEKPLSERLKVVPGETIDPIPHQLLRKYIGYARQYVYPRLSTEAARVLQDFYLELRKQSQRLNSSPITTRQLESLIRLTEARARLELREEATKEDAEDIVEIMKYSMLGTYSDEFGNLDFERSQHGSGMSNRSTAKRFISALNNVAERTYNNIFQFHQLRQIAKELNIQVADFENFIGSLNDQGYLLKKGPKVYQLQTM

SEQ ID NO: 10392 - protein, 880 aa, Homo sapiens
MNGEYRGRGFGRGRFQSWKRGRGGGNFSGKWREREHRPDLSKTTGKRTSEQTPQFLLSTKTPQSMQSTLDRFIPYKGWKLYFSEVYSDSSPLIEKIQAFEKFFTRHIDLYDKDEIERKGSILVDFKELTEGGEVTNLIPDIATELRDAPEKTLACMGLAIHQVLTKDLERHAAELQAQEGLSNDGETMVNVPHIHARVYNYEPLTQLKNVRANYYGKYIALRGTVVRVSNIKPLCTKMAFLCAACGEIQSFPLPDGKYSLPTKCPVPVCRGRSFTALRSSPLTVTMDWQSIKIQELMSDDQREAGRIPRTIECELVHDLVDSCVPGDTVTITGIVKVSNAEEGSRNKNDKCMFLLYIEANSISNSKGQKTKSSEDGCKHGMLMEFSLKDLYAIQEIQAEENLFKLIVKWSLALSPRLEYSGAISAHCNLHLPSSNSSPTSACRVAGTTGMRHQTQLLLLVKAGLALALFGGSQKYADDKNRIPIRGDPHILVVGDPGLGKSQMLQAACNVAPRGVYVCGNTTTTSGLTVTLSKDSSSGDFALEAGALVLGDQGICGIDEFDKMGNQHQALLEAMEQQSISLAKAGVVCSLPARTSIIAAANPVGGHYNKAKTVSENLKMGSALLSRFDLVFILLDTPNEHHDHLLSEHVIAIRAGKQRTISSATVARMNSQDSNTSVLEVVSEKPLSERLKVVPGETIDPIPHQLLRKYIGYARQYVYPRLSTEAARVLQDFYLELRKQSQRLNSSPITTRQLESLIRLTEARARLELREEATKEDAEDIVEIMKYSMLGTYSDEFGNLDFERSQHGSGMSNRSTAKRFISALNNVAERTYNNIFQFHQLRQIAKELNIQVADFENFIGSLNDQGYLLKKGPKVYQLQTM

SEQ ID NO: 10393 - protein, 695 aa, Homo sapiens
MAETKIIYHMDEEETPYLVKLPVAPERVTLADFKNVLSNRPVHAYKFFFKSMDQDFGVVKEEIFDDNAKLPCFNGRVVSWLVLAEGAHSDAGSQGTDSHTDLPPPLERTGGIGDSRPPSFHPNVASSRDGMDNETGTESMVSHRRERARRRNREEAARTNGHPRGDRRRDVGLPPDSASTALSSELESSSFVDSDEDGSTSRLSSSTEQSTSSRLIRKHKRRRRKQRLRQADRASSFSSITDSTMSLNIVTVTLNMERHHFLGISIVGQSNDRGDGGIYIGSIMKGGAVAADGRIEPGDMLLQVNDVNFENMSNDDAVRVLREIVSQTGPISLTVAKCWDPTPRSYFTVPRADPVRPIDPAAWLSHTAALTGALPRYGTSPCSSAVTRTSSSSLTSSVPGAPQLEEAPLTVKSDMSAVVRVMQLPDSGLEIRDRMWLKITIANAVIGADVVDWLYTHVEGFKERREARKYASSLLKHGFLRHTVNKITFSEQCYYVFGDLCSNLATLNLNSGSSGTSDQDTLAPLPHPAAPWPLGQGYPYQYPGPPPCFPPAYQDPGFSYGSGSTGSQQSEGSKSSGSTRSSRRAPGREKERRAAGAGGSGSESDHTAPSGVGSSWRERPAGQLSRGSSPRSQASATAPGLPPPHPTTKAYTVVGGPPGGPPVRELAAVPPELTGSRQSFQKAMGNPCEFFVDIM

SEQ ID NO: 10394 - protein, 670 aa, Homo sapiens
MAETKIIYHMDEEETPYLVKLPVAPERVTLADFKNVLSNRPVHAYKFFFKSMDQDFGVVKEEIFDDNAKLPCFNGRVVSWLVLAEGAHSDAGSQGTDSHTDLPPPLERTGGIGDSRPPSFHPNVASSRDGMDNETGTESMVSHRRERARRRNREEAARTNGHPRGDRRRDVGLPPDSASTALSSELESSSFVDSDEDGSTSRLSSSTEQSTSSRLIRKHKRRRRKQRLRQADRASSFSSITDSTMSLNIVTVTLNMERHHFLGISIVGQSNDRGDGGIYIGSIMKGGAVAADGRIEPGDMLLQVNDVNFENMSNDDAVRVLREIVSQTGPISLTVAKCWDPTPRSYFTVPRADPVRPIDPAAWLSHTAALTGALPRYELEEAPLTVKSDMSAVVRVMQLPDSGLEIRDRMWLKITIANAVIGADVVDWLYTHVEGFKERREARKYASSLLKHGFLRHTVNKITFSEQCYYVFGDLCSNLATLNLNSGSSGTSDQDTLAPLPHPAAPWPLGQGYPYQYPGPPPCFPPAYQDPGFSYGSGSTGSQQSEGSKSSGSTRSSRRAPGREKERRAAGAGGSGSESDHTAPSGVGSSWRERPAGQLSRGSSPRSQASATAPGLPPPHPTTKAYTVVGGPPGGPPVRELAAVPPELTGSRQSFQKAMGNPCEFFVDIM

SEQ ID NO: 10395 - protein, 377 aa, Homo sapiens
MEALLLGAGLLLGAYVLVYYNLVKAPPCGGMGNLRGRTAVVTGANSGIGKMTALELARRGARVVLACRSQERGEAAAFDLRQESGNNEVIFMALDLASLASVRAFATAFLSSEPRLDILIHNAGISSCGRTREAFNLLLRVNHIGPFLLTHLLLPCLKACAPSRVVVVASAAHCRGRLDFKRLDRPVVGWRQELRAYADTKLANVLFARELANQLEATGVTCYAAHPGPVNSELFLRHVPGWLRPLLRPLAWLVLRAPRGGAQTPLYCALQEGIEPLSGRYFANCHVEEVPPAARDDRAAHRLWEASKRLAGLGPGEDAEPDEDPQSEDSEAPSSLSTPHPEEPTVSQPYPSPQSSPDLSKMTHRIQAKVEPEIQLS

SEQ ID NO: 10396 - protein, 840 aa, Homo sapiens
MNGEYRGRGFGRGRFQSWKRGRGGGNFSGKWREREHRPDLSKTTGKRTSEQTPQFLLSTKTPQSMQSTLDRFIPYKGWKLYFSEVYSDSSPLIEKIQAFEKFFTRHIDLYDKDEIERKGSILVDFKELTEGGEVTNLIPDIATELRDAPEKTLACMGLAIHQVLTKDLERHAAELQAQEGLSNDGETMVNVPHIHARVYNYEPLTQLKNVRANYYGKYIALRGTVVRVSNIKPLCTKMAFLCAACGEIQSFPLPDGKYSLPTKCPVPVCRGRSFTALRSSPLTVTMDWQSIKIQELMSDDQREAGRIPRTIECELVHDLVDSCVPGDTVTITGIVKVSNAEEGSRNKNDKCMFLLYIEANSISNSKGQKTKSSEDGCKHGMLMEFSLKDLYAIQEIQAEENLFKLIVNSLCPVIFGHELVKAGLALALFGGSQKYADDKNRIPIRGDPHILVVGDPGLGKSQMLQAACNVAPRGVYVCGNTTTTSGLTVTLSKDSSSGDFALEAGALVLGDQGICGIDEFDKMGNQHQALLEAMEQQSISLAKAGVVCSLPARTSIIAAANPVGGHYNKAKTVSENLKMGSALLSRFDLVFILLDTPNEHHDHLLSEHVIAIRAGKQRTISSATVARMNSQDSNTSVLEVVSEKPLSERLKVVPGETIDPIPHQLLRKYIGYARQYVYPRLSTEAARVLQDFYLELRKQSQRLNSSPITTRQLESLIRLTEARARLELREEATKEDAEDIVEIMKYSMLGTYSDEFGNLDFERSQHGSGMSNRSTAKRFISALNNVAERTYNNIFQFHQLRQIAKELNIQVADFENFIGSLNDQGYLLKKGPKVYQLQTM

SEQ ID NO: 10397 - protein, 412 aa, Homo sapiens
MEALQKQQAARLAQGVGPLAPACPLLPPQPPLPDHRTLQAPEGALGNVGAEEEEDAEEDEEKREEAGAEEEAAEESRPGAQGPSSPSSQPPGLHPHEWTYEEQFKQLYELDADPKRKEFLDDLFSFMQKRGTPVNRVPIMAKQVLDLYALFRLVTAKGGLVEVINRKVWREVTRGLSLPTTITSAAFTLRTQYMKYLYPYECETRALSSPGELQAAIDSNRREGRRQAYTATPLFGLAGPPPRGAQDPALGPGPAPPATQSSPGPAQGSTSGLPAHACAQLSPSPIKKEESGIPNPCLALPVGLALGPTREKLAPEEPPEKRAVLMGPMDPPRPCMPPSFLPRGKVPLREERLDGPLNLAGSGISSINMALEINGVVYTGVLFARRQPVPASQGPTNPAPPPSTGPPSSILP

SEQ ID NO: 10398 - protein, 1241 aa, Homo sapiens
MALGTTLRASLLLLGLLTEGLAQLAIPASVPRGFWALPENLTVVEGASVELRCGVSTPGSAVQWAKDGLLLGPDPRIPGFPRYRLEGDPARGEFHLHIEACDLSDDAEYECQVGRSEMGPELVSPRVILSILVPPKLLLLTPEAGTMVTWVAGQEYVVNCVSGDAKPAPDITILLSGQTISDISANVNEGSQQKLFTVEATARVTPRSSDNRQLLVCEASSPALEAPIKASFTVNVLFPPGPPVIEWPGLDEGHVRAGQSLELPCVARGGNPLATLQWLKNGQPVSTAWGTEHTQAVARSVLVMTVRPEDHGAQLSCEAHNSVSAGTQEHGITLQVTFPPSAIIILGSASQTENKNVTLSCVSKSSRPRVLLRWWLGWRQLLPMEETVMDGLHGGHISMSNLTFLARREDNGLTLTCEAFSEAFTKETFKKSLILNVKYPAQKLWIEGPPEGQKLRAGTRVRLVCLAIGGNPEPSLMWYKDSRTVTESRLPQESRRVHLGSVEKSGSTFSRELVLVTGPSDNQAKFTCKAGQLSASTQLAVQFPPTNVTILANASALRPGDALNLTCVSVSSNPPVNLSWDKEGERLEGVAAPPRRAPFKGSAAARSVLLQVSSRDHGQRVTCRAHSAELRETVSSFYRLNVLYRPEFLGEQVLVVTAVEQGEALLPVSVSANPAPEAFNWTFRGYRLSPAGGPRHRILSSGALHLWNVTRADDGLYQLHCQNSEGTAEARLRLDVHYAPTIRALQDPTEVNVGGSVDIVCTVDANPILPGMFNWERLGEDEEDQSLDDMEKISRGPTGRLRIHHAKLAQAGAYQCIVDNGVAPPARRLLRLVVRFAPQVEHPTPLTKVAAAGDSTSSATLHCRARGVPNIVFTWTKNGVPLDLQDPRYTEHTYHQGGVHSSLLTIANVSAAQDYALFTCTATNALGSDQTNIQLVSISRPDPPSGLKVVSLTPHSVGLEWKPGFDGGLPQRFCIRYEALGTPGFHYVDVVPPQATTFTLTGLQPSTRYRVWLLASNALGDSGLADKGTQLPITTPGLHQPSGEPEDQLPTEPPSGPSGLPLLPVLFALGGLLLLSNASCVGGVLWQRRLRRLAEGISEKTEAGSEEDRVRNEYEESQWTGERDTQSSTVSTTEAEPYYRSLRDFSPQLPPTQEEVSYSRGFTGEDEDMAFPGHLYDEVERTYPPSGAWGPLYDEVQMGPWDLHWPEDTYQDPRGIYDQVAGDLDTLEPDSLPFELRGHLV

SEQ ID NO: 10399 - protein, 1090 aa, Homo sapiens
MEQPKGVDWTVIILTCQYKDSVQVFQRELEVRQKREQIPAGTLLLAVEDPEKRVGSGGATLNALLVAAEHLSARAGFTWICVGVSLWIRGCHPPGRLPEASVHRAFPLLQVVTSDVLHSAWILILHMGRDFPFDDCGRAFTCLPVENPEAPVEALVCNLDCLLDIMTYRLGPGSPPGVWVCSTDMLLSVPANPGISWDSFRGARVIALPGSPAYAQNHGVYLTDPQGLVLDIYYQGTEAEIQRCVRPDGRVPLVSGVVFFSVETAERLLATHVSPPLDACTYLGLDSGARPVQLSLFFDILHCMAENVTREDFLVGRPPELGQGDADVAGYLQSARAQLWRELRDQPLTMAYVSSGSYSYMTSSASEFLLSLTLPGAPGAQIVHSQVEEQQLLAAGSSVVSCLLEGPVQLGPGSVLQHCHLQGPIHIGAGCLVTGLDTAHSKALHGRELRDLVLQGHHTRLHGSPGHAFTLVGRLDSWERQGAGTYLNVPWSEFFKRTGVRAWDLWDPETLPAEYCLPSARLFPVLHPSRELGPQDLLWMLDHQEDGGEALRAWRASWRLSWEQLQPCLDRAATLASRRDLFFRQALHKARHVLEARQDLSLRPLIWAAVREGCPGPLLATLDQVAAGAGDPGVAARALACVADVLGCMAEGRGGLRSGPAANPEWMRPFSYLECGDLAAGVEALAQERDKWLSRPALLVRAARHYEGAGQILIRQAVMSAQHFVSTEQVELPGPGQWVVAECPARVDFSGGWSDTPPLAYELGGAVLGLAVRVDGRRPIGARARRIPEPELWLAVGPRQDEMTVKIVCRCLADLRDYCQPHAPGALLKAAFICAGIVHVHSELQLSTSSILAGTALAALQRAAGRVVGTEALIHAVLHLEQVLTTGGGWQDQVGGLMPGIKVGRSRAQLPLKVEVEEVTVPEGFVQKLNDHLLLVYTGKTRLARNLLQDVLRSWYARLPAVVQNAHSLVRQTEECAEGFRQGSLPLLGQCLTSYWEQKKLMAPGCEPLTVRRMMDVLAPHVHGQSLAGAGGGGFLYLLTKEPQQKEALEAVLAKTEGLGNYSIHLVEVDTQGLSLKLLGTEASTCCPFP

SEQ ID NO: 10400 - protein, 196 aa, Homo sapiens
MKPRTLVELSKLGLGNETVVQLRTLELPVDYREAKRRVTGIWEDHQPQLVVHVGMDTAAKAIILEQSGKNQGYRDADIRSFWPEGGVCLPGSPDVLESGVCMKAVCKRVAVEGVDVIFSRDAGRYVCDYTYYLSLHHGKGCAALIHVPPLSRGLPASLLGRALRVIIQEMLEEVGKPKHRAQFEENSTMVLPAKGN

SEQ ID NO: 10401 - protein, 712 aa, Homo sapiens
MAQSSPQLDIQVLHDLRQRFPEIPEGVVSQCMLQNNNNLEACCRALSQESSKYLYMEYHSPDDNRMNRNRLLHINLGIHSPSSYHPGDGAQLNGGRTLVHSSSDGHIDPQHAAGKQLICLVQEPHSAPAVVAATPNYNPFFMNEQNRSAATPPSQPPQQPSSMQTGMNPSAMQGPSPPPPPPSYMHIPRYSTNPITVTVSQNLPSGQTVPRALQILPQIPSNLYGSPGSIYIRQTSQSSSGRQTPQSTPWQSSPQGPVPHYSQRPLPVYPHQQNYQPSQYSPKQQQIPQSAYHSPPPSQCPSPFSSPQHQVQPSQLGHIFMPPSPSTTPPHPYQQGPPSYQKQGSHSVAYLPYTASSLSKGSMKKIEITVEPSQRPGTAINRSPSPISNQPSPRNQHSLYTATTPPSSSPSRGISSQPKPPFSVNPVYITYTQPTGPSCTPSPSPRVIPNPTTVFKITVGRATTENLLNLVDQEERSAAPEPIQPISVIPGSGGEKGSHKYQRSSSSGSDDYAYTQALLLHQRARMERLAKQLKLEKEELERLKSEVNGMEHDLMQRRLRRVSCTTAIPTPEEMTRLRSMNRQLQINVDCTLKEVDLLQSRGNFDPKAMNNFYDNIEPGPVVPPKPSKKDSSDPCTIERKARRISVTSKVQADIHDTQAAAADEHRTGSTQSPRTQPRDEDYEGAPWNCDSCTFLNHPALNRCEQCEMPRYT

SEQ ID NO: 10402 - protein, 684 aa, Homo sapiens
MAQSSPQLDIQVLHDLRQRFPEIPEGVVSQCMLQNNNNLEACCRALSQESSKYLYMEYHSPDDNRMNRNRLLHINLGIHSPSSYHPGDGAQLNGGRTLVHSSSDGHIDPQHAAGKQLICLVQEPHSAPAVVAATPNYNPFFMNEQNRSAATPPSQPPQQPSSMQTGMNPSAMQGPSPPPPPPSYMHIPRYSTNPITVTVSQNLPSGQTVPRALQILPQIPSNLYGSPGSIYIRQTSQSSSGRQTPQSTPWQSSPQGPVPHYSQRPLPVYPHQQNYQPSQYSPKQQQIPQSAYHSPPPSQCPSPFSSPQHQVQPSQLGHIFMPPSPSTTPPHPYQQGPPSYQKQGSHSVAYLPYTASSLSKGSMKKIEITVEPSQRPGTAINRSPSPISNQPSPRNQHSLYTATTPPSSSPSRGISSQPKPPFSVNPVYITYTQPTGPSCTPSPSPRVIPNPTTVFKITVGRATTENLLNLVDQEERSAAPEPIQPISVIPGSGGEKGSHKYQRSSSSGSDDYAYTQALLLHQRARMERLAKQLKLEKEELERLKSEVNGMEHDLMQRRLRRVSCTTAIPTPEEMTRLRSMNRQLQINVDCTLKEVDLLQSRDSSDPCTIERKARRISVTSKVQADIHDTQAAAADEHRTGSTQSPRTQPRDEDYEGAPWNCDSCTFLNHPALNRCEQCEMPRYT

SEQ ID NO: 10403 - protein, 1123 aa, Homo sapiens
MLVPLLLQYLETLSGLVDSNLNCGPVLTWMELDNHGRRLLLSEEASLNIPAVAAAHVIKRYTAQAPDELSFEVGDIVSVIDMPPTEDRSWWRGKRGFQVGFFPSECVELFTERPGPGLKADADGPPCGIPAPQGISSLTSAVPRPRGKLAGLLRTFMRSRPSRQRLRQRGILRQRVFGCDLGEHLSNSGQDVPQVLRCCSEFIEAHGVVDGIYRLSGVSSNIQRLRHEFDSERIPELSGPAFLQDIHSVSSLCKLYFRELPNPLLTYQLYGKFSEAMSVPGEEERLVRVHDVIQQLPPPHYRTLEYLLRHLARMARHSANTSMHARNLAIVWAPNLLRSMELESVGMGGAAAFREVRVQSVVVEFLLTHVDVLFSDTFTSAGLDPAGRCLLPRPKSLAGSCPSTRLLTLEEAQARTQGRLGTPTEPTTPKAPASPAERRKGERGEKQRKPGGSSWKTFFALGRGPSVPRKKPLPWLGGTRAPPQPSGSRPDTVTLRSAKSEESLSSQASGAGLQRLHRLRRPHSSSDAFPVGPAPAGSCESLSSSSSSESSSSESSSSSSESSAAGLGALSGSPSHRTSAWLDDGDELDFSPPRCLEGLRGLDFDPLTFRCSSPTPGDPAPPASPAPPAPASAFPPRVTPQAISPRGPTSPASPAALDISEPLAVSVPPAVLELLGAGGAPASATPTPALSPGRSLRPHLIPLLLRGAEAPLTDACQQEMCSKLRGAQGPLGPDMESPLPPPPLSLLRPGGAPPPPPKNPARLMALALAERAQQVAEQQSQQECGGTPPASQSPFHRSLSLEVGGEPLGTSGSGPPPNSLAHPGAWVPGPPPYLPRQQSDGSLLRSQRPMGTSRRGLRGPAQVPTPGFFSPAPRECLPPFLGVPKPGLYPLGPPSFQPSSPAPVWRSSLGPPAPLDRGENLYYEIGASEGSPYSGPTRSWSPFRSMPPDRLNASYGMLGQSPPLHRSPDFLLSYPPAPSCFPPDHLGYSAPQHPARRPTPPEPLYVNLALGPRGPSPASSSSSSPPAHPRSRSDPGPPVPRLPQKQRAPWGPRTPHRVPGPWGPPEPLLLYRAAPPAYGRGGELHRGSLYRNGGQRGEGAGPPPPYPTPSWSLHSEGQTRSYC

SEQ ID NO: 10404 - protein, 677 aa, Homo sapiens
MQPTLLLSLLGAVGLAAVNSMPVDNRNHNEGMVTRCIIEVLSNALSKSSAPPITPECRQVLKTSRKDVKDKETTENENTKFEVRLLRDPADASEAHESSSRGEAGAPGEEDIQGPTKADTEKWAEGGGHSRERADEPQWSLYPSDSQVSEEVKTRHSEKSQREDEEEEEGENYQKGERGEDSSEEKHLEEPGETQNAFLNERKQASAIKKEELVARSETHAAGHSQEKTHSREKSSQESGEETGSQENHPQESKGQPRSQEESEEGEEDATSEVDKRRTRPRHHHGRSRPDRSSQGGSLPSEEKGHPQEESEESNVSMASLGEKRDHHSTHYRASEEEPEYGEEIKGYPGVQAPEDLEWERYRGRGSEEYRAPRPQSEESWDEEDKRNYPSLELDKMAHGYGEESEEERGLEPGKGRHHRGRGGEPRAYFMSDTREEKRFLGEGHHRVQENQMDKARRHPQGAWKELDRNYLNYGEEGAPGKWQQQGDLQDTKENREEARFQDKQYSSHHTAEKRKRLGELFNPYYDPLQWKSSHFERRDNMNDNFLEGEEENELTLNEKNFFPEYNYDWWEKKPFSEDVNWGYEKRNLARVPKLDLKRQYDRVAQLDQLLHYRKKSAEFPDFYDSEEPVSTHQEAENEKDRADQTVLTEDEKKELENLAAMDLELQKIAEKFSQRG

SEQ ID NO: 10405 - protein, 301 aa, Homo sapiens
MLSEGYLSGLEYWNDIHWSCASYNEQVAGEKEEETNSVATLSYSSVDETQVRSLYVSCKSSGKFISSVHSRESQHSRSQRVTVLQTNPNPVFESPNLAAVEICRDASRETYLVPSSCKSICKNYNDLQIAGGQVMAINSVTTDFPSESSFEYGPLLKSSEIPLPMEDSISTQPSDFPQKPIQRYSSYWRITSIKEKSSLQMQNPISNAVLNEYLEQKVVELYKQYIMDTVFHDSSPTQILASELIMTSVDQISLQVSREKNLETSKARDIVFSRLLQLMSTEITEISTPSLHISQYSNVNP

SEQ ID NO: 10406 - protein, 412 aa, Homo sapiens
MQPEGLKCRMEESNAERGTAEPFPRLHNLYSTPRCAQQAALPRLSRRMASQHSYPLNRFSSVPLDPMERPMSQADLELDYNPPRVQLSDEMFVFQDGRWVNENCRLQSPYFSPSASFHHKLHHKRLAKECMLQEENKSLREENKALREENRMLSKENKILQVFWEEHKASLGREESRAPSPLLHKDSASLEVVKKDHVALQVPRGKEDSTLQLLREENRALQQLLEQKQAYWAQAEDTAAPAEESKPAPSPHEEPCSPGLLQDQGSGLSSRFEEPKGPPARQEDSKELRALRKMVSNMSGPSGEEEAKVGPGLPDGCQPLQLLREMRQALQALLKENRLLQEENRTLQVLRAEHRGFQEENKALWENNKLKLQQKLVIDTVTEVTARMEMLIEELYAFMPARSQDPKKPSRV

SEQ ID NO: 10407 - protein, 470 aa, Homo sapiens
MAGENHQWQGSILYNMLMSAKQTRAAPEAPETRLVDQCWGCSCGDEPGVGREGLLGGRNVALLYRCCFCGKDHPRQGSILYSMLTSAKQTYAAPKAPEATLGPCWGCSCGSDPGVGRAGLPGGRPVALLYRCCFCGEDHPRQGSILYSLLTSSKQTHVAPAAPEARPGGAWWDRSYFAQRPGGKEALPGGRATALLYRCCFCGEDHPQQGSTLYCVPTSTNQAQAAPEERPRAPWWDTSSGALRPVALKSPQVVCEAASAGLLKTLRFVKYLPCFQVLPLDQQLVLVRNCWASLLMLELAQDRLQFETVEVSEPSMLQKILTTRRRETGGNEPLPVPTLQHHLAPPAEARKVPSASQVQAIKCFLSKCWSLNISTKEYAYLKGTVLFNPDVPGLQCVKYIQGLQWGTQQILSEHTRMTHQGPHDRFIELNSTLFLLRFINANVIAELFFRPIIGTVSMDDMMLEMLCTKI

SEQ ID NO: 10408 - protein, 346 aa, Homo sapiens
MPRGQKSKLRAREKRQRTRGQTQDLKVGQPTAAEKEESPSSSSSVLRDTASSSLAFGIPQEPQREPPTTSAAAAMSCTGSDKGDESQDEENASSSQASTSTERSLKDSLTRKTKMLVQFLLYKYKMKEPTTKAEMLKIISKKYKEHFPEIFRKVSQRTELVFGLALKEVNPTTHSYILVSMLGPNDGNQSSAWTLPRNGLLMPLLSVIFLNGNCAREEEIWEFLNMLGIYDGKRHLIFGEPRKLITQDLVQEKYLEYQQVPNSDPPRYQFLWGPRAHAETSKMKVLEFLAKVNDTTPNNFPLLYEEALRDEEERAGARPRVAARRGTTAMTSAYSRATSSSSSQPM

SEQ ID NO: 10409 - protein, 696 aa, Homo sapiens
MKAPIPHLILLYATFTQSLKVVTKRGSADGCTDWSIDIKKYQVLVGEPVRIKCALFYGYIRTNYSLAQSAGLSLMWYKSSGPGDFEEPIAFDGSRMSKEEDSIWFRPTLLQDSGLYACVIRNSTYCMKVSISLTVGENDTGLCYNSKMKYFEKAELSKSKEISCRDIEDFLLPTREPEILWYKECRTKTWRPSIVFKRDTLLIREVREDDIGNYTCELKYGGFVVRRTTELTVTAPLTDKPPKLLYPMESKLTIQETQLGDSANLTCRAFFGYSGDVSPLIYWMKGEKFIEDLDENRVWESDIRILKEHLGEQEVSISLIVDSVEEGDLGNYSCYVENGNGRRHASVLLHKRELMYTVELAGGLGAILLLLVCLVTIYKCYKIEIMLFYRNHFGAEELDGDNKDYDAYLSYTKVDPDQWNQETGEEERFALEILPDMLEKHYGYKLFIPDRDLIPTGTYIEDVARCVDQSKRLIIVMTPNYVVRRGWSIFELETRLRNMLVTGEIKVILIECSELRGIMNYQEVEALKHTIKLLTVIKWHGPKCNKLNSKFWKRLQYEMPFKRIEPITHEQALDVSEQGPFGELQTVSAISMAAATSTALATAHPDLRSTFHNTYHSQMRQKHYYRSYEYDVPPTGTLPLTSIGNQHTYCNIPMTLINGQRPQTKSSREQNPDEAHTNSAILPLLPRETSISSVIW

SEQ ID NO: 10410 - protein, 273 aa, Homo sapiens
MASAAAAEAEKGSPVVVGLLVVGNIIILLSGLSLFAETIWVTADQYRVYPLMGVSGKDDVFAGAWIAIFCGFSFFMVASFGVGAALCRRRSMVLTYLVLMLIVYIFECASCITSYTHRDYMVSNPSLITKQMLTFYSADTDQGQELTRLWDRVMIEQECCGTSGPMDWVNFTSAFRAATPEVVFPWPPLCCRRTGNFIPLNEEGCRLGHMDYLFTKAGVQWHNLSSLQRLPPGFKGFSHLSFQSSWDYRAASNTSATPSTATRGVSRGLGLPS

SEQ ID NO: 10411 - protein, 1194 aa, Homo sapiens
MASQVLVYPPYVYQTQSSAFCSVKKLKVEPSSCVFQERNYPRTYVNGRNFGNSHPPTKGSAFQTKIPFNRPRGHNFSLQTSAVVLKNTAGATKVIAAQAQQAHVQAPQIGAWRNRLHFLEGPQRCGLKRKSEELDNHSSAMQIVDELSILPAMLQTNMGNPVTVVTATTGSKQNCTTGEGDYQLVQHEVLCSMKNTYEVLDFLGRGTFGQVVKCWKRGTNEIVAIKILKNHPSYARQGQIEVSILARLSTENADEYNFVRAYECFQHRNHTCLVFEMLEQNLYDFLKQNKFSPLPLKVIRPILQQVATALKKLKSLGLIHADLKPENIMLVDPVRQPYRVKVIDFGSASHVSKTVCSTYLQSRYYRAPEIILGLPFCEAIDMWSLGCVIAELFLGWPLYPGALEYDQIRYISQTQGLPGEQLLNVGTKSTRFFCKETDMSHSGWRLKTLEEHEAETGMKSKEARKYIFNSLDDVAHVNTVMDLEGSDLLAEKADRREFVSLLKKMLLIDADLRITPAETLNHPFVNMKHLLDFPHSNHVKSCFHIMDICKSHLNSCDTNNHNKTSLLRPVASSSTATLTANFTKIGTLRSQALTTSAHSVVHHGIPLQAGTAQFGCGDAFQQTLIICPPAIQGIPATHGKPTSYSIRVDNTVPLVTQAPAVQPLQIRPGVLSQTWSGRTQQMLVPAWQQVTPLAPATTTLTSESVAGSHRLGDWGKMISCSNHYNSVMPQPLLTNQITLSAPQPVSVGIAHVVWPQPATTKKNKQCQNRSNSLQNTNIPHSAFISPKIINGKDVEEVSCIETQDNQNSEGEARNCCETSIRQDSDSSVSDKQRQTIIIADSPSPAVSVITISSDTDEEETSQRHSLRECKGSLDCEACQSTLNIDRMCSLSSPDSTLSTSSSGQSSPSPCKRPNSMSDEEQESSCDTVDGSPTSDSSGHDSPFAESTFVEDTHENTELVSSADTETKPAVCSVVVPPVELENGLNADEHMANTDSICQPLIKGRSAPGRLNQPSAVGTRQQKLTSAFQQQHLNFSQVQHFGSGHQEWNGNFGHRRQQAYIPTSVTSNPFTLSHGSPNHTAVHAHLAGNTHLGGQPTLLPYPSSATLSSAAPVAHLLASPCTSRPMLQHPTYNISHPSGIVHQVPVGLNPRLLPSPTIHQTQYKPIFPPHSYIAASPAYTGFPLSPTKLSQYPYM

SEQ ID NO: 10412 - protein, 672 aa, Homo sapiens
MTPSQVAFEIRGTLLPGEVFAICGSCDALGNWNPQNAVALLPENDTGESMLWKATIVLSRGVSVQYRYFKGYFLEPKTIGGPCQVIVHKWETHLQPRSITPLESEIIIDDGQFGIHNGVETLDSGWLTCQTEIRLRLHYSEKPPVSITKKKLKKSRFRVKLTLEGLEEDDDDRVSPTVLHKMSNSLEISLISDNEFKCRHSQPECGYGLQPDRWTEYSIQTMEPDNLELIFDFFEEDLSEHVVQGDALPGHVGTACLLSSTIAESGKSAGILTLPIMSRNSRKTIGKVRVDYIIIKPLPGYSCDMKSSFSKYWKPRIPLDVGHRGAGNSTTTAQLAKVQENTIASLRNAASHGAAFVEFDVHLSKDFVPVVYHDLTCCLTMKKKFDADPVELFEIPVKELTFDQLQLLKLTHVTALKSKDRKESVVQEENSFSENQPFPSLKMVLESLPEDVGFNIEIKWICQQRDGMWDGNLSTYFDMNLFLDIILKTVLENSGKRRIVFSSFDADICTMVRQKQNKYPILFLTQGKSEIYPELMDLRSRTTPIAMSFAQFENLLGINVHTEDLLRNPSYIQEAKAKGLVIFCWGDDTNDPENRRKLKELGVNGLIYDRIYDWMPEQPNIFQVEQLERLKQELPELKSCLCPTVSRFVPSSLCGESDIHVDANGIDNVENA

SEQ ID NO: 10413 - protein, 1299 aa, Homo sapiens
MPKKKRLSAGRVPLILFLCQMISALEVPLDPKLLEDLVQPPTITQQSPKDYIIDPRENIVIQCEAKGKPPPSFSWTRNGTHFDIDKDPLVTMKPGTGTLIINIMSEGKAETYEGVYQCTARNERGAAVSNNIVVRPSRSPLWTKEKLEPITLQSGQSLVLPCRPPIGLPPPIIFWMDNSFQRLPQSERVSQGLNGDLYFSNVLPEDTREDYICYARFNHTQTIQQKQPISVKVISVDELNDTIAANLSDTEFYGAKSSRERPPTFLTPEGNASNKEELRGNVLSLECIAEGLPTPIIYWAKEDGMLPKNRTVYKNFEKTLQIIHVSEADSGNYQCIAKNALGAIHHTISVRVKAAPYWITAPQNLVLSPGEDGTLICRANGNPKPRISWLTNGVPIEIAPDDPSRKIDGDTIIFSNVQERSSAVYQCNASNEYGYLLANAFVNVLAEPPRILTPANTLYQVIANRPALLDCAFFGSPLPTIEWFKGAKGSALHEDIYVLHENGTLEIPVAQKDSTGTYTCVARNKLGMAKNEVHLEIKDPTWIVKQPEYAVVQRGSMVSFECKVKHDHTLSLTVLWLKDNRELPSDERFTVDKDHLVVADVSDDDSGTYTCVANTTLDSVSASAVLSVVAPTPTPAPVYDVPNPPFDLELTDQLDKSVQLSWTPGDDNNSPITRIHHEYEDAMHKPGLWHHQTEVSGTQTTAQLKLSPYVNYSFRVMAVNSIGKSLPSEASEQYLTKASEPDKNPTAVEGLGSEPDNLVITWKPLNGFESNGPGLQYKVSWRQKDGDDEWTSVVVANVSKYIVSGTPTFVPYLIKVQALNDMGFAPEPAVVMGHSGEDLPMVAPGNVRVNVVNSTLAEVHWDPVPLKSIRGHLQGYRIYYWKTQSSSKRNRRHIEKKILTFQGSKTHGMLPGLEPFSHYTLNVRVVNGKGEGPASPDRVFNTPEGVPSAPSSLKIVNPTLDSLTLEWDPPSHPNGILTEYTLKYQPINSTHELGPLVDLKIPANKTRWTLKNLNFSTRYKFYFYAQTSAGSGSQITEEAVTTVDEAGILPPDVGAGKVQAVNPRISNLTAAAAETYANISWEYEGPEHVNFYVEYGVAGSKEEWRKEIVNGSRSFFGLKGLMPGTAYKVRVGAVGDSGFVSSEDVFETGPAMASRQVDIATQGWFIGLMCAVALLILILLIVCFIRRNKGGKYPVKEKEDAHADPEIQPMKEDDGTFGEYSDAEDHKPLKKGSRTPSDRTVKKEDSDDSLVDYGEGVNGQFNEDGSFIGQYSGKKEKEPAEGNESSEAPSPVNAMNSFV

SEQ ID NO: 10414 - protein, 1192 aa, Homo sapiens
MQLKIMPKKKRLSAGRVPLILFLCQMISALEVPLDPKLLEDLVQPPTITQQSPKDYIIDPRENIVIQCEAKGKPPPSFSWTRNGTHFDIDKDPLVTMKPGTGTLIINIMSEGKAETYEGVYQCTARNERGAAVSNNIVVRPSRSPLWTKEKLEPITLQSGQSLVLPCRPPIGLPPPIIFWMDNSFQRLPQSERVSQGLNGDLYFSNVLPEDTREDYICYARFNHTQTIQQKQPISVKVISAKSSRERPPTFLTPEGNASNKEELRGNVLSLECIAEGLPTPIIYWAKEDGMLPKNRTVYKNFEKTLQIIHVSEADSGNYQCIAKNALGAIHHTISVRVKAAPYWITAPQNLVLSPGEDGTLICRANGNPKPRISWLTNGVPIEIAPDDPSRKIDGDTIIFSNVQERSSAVYQCNASNEYGYLLANAFVNVLAEPPRILTPANTLYQVIANRPALLDCAFFGSPLPTIEWFKGAKGSALHEDIYVLHENGTLEIPVAQKDSTGTYTCVARNKLGMAKNEVHLEIKDPTWIVKQPEYAVVQRGSMVSFECKVKHDHTLSLTVLWLKDNRELPSDERFTVDKDHLVVADVSDDDSGTYTCVANTTLDSVSASAVLSVVAPTPTPAPVYDVPNPPFDLELTDQLDKSVQLSWTPGDDNNSPITKFIIEYEDAMHKPGLWHHQTEVSGTQTTAQLKLSPYVNYSFRVMAVNSIGKSLPSEASEQYLTKASEPDKNPTAVEGLGSEPDNLVITWKPLNGFESNGPGLQYKVSWRQKDGDDEWTSVVVANVSKYIVSGTPTFVPYLIKVQALNDMGFAPEPAVVMGHSGEDLPMVAPGNVRVNVVNSTLAEVHWDPVPLKSIRGHLQGYRIYYWKTQSSSKRNRRHIEKKILTFQGSKTHGMLPGLEPFSHYTLNVRVVNGKGEGPASPDRVFNTPEGVPSAPSSLKIVNPTLDSLTLEWDPPSHPNGILTEYTLKYQPINSTHELGPLVDLKIPANKTRWTLKNLNFSTRYKFYFYAQTSAGSGSQITEEAVTTVDEAGILPPDVGAGKAMASRQVDIATQGWFIGLMCAVALLILILLIVCFIRRNKGGKYPVKEKEDAHADPEIQPMKEDDGTFGEYSDAEDHKPLKKGSRTPSDRTVKKEDSDDSLVDYGEGVNGQFNEDGSFIGQYSGKKEKEPAEGNESSEAPSPVNAMNSFV

SEQ ID NO: 10415 - protein, 1304 aa, Homo sapiens
MQLKIMPKKKRLSAGRVPLILFLCQMISALEVPLDPKLLEDLVQPPTITQQSPKDYIIDPRENIVIQCEAKGKPPPSFSWTRNGTHFDIDKDPLVTMKPGTGTLIINIMSEGKAETYEGVYQCTARNERGAAVSNNIVVRPSRSPLWTKEKLEPITLQSGQSLVLPCRPPIGLPPPIIFWMDNSFQRLPQSERVSQGLNGDLYFSNVLPEDTREDYICYARFNHTQTIQQKQPISVKVISVDELNDTIAANLSDTEFYGAKSSRERPPTFLTPEGNASNKEELRGNVLSLECIAEGLPTPIIYWAKEDGMLPKNRTVYKNFEKTLQIIHVSEADSGNYQCIAKNALGAIHHTISVRVKAAPYWITAPQNLVLSPGEDGTLICRANGNPKPRISWLTNGVPIEIAPDDPSRKIDGDTIIFSNVQERSSAVYQCNASNEYGYLLANAFVNVLAEPPRILTPANTLYQVIANRPALLDCAFFGSPLPTIEWFKGAKGSALHEDIYVLHENGTLEIPVAQKDSTGTYTCVARNKLGMAKNEVHLEIKDPTWIVKQPEYAVVQRGSMVSFECKVKHDHTLSLTVLWLKDNRELPSDERFTVDKDHLVVADVSDDDSGTYTCVANTTLDSVSASAVLSVVAPTPTPAPVYDVPNPPFDLELTDQLDKSVQLSWTPGDDNNSPITKFIIEYEDAMHKPGLWHHQTEVSGTQTTAQLKLSPYVNYSFRVMAVNSIGKSLPSEASEQYLTKASEPDKNPTAVEGLGSEPDNLVITWKPLNGFESNGPGLQYKVSWRQKDGDDEWTSVVVANVSKYIVSGTPTFVPYLIKVQALNDMGFAPEPAVVMGHSGEDLPMVAPGNVRVNVVNSTLAEVHWDPVPLKSIRGHLQGYRIYYWKTQSSSKRNRRHIEKKILTFQGSKTHGMLPGLEPFSHYTLNVRVVNGKGEGPASPDRVFNTPEGVPSAPSSLKIVNPTLDSLTLEWDPPSHPNGILTEYTLKYQPINSTHELGPLVDLKIPANKTRWTLKNLNFSTRYKFYFYAQTSAGSGSQITEEAVTTVDEAGILPPDVGAGKVQAVNPRISNLTAAAAETYANISWEYEGPEHVNFYVEYGVAGSKEEWRKEIVNGSRSFFGLKGLMPGTAYKVRVGAVGDSGFVSSEDVFETGPAMASRQVDIATQGWFIGLMCAVALLILILLIVCFIRRNKGGKYPVKEKEDAHADPEIQPMKEDDGTFGEYSDAEDHKPLKKGSRTPSDRTVKKEDSDDSLVDYGEGVNGQFNEDGSFIGQYSGKKEKEPAEGNESSEAPSPVNAMNSFV

SEQ ID NO: 10416 - protein, 407 aa, Homo sapiens
MPRGHKSKLRTCEKRQETNGQPQGLTGPQATAEKQEESHSSSSSSRACLGDCRRSSDASIPQESQGVSPTGSPDAVVSYSKSDVAANGQDEKSPSTSRDASVPQESQGASPTGSPDAGVSGSKYDVAANGQDEKSPSTSHDVSVPQESQGASPTGSPDAGVSGSKYDVAAEGEDEESVSASQKAIIFKRLSKDAVKKKACTLAQFLQKKFEKKESILKADMLKCVRREYKPYFPQILNRTSQHLVVAFGVELKEMDSSGESYTLVSKLGLPSEGILSGDNALPKSGLLMSLLVVIFMNGNCATEEEVWEFLGLLGIYDGILHSIYGDARKIITEDLVQDKYVVYRQVCNSDPPCYEFLWGPRAYAETTKMRVLRVLADSSNTSPGLYPHLYEDALIDEVERALRLRA

SEQ ID NO: 10417 - protein, 1462 aa, Homo sapiens
MAPVHGDDSLSDSGSFVSSRARREKKSKKGRQEALERLKKAKAGEKYKYEVEDFTGVYEEVDEEQYSKLVQARQDDDWIVDDDGIGYVEDGREIFDDDLEDDALDADEKGKDGKARNKDKRNVKKLAVTKPNNIKSMFIACAGKKTADKAVDLSKDGLLGDILQDLNTETPQITPPPVMILKKKRSIGASPNPFSVHTATAVPSGKIASPVSRKEPPLTPVPLKRAEFAGDDVQVESTEEEQESGAMEFEDGDFDEPMEVEEVDLEPMAAKAWDKESEPAEEVKQEADSGKGTVSYLGSFLPDVSCWDIDQEGDSSFSVQEVQVDSSHLPLVKGADEEQVFHFYWLDAYEDQYNQPGVVFLFGKVWIESAETHVSCCVMVKNIERTLYFLPREMKIDLNTGKETGTPISMKDVYEEFDEKIATKYKIMKFKSKPVEKNYAFEIPDVPEKSEYLEVKYSAEMPQLPQDLKGETFSHVFGTNTSSLELFLMNRKIKGPCWLEVKSPQLLNQPVSWCKVEAMALKPDLVNVIKDVSPPPLVVMAFSMKTMQNAKNHQNEIIAMAALVHHSFALDKAAPKPPFQSHFCVVSKPKDCIFPYAFKEVIEKKNVKVEVAATERTLLGFFLAKVHKIDPDIIVGHNIYGFELEVLLQRINVCKAPHWSKIGRLKRSNMPKLGGRSGFGERNATCGRMICDVEISAKELIRCKSYHLSELVQQILKTERVVIPMENIQNMYSESSQLLYLLEHTWKDAKFILQIMCELNVLPLALQITNIAGNIMSRTLMGGRSERNEFLLLHAFYENNYIVPDKQIFRKPQQKLGDEDEEIDGDTNKYKKGRKKAAYAGGLVLDPKVGFYDKFILLLDFNSLYPSIIQEFNICFTTVQRVASEAQKVTEDGEQEQIPELPDPSLEMGILPREIRKLVERRKQVKQLMKQQDLNPDLILQYDIRQKALKLTANSMYGCLGFSYSRFYAKPLAALVTYKGREILMHTKEMVQKMNLEVIYGDTDSIMINTNSTNLEEVFKLGNKVKSEVNKLYKLLEIDIDGVFKSLLLLKKKKYAALVVEPTSDGNYVTKQELKGLDIVRRDWCDLAKDTGNFVIGQILSDQSRDTIVENIQKRLIEIGENVLNGSVPVSQFEINKALTKDPQDYPDKKSLPHVHVALWINSQGGRKVKAGDTVSYVICQDGSNLTASQRAYAPEQLQKQDNLTIDTQYYLAQQIHPVVARICEPIDGIDAVLIATWLGLDPTQFRVHHYHKDEENDALLGGPAQLTDEEKYRDCERFKCPCPTCGTENIYDNVFDGSGTDMEPSLYRCSNIDCKASPLTFTVQLSNKLIMDIRRFIKKYYDGWLICEEPTCRNRTRHLPLQFSRTGPLCPACMKATLQPEYSDKSLYTQLCFYRYIFDAECALEKLTTDHEKDKLKKQFFTPKVLQDYRKLKNTAEQFLSRSGYSEVNLSKLFAGCAVKS

SEQ ID NO: 10418 - protein, 1468 aa, Homo sapiens
MAPVHGDDCEIGASALSDSGSFVSSRARREKKSKKGRQEALERLKKAKAGEKYKYEVEDFTGVYEEVDEEQYSKLVQARQDDDWIVDDDGIGYVEDGREIFDDDLEDDALDADEKGKDGKARNKDKRNVKKLAVTKPNNIKSMFIACAGKKTADKAVDLSKDGLLGDILQDLNTETPQITPPPVMILKKKRSIGASPNPFSVHTATAVPSGKIASPVSRKEPPLTPVPLKRAEFAGDDVQVESTEEEQESGAMEFEDGDFDEPMEVEEVDLEPMAAKAWDKESEPAEEVKQEADSGKGTVSYLGSFLPDVSCWDIDQEGDSSFSVQEVQVDSSHLPLVKGADEEQVFHFYWLDAYEDQYNQPGVVFLFGKVWIESAETHVSCCVMVKNIERTLYFLPREMKIDLNTGKETGTPISMKDVYEEFDEKIATKYKIMKFKSKPVEKNYAFEIPDVPEKSEYLEVKYSAEMPQLPQDLKGETFSHVFGTNTSSLELFLMNRKIKGPCWLEVKSPQLLNQPVSWCKVEAMALKPDLVNVIKDVSPPPLVVMAFSMKTMQNAKNHQNEIIAMAALVHHSFALDKAAPKPPFQSHFCVVSKPKDCIFPYAFKEVIEKKNVKVEVAATERTLLGFFLAKVHKIDPDIIVGHNIYGFELEVLLQRINVCKAPHWSKIGRLKRSNMPKLGGRSGFGERNATCGRMICDVEISAKELIRCKSYHLSELVQQILKTERVVIPMENIQNMYSESSQLLYLLEHTWKDAKFILQIMCELNVLPLALQITNIAGNIMSRTLMGGRSERNEFLLLHAFYENNYIVPDKQIFRKPQQKLGDEDEEIDGDTNKYKKGRKKAAYAGGLVLDPKVGFYDKFILLLDFNSLYPSIIQEFNICFTTVQRVASEAQKVTEDGEQEQIPELPDPSLEMGILPREIRKLVERRKQVKQLMKQQDLNPDLILQYDIRQKALKLTANSMYGCLGFSYSRFYAKPLAALVTYKGREILMHTKEMVQKMNLEVIYGDTDSIMINTNSTNLEEVFKLGNKVKSEVNKLYKLLEIDIDGVFKSLLLLKKKKYAALVVEPTSDGNYVTKQELKGLDIVRRDWCDLAKDTGNFVIGQILSDQSRDTIVENIQKRLIEIGENVLNGSVPVSQFEINKALTKDPQDYPDKKSLPHVHVALWINSQGGRKVKAGDTVSYVICQDGSNLTASQRAYAPEQLQKQDNLTIDTQYYLAQQIHPVVARICEPIDGIDAVLIATWLGLDPTQFRVHHYHKDEENDALLGGPAQLTDEEKYRDCERFKCPCPTCGTENIYDNVFDGSGTDMEPSLYRCSNIDCKASPLTFTVQLSNKLIMDIRRFIKKYYDGWLICEEPTCRNRTRHLPLQFSRTGPLCPACMKATLQPEYSDKSLYTQLCFYRYIFDAECALEKLTTDHEKDKLKKQFFTPKVLQDYRKLKNTAEQFLSRSGYSEVNLSKLFAGCAVKS

SEQ ID NO: 10419 - protein, 579 aa, Homo sapiens
MTRLERSSHRTVICKVPGELVAREGKCASRARESEIPSEEGYCDFNSRPNENSYCYQLLRQLNEQRKKGILCDVSIVVSGKIFKAHKNILVAGSRFFKTLYCFSNKESPNQNNTTHLDIAAVQGFSVILDFLYSGNLVLTSQNAIEVMTVASYLQMSEVVQTCRNFIKDALNISIKSEAPESVVVDYNNRKPVNRDGLSSSRDQKIASFWATRNLTNLASNVKIENDGCNVDEGQIENYQMNDSSWVQDGSPEMAENESEGQTKVFIWNNMGSQGIQETGKTRRKNQTTKRFIYNIPPNNETNLEDCSVMQPPVAYPEENTLLIKEEPDLDGALLSGPDGDRNVNANLLAEAGTSQDGGDAGTSHDFKYGLMPGPSNDFKYGLIPGTSNDFKYGLIPGASNDFKYGLLPESWPKQETWENGESSLIMNKLKCPHCSYVAKYRRTLKRHLLIHTGVRSFSCDICGKLFTRREHVKRHSLVHKKDKKYKCMVCKKIFMLAASVGIRHGSRRYGVCVDCADKSQPGGQEGVDQGQDTEFPRDEEYEENEVGEADEELVDDGEDQNDPSRWDESGEVCMSLDD

SEQ ID NO: 10420 - protein, 291 aa, Homo sapiens
MAVTLSLLLGGRVCAAVTRCGFATRGVAGPGPIGREPDPDSDWEPEERELQEVESTLKRQKQAIRFQKIRRQMEAPGAPPRTLTWEAMEQIRYLHEEFPESWSVPRLAEGFDVSTDVIRRVLKSKFLPTLEQKLKQDQKVLKKAGLAHSLQHLRGSGNTSKLLPAGHSVSGSLLMPGHEASSKDPNHSTALKVIESDTHRTNTPRRRKGRNKEIQDLEESFVPVAAPLGHPRELQKYSSDSESPRGTGSGALPSGQKLEELKAEEPDNFSSKVVQRGREFFDSNGNFLYRI

SEQ ID NO: 10421 - protein, 436 aa, Homo sapiens
MQNSHSGVNQLGGVFVNGRPLPDSTRQKIVELAHSGARPCDISRILQTHADAKVQVLDNQNVSNGCVSKILGRYYETGSIRPRAIGGSKPRVATPEVVSKIAQYKRECPSIFAWEIRDRLLSEGVCTNDNIPSVSSINRVLRNLASEKQQMGADGMYDKLRMLNGQTGSWGTRPGWYPGTSVPGQPTQDGCQQQEGGGENTNSISSNGEDSDEAQMRLQLKRKLQRNRTSFTQEQIEALEKEFERTHYPDVFARERLAAKIDLPEARIQVWFSNRRAKWRREEKLRNQRRQASNTPSHIPISSSFSTSVYQPIPQPTTPVSSFTSGSMLGRTDTALTNTYSALPPMPSFTMANNLPMQPPVPSQTSSYSCMLPTSPSVNGRSYDTYTPPHMQTHMNSQPMGTSGTTSTGLISPGVSVPVQVPGSEPDMSQYWPRLQ

SEQ ID NO: 10422 - protein, 348 aa, Homo sapiens
MTLQWAAVATFLYAEIGLILIFCLPFIPPQRWQKIFSFNVWGKIATFWNKAFLTIIILLIVLFLDAVREVRKYSSVHTIEKSSTSRPDAYEHTQMKLFRSQRNLYISGFSLFFWLVLRRLVTLITQLAKELSNKGVLKTQAENTNKAAKKFMEENEKLKRILKSHGKDEECVLEAENKKLVEDQEKLKTELRKTSDALSKAQNDVMEMKMQSERLSKEYDQLLKEHSELQHSSFGEFLSKRSHKNGSIGKQTGSRKGSFRKRQQEKTVNFIKDTCNILCQNDNFVMLASRKFKFRKMHYDRFVIFLMPHIGCIVMALSKYLMMFQIYCKVCIPALKKNISMLNTIFTY

SEQ ID NO: 10423 - protein, 1059 aa, Homo sapiens
MVDVLLLFSLCLLFHISRPDLSHNRLSFIKASSMSHLQSLREVKLNNNELETIPNLGPVSANITLLSLAGNRIVEILPEHLKEFQSLETLDLSSNNISELQTAFPALQLKYLYLNSNRVTSMEPGYFDNLANTLLVLKLNRNRISAIPPKMFKLPQLQHLELNRNKIKNVDGLTFQGLGALKSLKMQRNGVTKLMDGAFWGLSNMEILQLDHNNLTEITKGWLYGLLMLQELHLSQNAINRISPDAWEFCQKLSELDLTFNHLSRLDDSSFLGLSLLNTLHIGNNRVSYIADCAFRGLSSLKTLDLKNNEISWTIEDMNGAFSGLDKLRRLILQGNRIRSITKKAFTGLDALEHLDLSDNAIMSLQGNAFSQMKKLQQLHLNTSSLLCDCQLKWLPQWVAENNFQSFVNASCAHPQLLKGRSIFAVSPDGFVCDDFPKPQITVQPETQSAIKGSNLSFICSAASSSDSPMTFAWKKDNELLHDAEMENYAHLRAQGGEVMEYTTILRLREVEFASEGKYQCVISNHFGSSYSVKAKLTVNMLPSFTKTPMDLTIRAGAMARLECAAVGHPAPQIAWQKDGGTDFPAARERRMHVMPEDDVFFIVDVKIEDIGVYSCTAQNSAGSISANATLTVLETPSFLRPLLDRTVTKGETAVLQCIAGGSPPPKLNWTKDDSPLVVTERHFFAAGNQLLIIVDSDVSDAGKYTCEMSNTLGTERGNVRLSVIPTPTCDSPQMTAPSLDDDGWATVGVVIIAVVCCVVGTSLVWVVIIYHTRRRNEDCSITNTDETNLPADIPSYLSSQGTLADRQDGYVSSESGSHHQFVTSSGAGFFLPQHDSSGTCHIDNSSEADVEAATDLFLCPFLGSTGPMYLKGNVYGSDPFETYHTGCSPDPRTVLMDHYEPSYIKKKECYPCSHPSEESCERSFSNISWPSHVRKLLNTSYSHNEGPGMKNLCLNKSSLDFSANPEPASVASSNSFMGTFGKALRRPHLDAYSSFGQPSDCQPRAFYLKAHSSPDLDSGSEEDGKERTDFQEENHICTFKQTLENYRTPNFQSYDLDT

SEQ ID NO: 10424 - protein, 406 aa, Homo sapiens
MRLFRWLLKQPVPKQIERYSRFSPSPLSIKQFLDFGRDNACEKTSYMFLRKELPVRLANTMREVNLLPDNLLNRPSVGLVQSWYMQSFLELLEYENKSPEDPQVLDNFLQVLIKVRNRHNDVVPTMAQGVIEYKEKFGFDPFISTNIQYFLDRFYTNRISFRMLINQHTLLFGGDTNPVHPKHIGSIDPTCNVADVVKDAYETAKMLCEQYYLVAPELEVEEFNAKAPDKPIQVVYVPSHLFHMLFELFKNSMRATVELYEDRKEGYPAVKTLVTLGKEDLSIKISDLGGGVPLRKIDRLFNYMYSTAPRPSLEPTRAAPLAGFGYGLPISRLYARYFQGDLKLYSMEGVGTDAVIYLKALSSESFERLPVFNKSAWRHYKTTPEADDWSNPSSEPRDASKYKAKQ

SEQ ID NO: 10425 - protein, 476 aa, Homo sapiens
MAAVATCGSVAASTGSAVATASKSNVTSFQRRGPRASVTNDSGPRLVSIAGTRPSVRNGQLLVSTGLPALDQLLGGGLAVGTVLLIEEDKYNIYSPLLFKYFLAEGIVNGHTLLVASAKEDPANILQELPAPLLDDKCKKEFDEDVYNHKTPESNIKMKIAWRYQLLPKMEQIGPVSSSRFGHYYDASKRMPQELIEASNWHGFFLPEKISSTLKVEPCSLTPGYTKLLQFIQNIIYEEGFDGSNPQKKQRNILRIGIQNLGSPLWGDDICCAENGGNSHSLTKFLYVLRGLLRTSLSACIITMPTHLIQNKAIIARVTTLSDVVVGLESFIGSERETNPLYKDYHGLIHIRQIPRLNNLICDESDVKDLAFKLKRKLFTIEWVQDNYLRQERNIYPPGFSYLLKQKDSAWGEGSLQHSTFLMSFLAKATAFASRLVRHSEPLKQNGSGRIRQAAGPRLWHDGRRQEAPGLLGIPP

SEQ ID NO: 10426 - protein, 846 aa, Homo sapiens
MFKCWSVVLVLGFIFLESEGRPTKEGGYGLKSYQPLMRLRHKEKNQESSRVKGFMIQDGPFGSCENKYCGLGRHCVTSRETGQAECACMDLCKRHYKPVCGSDGEFYENHCEVHRAACLKKQKITIVHNEDCFFKGDKCKTTEYSKMKNMLLDLQNQKYIMQENENPNGDDISRKKLLVDQMFKYFDADSNGLVDINELTQVIKQEELGKDLFDCTLYVLLKYDDFNADKHLALEEFYRAFQVIQLSLPEDQKLSITAATVGQSAVLSCAIQGTLRPPIIWKRNNIILNNLDLEDINDFGDDGSLYITKVTTTHVGNYTCYADGYEQVYQTHIFQVNVPPVIRVYPESQAREPGVTASLRCHAEGIPKPQLGWLKNGIDITPKLSKQLTLQANGSEVHISNVRYEDTGAYTCIAKNEAGVDEDISSLFVEDSARKTLANILWREEGLGIGNMFYVFYEDGIKVIQPIECEFQRHIKPSEKLLGFQDEVCPKAEGDEVQRCVWASAVNVKDKFIYVAQPTLDRVLIVDVQSQKVVQAVSTDPVPVKLHYDKSHDQVWVLSWGTLEKTSPTLQVITLASGNVPHHTIHTQPVGKQFDRVDDFFIPTTTLIITHMRFGFILHKDEAALQKIDLETMSYIKTINLKDYKCVPQSLAYTHLGGYYFIGCKPDSTGAVSPQVMVDGVTDSVIGFNSDVTGTPYVSPDGHYLVSINDVKGLVRVQYITIRGEIQEAFDIYTNLHISDLAFQPSFTEAHQYNIYGSSSTQTDVLFVELSSGKVKMIKSLKEPLKAEEWPWNRKNRQIQDSGLFGQYLMTPSKDSLFILDGRLNKLNCEITEVEKGNTVIWVGDA

SEQ ID NO: 10427 - protein, 1234 aa, Homo sapiens
MASWLYECLCEAELAQYYSHFTALGLQKIDELAKITMKDYSKLGVHDMNDRKRLFQLIKIIKIMQEEDKAVSIPERHLQTSSLRIKSQELRSGPRRQLNFDSPADNKDRNASNDGFEMCSLSDFSANEQKSTYLKVLEHMLPDDSQYHTKTGILNATAGDSYVQTEISTSLFSPNYLSAILGDCDIPIIQRISHVSGYNYGIPHSCIRQNTSEKQNPWTEMEKIRVCVRKRPLGMREVRRGEINIITVEDKETLLVHEKKEAVDLTQYILQVILKGSKERSTGATGVNADSSRSHAVIQIQIKDSAKRTFGRISFIDLAGSERAADARDSDRQTKMEGAEINQSLLALKECIRALDQEHTHTPFRQSKLTQVLKDSFIGNAKTCMIANISPSHVATEHTLNTLRYADRVKELKKGIKCCTSVTSRNRTSGNSSPKRIQSSPGALSEDKCSPKKVKLGFQQSLTVAAPGSTRGKVHPLTSHPPNIPFTSAPKVSGKRGGSRGSPSQEWVIHASPVKGTVRSGHVAKKKPEESAPLCSEKNRMGNKTVLGWESRASGPGEGLVRGKLSTKCKKVQTVQPVQKQLVSRVELSFGNAHHRAEYSQDSQRGTPARPASEAWTNIPPHQKEREEHLRFYHQQFQQPPLLQQKLKYQPLKRSLRQYRPPEGQLTNETPPLFHSYSENHDGAQVEELDDSDFSEDSFSHISSQRATKQRNTLENSEDSFFLHQTWGQGPEKQVAERQQSLFSSPRTGDKKDLTKSWVDSRDPINHRRAALDHSCSPSKGPVDWSRENSTSSGPSPRDSLAEKPYCSQVDFIYRQERGGGSSFDLRKDASQSEVSGENEGNLPSPEEDGFTISLSHVAVPGSPDQRDTVTTPLREVSADGPIQVTSTVKNGHAVPGEDPRGQLGTHAEYASGLMSPLTMSLLENPDNEGSPPSEQLVQDGATHSLVAESTGGPVVSHTVPSGDQEAALPVSSATRHLWLSSSPPDNKPGGDLPALSPSPIRQHPADKLPSREADLGEACQSRETVLFSHEHMGSEQYDADAEETGLDGSWGFPGKPFTTIHMGVPHSGPTLTPRTGSSDVADQLWAQERKHPTRLGWQEFGLSTDPIKLPCNSENVTWLKPRPISRCLARPSSPLVPSCSPKTAGTLRQPTLEQAQQVVIRAHQEQLDEMAELGFKEETLMSQLASNDFEDFVTQLDEIMVLKSKCIQSLRSQLQLYLTCHGPTAAPEGTVPS

SEQ ID NO: 10428 - protein, 844 aa, Homo sapiens
MDEDGLELQQEPNSFFDATDRVSFCHPGWSTVAPSGSTATSASQAQVICSASRVTGATGADGTHMDGDQIVVEVQETVFVSDVVDSDITVHNFVPDDPDSVVIQDVIEDVVIEDVQCPDIMEEADVSETVIIPEQVLDSDVTEEVSLAHCTVPDDVLASDITSASMSMPEHVLTGDSIHVSDVGHVGHVGHVEHVVHDSVVEAEIVTDPLTTDVVSEEVLVADCASEAVIDANGIPVDQQDDDKGNCEDYLMISLDDAGKIEHDGSSGMTMDTESEIDPCKVDGTCPEVIKVYIFKADPGEDDLGGTVDIVESEPENDHGVELLDQNSSIRVPREKMVYMTVNDSQPEDEDLNVAEIADEVYMEVIVGEEDAAAAAAAAAVHEQQMDDNEIKTFMPIAWAAAYGNNSDGIENRNGTASALLHIDESAGLGRLAKQKPKKRRRPDSRQYQTAIIIGPDGHPLTVYPCMICGKKFKSRGFLKRHMKNHPEHLAKKKYRCTDCDYTTNKKISLHNHLESHKLTSKAEKAIECDECGKHFSHAGALFTHKMVHKEKGANKMHKCKFCEYETAEQGLLNRHLLAVHSKNFPHICVECGKGFRHPSELKKHMRIHTGEKPYQCQYCEYRSADSSNLKTHVKTKHSKEMPFKCDICLLTFSDTKEVQQHALIHQESKTHQCLHCDHKSSNSSDLKRHIISVHTKDYPHKCDMCDKGFHRPSELKKHVAAHKGKKMHQCRHCDFKIADPFVLSRHILSVHTKDLPFRCKRCRKGFRQQSELKKHMKTHSGRKVYQCEYCEYSTTDASGFKRHVISIHTKDYPHRCEYCKKGFRRPSEKNQHIMRHHKEVGLP

SEQ ID NO: 10429 - protein, 731 aa, Homo sapiens
MDEQAGPGVFFSNNHPGAGGAKGLGPLAGAARAQYSLPGILHFLQHEWARFEVERAQWEVERAELQAQIAFLQGERKGQENLKKDLVRRIKMLEYALKQERAKYHKLKYGTELNQGDMKPPSYDSDEGNETEVQPQQNSQLMWKQGRQLLRQYLQEVGYTDTILDVKSKRVRALLGFSSDVTDREDDKNQDSVVNGTEAEVKETAMIAKSELTDSASVLDNFKFLESAAADFSDEDEDDDVDGREKSVIDTSTIVRKKALPDSGEDRDTKEALKEFDFLVTSEEGDNESRSAGDGTDWGPNRSKLQDMLANLRDVDELPSLQPSVGSPSRPSSSRLPEHEINRADEVEALTFPPSSGKSFIMGADEALESELGLGELAGLTVANEADSLTYDIANNKDALRKTWNPKFTLRSHFDGIRALAFHPIEPVLITASEDHTLKMWNLQKTAPAKKSTSLDVEPIYTFRAHKGPVLCVVMSSNGEQCYSGGTDGLIQGWNTTNPNIDPYDSYDPSVLRGPLLGHTDAVWGLAYSAAHQRLLSCSADGTLRLWNTTEVAPALSVFNDTKELGIPASVDLVSSDPSHMVASFSKGYTSIFNMETQQRILTLESNVDTTANSSCQINRVISHPTLPISITAHEDRHIKFYDNNTGKLIHSMVAHLEAVTSLAVDPNGLYLMSGSHDCSIRLWNLESKTCIQEFTAHRKKFEESIHDVAFHPSKCYIASAGADALAKVFV

SEQ ID NO: 10430 - protein, 951 aa, Homo sapiens
MPGPLGLLCFLALGLLGSAGPSGAAPPLCAAPCSCDGDRRVDCSGKGLTAVPEGLSAFTQALDISMNNITQLPEDAFKNFPFLEELQLAGNDLSFIHPKALSGLKELKVLTLQNNQLKTVPSEAIRGLSALQSLRLDANHITSVPEDSFEGLVQLRHLWLDDNSLTEVPVHPLSNLPTLQALTLALNKISSIPDFAFTNLSSLVVLHLHNNKIRSLSQHCFDGLDNLETLDLNYNNLGEFPQAIKALPSLKELGFHSNSISVIPDGAFDGNPLLRTIHLYDNPLSFVGNSAFHNLSDLHSLVIRGASMVQQFPNLTGTVHLESLTLTGTKISSIPNNLCQEQKMLRTLDLSYNNIRDLPSFNGCHALEEISLQRNQIYQIKEGTFQGLISLRILDLSRNLIHEIHSRAFATLGPITNLDVSFNELTSFPTEGLNGLNQLKLVGNFKLKEALAAKDFVNLRSLSVPYAYQCCAFWGCDSYANLNTEDNSLQDHSVAQEKGTADAANVTSTLENEEHSQIIIHCTPSTGAFKPCEYLLGSWMIRLTVWFIFLVALFFNLLVILTTFASCTSLPSSKLFIGLISVSNLFMGIYTGILTFLDAVSWGRFAEFGIWWETGSGCKVAGFLAVFSSESAIFLLMLATVERSLSAKDIMKNGKSNHLKQFRVAALLAFLGATVAGCFPLFHRGEYSASPLCLPFPTGETPSLGFTVTLVLLNSLAFLLMAVIYTKLYCNLEKEDLSENSQSSMIKHVAWLIFTNCIFFCPVAFFSFAPLITAISISPEIMKSVTLIFFPLPACLNPVLYVFFNPKFKEDWKLLKRRVTKKSGSVSVSISSQGGCLEQDFYYDCGMYSHLQGNLTVCDCCESFLLTKPVSCKHLIKSHSCPALAVASCQRPEGYWSDCGTQSAHSDYADEEDSFVSDSSDQVQACGRACFYQSRGFPLVRYAYNLPRVKD

SEQ ID NO: 10431 - protein, 851 aa, Homo sapiens
MIQVLQIVKELVTPSRQKAATVKEDSDQDVALKLAQERAEIVAKYDRGREGAEIEPWEDADYLVYKVTDRFGFLHEEELPDHNVAVERQKHLEIERTTKWLKMLKGWEKYKNTEKFHRRIYKGIPLQLRGEVWALLLEIPKMKEETRDLYSKLKHRARGCSPDIRQIDLDVNRTFRDHIMFRDRYGVKQQSLFHVLAAYSIYNTEVGYCQGMSQITALLLMYMNEEDAFWALVKLFSGPKHAMHGFFVQGFPKLLRFQEHHEKILNKFLSKLKQHLDSQEIYTSFYTMKWFFQCFLDRTPFTLNLRIWDIYIFEGERVLTAMSYTILKLHKKHLMKLSMEELVEFFQETLAKDFFFEDDFVIEQLQISMTELKRAKLDLPEPGKEDEYPKKPLGQLPPELQSWGVHHLSNGQRSVGRPSPLASGRRESGAPHRRHEHSPHPQSRTGTPERAQPPRRKSVEEESKKLKDEADFQRKLPSGPQDSSRQYNHAAANQNSNATSNIRKEFVPKWNKPSDVSATERTAKYTMEGKGRAAHPALAVTVPGPAEVRVSNVRPKMKALDAEDGKRGSTASQYDNVPGPELDSGASVEEALERAYSQSPRHALYPPSPRKHAEPSSSPSKVSNKFTFKVQPPSHARYPSQLDGEARGLAHPPSYSNPPVYHGNSPKHFPTANSSFASPQFSPGTQLNPSRRPHGSTLSVSASPEKSYSRPSPLVLPSSRIEVLPVDTGAGGYSGNSGSPKNGKLIIPPVDYLPDNRTWSEVSYTYRPETQGQSWTRDASRGNLPKYSAFQLAPFQDHGLPAVSVDSPVRYKASPAAEDASPSGYPYSGPPPPAYHYRNRDGLSIQESVLL

SEQ ID NO: 10432 - protein, 697 aa, Homo sapiens
MQTQEILRILRLPELGDLGQFFRSLSATTLVSMGALAAILAYWFTHRPKALQPPCNLLMQSEEVEDSGGARRSVIGSGPQLLTHYYDDARTMYQVFRRGLSISGNGPCLGFRKPKQPYQWLSYQEVADRAEFLGSGLLQHNCKACTDQFIGVFAQNRPEWIIVELACYTYSMVVVPLYDTLGPGAIRYIINTADISTVIVDKPQKAVLLLEHVERKETPGLKLIILMDPFEEALKERGQKCGVVIKSMQAVEDCGQENHQAPVPPQPDDLSIVCFTSGTTGNPKGAMLTHGNVVADFSGFLKVTEKVIFPRQDDVLISFLPLAHMFERVIQSVVYCHGGRVGFFQGDIRLLSDDMKALCPTIFPVVPRLLNRMYDKIFSQANTPLKRWLLEFAAKRKQAEVRSGIIRNDSIWDELFFNKIQASLGGCVRMIVTGAAPASPTVLGFLRAALGCQVYEGYGQTECTAGCTFTTPGDWTSGHVGAPLPCNHIKLVDVEELNYWACKGEGEICVRGPNVFKGYLKDPDRTKEALDSDGWLHTGDIGKWLPAGTLKIIDRKKHIFKLAQGEYVAPEKIENIYIRSQPVAQIYVHGDSLKAFLVGIVVPDPEVMPSWAQKRGIEGTYADLCTNKDLKKAILEDMVRLGKESGLHSFEQVKAIHIHSDMFSVQNGLLTPTLKAKRPELREYFKKQIEELYSISM

SEQ ID NO: 10433 - protein, 656 aa, Homo sapiens
MRTVVLTMKASVIEMFLVLLVTGVHSNKETAKKIKRPKFTVPQINCDVKAGKIIDPEFIVKCPAGCQDPKYHVYGTDVYASYSSVCGAAVHSGVLDNSGGKILVRKVAGQSGYKGSYSNGVQSLSLPRWRESFIVLESKPKKGVTYPSALTYSSSKSPAAQAGETTKAYQRPPIPGTTAQPVTLMQLLAVTVAVATPTTLPRPSPSAASTTSIPRPQSVGHRSQEMDLWSTATYTSSQNRPRADPGLVPKEELSTQSLEPVSLGDPNCKIDLSFLIDGSTSIGKRRFRIQKQLLADVAQALDIGPAGPLMGVVQYGDNPATHFNLKTHTNSRDLKTAIEKITQRGGLSNVGRAISFVTKNFFSKANGNRSGAPNVVVVMVDGWPTDKVEEASRLARESGINIFFITIEGAAENEKQYVVEPNFANKAVCRTNGFYSLHVQSWFGLHKTLQPLVKRVCDTDRLACSKTCLNSADIGFVIDGSSSVGTGNFRTVLQFVTNLTKEFEISDTDTRIGAVQYTYEQRLEFGFDKYSSKPDILNAIKRVGYWSGGTSTGAAINFALEQLFKKSKPNKRKLMILITDGRSYDDVRIPAMAAHLKGVITYAIGVAWAAQEELEVIATHPARDHSFFVDEFDNLHQYVPRIIQNICTEFNSQPRN

SEQ ID NO: 10434 - protein, 693 aa, Homo sapiens
MRTVVLTMKASVIEMFLVLLVTGVHSNKETAKKIKRPKFTVPQINCDVKAGKIIDPEFIVKCPAGCQDPKYHVYGTDVYASYSSVCGAAVHSGVLDNSGGKILVRKVAGQSGYKGSYSNGVQSLSLPRWRESFIVLESKPKKGVTYPSALTYSSSKSPAAQAGETTKAYQRPPIPGTTAQPVTLMQLLAVTVAVATPTTLPRPSPSAASTTSIPRPQSVGHRSQEMDLWSTATYTSSQNRPRADPGIQRQDPSGAAFQKPVGADVSLGEMDSWKPGSVLLDEGLVPKEELSTQSLEPVSLGDPNCKIDLSFLIDGSTSIGKRRFRIQKQLLADVAQALDIGPAGPLMGVVQYGDNPATHFNLKTHTNSRDLKTAIEKITQRGGLSNVGRAISFVTKNFFSKANGNRSGAPNVVVVMVDGWPTDKVEEASRLARESGINIFFITIEGAAENEKQYVVEPNFANKAVCRTNGFYSLHVQSWFGLHKTLQPLVKRVCDTDRLACSKTCLNSADIGFVIDGSSSVGTGNFRTVLQFVTNLTKEFEISDTDTRIGAVQYTYEQRLEFGFDKYSSKPDILNAIKRVGYWSGGTSTGAAINFALEQLFKKSKPNKRKLMILITDGRSYDDVRIPAMAAHLKGVITYAIGVAWAAQEELEVIATHPARDHSFFVDEFDNLHQYVPRIIQNICTEFNSQPRN

SEQ ID NO: 10435 - protein, 697 aa, Homo sapiens
MQTQEILRILRLPELGDLGQFFRSLSATTLVSMGALAAILAYWFTHRPKALQPPCNLLMQSEEVEDSGGARRSVIGSGPQLLTHYYDDARTMYQVFRRGLSISGNGPCLGFRKPKQPYQWLSYQEVADRAEFLGSGLLQHNCKACTDQFIGVFAQNRPEWIIVELACYTYSMVVVPLYDTLGPGAIRYIINTADISTVIVDKPQKAVLLLEHVERKETPGLKLIILMDPFEEALKERGQKCGVVIKSMQAVEDCGQENHQAPVPPQPDDLSIVCFTSGTTGNPKGAMLTHGNVVADFSGFLKVTESQWAPTCADVHISYLPLAHMFERMVQSVVYCHGGRVGFFQGDIRLLSDDMKALCPTIFPVVPRLLNRMYDKIFSQANTPLKRWLLEFAAKRKQAEVRSGIIRNDSIWDELFFNKIQASLGGCVRMIVTGAAPASPTVLGFLRAALGCQVYEGYGQTECTAGCTFTTPGDWTSGHVGAPLPCNHIKLVDVEELNYWACKGEGEICVRGPNVFKGYLKDPDRTKEALDSDGWLHTGDIGKWLPAGTLKIIDRKKHIFKLAQGEYVAPEKIENIYIRSQPVAQIYVHGDSLKAFLVGIVVPDPEVMPSWAQKRGIEGTYADLCTNKDLKKAILEDMVRLGKESGLHSFEQVKAIHIHSDMFSVQNGLLTPTLKAKRPELREYFKKQIEELYSISM

SEQ ID NO: 10436 - protein, 708 aa, Homo sapiens
MPEFVLSLLEKMQTQEILRILRLPELGDLGQFFRSLSATTLVSMGALAAILAYWFTHRPKALQPPCNLLMQSEEVEDSGGARRSVIGSGPQLLTHYYDDARTMYQVFRRGLSISGNGPCLGFRKPKQPYQWLSYQEVADRAEFLGSGLLQHNCKACTDQFIGVFAQNRPEWIIVELACYTYSMVVVPLYDTLGPGAIRYIINTADISTVIVDKPQKAVLLLEHVERKETPGLKLIILMDPFEEALKERGQKCGVVIKSMQAVEDCGQENHQAPVPPQPDDLSIVCFTSGTTGNPKGAMLTHGNVVADFSGFLKVTEKVIFPRQDDVLISFLPLAHMFERVIQSVVYCHGGRVGFFQGDIRLLSDDMKALCPTIFPVVPRLLNRMYDKIFSQANTPLKRWLLEFAAKRKQAEVRSGIIRNDSIWDELFFNKIQASLGGCVRMIVTGAAPASPTVLGFLRAALGCQVYEGYGQTECTAGCTFTTPGDWTSGHVGAPLPCNHIKLVDVEELNYWACKGEGEICVRGPNVFKGYLKDPDRTKEALDSDGWLHTGDIGKWLPAGTLKIIDRKKHIFKLAQGEYVAPEKIENIYIRSQPVAQIYVHGDSLKAFLVGIVVPDPEVMPSWAQKRGIEGTYADLCTNKDLKKAILEDMVRLGKESGLHSFEQVKAIHIHSDMFSVQNGLLTPTLKAKRPELREYFKKQIEELYSISM

SEQ ID NO: 10437 - protein, 621 aa, Homo sapiens
MLLLPSAADGRGTAITHALTSASTLCQVEPVGRWFEAFVKRRNRNASASFQELEDKKELSEESEDEELQLEEFPMLKTLDPKDWKNQDHYAVLGLGHVRYKATQRQIKAAHKAMVLKHHPDKRKAAGEPIKEGDNDYFTCITKAYEMLSDPVKRRAFNSVDPTFDNSVPSKSEAKDNFFEVFTPVFERNSRWSNKKNVPKLGDMNSSFEDVDIFYSFWYNFDSWREFSYLDEEEKEKAECRDERRWIEKQNRATRAQRKKEEMNRIRTLVDNAYSCDPRIKKFKEEEKAKKEAEKKAKAEAKRKEQEAKEKQRQAELEAARLAKEKEEEEVRQQALLAKKEKDIQKKAIKKERQKLRNSCKTWNHFSDNEAERVKMMEEVEKLCDRLELASLQCLNETLTSCTKEVGKAALEKQIEEINEQIRKEKEEAEARMRQASKNTEKSTGGGGNGSKNWSEDDLQLLIKAVNLFPAGTNSRWEVIANYMNIHSSSGVKRTAKDVIGKAKSLQKLDPHQKDDINKKAFDKFKKEHGVVPQADNATPSERFEGPYTDFTPWTTEEQKLLEQALKTYPVNTPERWEKIAEAVPGRTKKDCMKRYKELVEMVKAKKAAQEQVLNASRAKK

SEQ ID NO: 10438 - protein, 287 aa, Homo sapiens
MTSAAHYYPKLMSIMGNVLRFLPAFVRMKQLIEEGYVGEPLVCEVQVHGGSLLGKKYNWSCDDLMGGGGLHSVGTYIIDLLTFLTGQKAVKVHGLLKTFVKQTDHIKGIRQITSDDFCTFQMVLEGGVCCTVTLNFNVPGEFKQDVTVVGSAGRLLAVGTDLYGQRNSAPEQELLVQDATPVSNSLLPEKAFSDIPSPYLRGTIKMMQAVRQAFQDQDDRRTWDGRPLTMAATFDDCLYALCVVDTIKRSSQTGEWQNIAIMTEEPELSPAYLISEAMRRSRMSLYC

SEQ ID NO: 10439 - protein, 390 aa, Homo sapiens
MLPGVGVFGTSLTARVIIPLLKDEGFAVKALWGRTQEEAEELAKEMSVPFYTSRIDEVLLHQDVDLVCINLPPPLTRQIAVKTLGIGKNVICDRTATPLDAFRMTSAAHYYPKLMSIMGNVLRFLPAFVRMKQLIEEGYVGEPLVCEVQVHGGSLLGKKYNWSCDDLMGGGGLHSVGTYIIDLLTFLTGQKAVKVHGLLKTFVKQTDHIKGIRQITSDDFCTFQMVLEGGVCCTVTLNFNVPGEFKQDVTVVGSAGRLLAVGTDLYGQRNSAPEQELLVQDATPVSNSLLPEKAFSDIPSPYLRGTIKMMQAVRQAFQDQDDRRTWDGRPLTMAATFDDCLYALCVVDTIKRSSQTGEWQNIAIMTEEPELSPAYLISEAMRRSRMSLYC

SEQ ID NO: 10440 - protein, 404 aa, Homo sapiens
MGSSQEEGLRCQPSQPDHDADGHCGPDLEGAERASATPGPPGLLNSHRPADSDDTNAAGPSAALLEGLLLGGGKPSPHSTRPGPFFYIGGSNGATIISSYCKSKGWQRIHDSRRDDYTLKWCEVKSRDSYGSFREGEQLLYQLPNNKLLTTKIGLLSTLRGRARAMSKASKVPGGVQARLEKDAAAPALEDLPWTSPGYLRPQRVLRMEEFFPETYRLDLKHEREAFFTLFDETQIWICKPTASNQGKGIFLLRNQEEVAALQAKTRSMEDDPIHHKTPFRGPQARVVQRYIQNPLLVDGRKFDVRSYLLIACTTPYMIFFGHGYARLTLSLYDPHSSDLGGHLTNQFMQKKSPLYMLLKEHTVWSMEHLNRYISDTFWKARGLAKDWVFTTLKVRPLCPPVWE

SEQ ID NO: 10441 - protein, 673 aa, Homo sapiens
MDHSCTRFIHRRGPPTRTRAGFKRGKRPRIQQRPRARVSGTIPASRLHPAPASQPGPCPAPGHCPVGPAHERPMGSSQEEGLRCQPSQPDHDADGHCGPDLEGAERASATPGPPGLLNSHRPADSDDTNAAGPSAALLEGLLLGGGKPSPHSTRPGPFFYIGGSNGATIISSYCKSKGWQRIHDSRRDDYTLKWCEVKSRDSYGSFREGEQLLYQLPNNKLLTTKIGLLSTLRGRARAMSKASKVPGGVQARLEKDAAAPALEDLPWTSPGYLRPQRVLRMEEFFPETYRLDLKHEREAFFTLFDETQIWICKPTASNQGKGIFLLRNQEEVAALQAKTRSMEDDPIHHKTPFRGPQARVVQRYIQNPLLVDGRKFDVRSYLLIACTTPYMIFFGHGYARLTLSLYDPHSSDLGGHLTNQFMQKKSPLYMLLKEHTVWSMEHLNRYISDTFWKARGLAKDWVFTTLKKRMQQIMAHCFLAAKPKLDCKLGYFDLIGCDFLIDDNFKVWLLEMNSNPALHTNCEVLKEVIPGVVIETLDLVLETFRKSLRGQKMLPLLSQRRFVLLHNGEADPRPHLGGSCSLRRWPPLPTRQAKSSGPPMPHAPDQPGARRPAPPPLVPQRPRPPGPDLDSAHDGEPQAPGTEQSGTGNRHPAQEPSPGTAKEEREEPENARP

SEQ ID NO: 10442 - protein, 266 aa, Homo sapiens
MTEDSQRNFRSVYYEKVGFRGVEEKKSLEILLKDDRLGILPPHHESHAKVMMYRKEQYLDVLHALKVVRFVSDATPQAEVYLRMYQLESGKLPRSPSFPLEPDDEVFLAIAKAMEEMVEDSVDCYWITRRFVNQLNTKYRDSLPQLPKAFEQYLNLEDGRLLTHLRMCSAAPKLPYDLWFKRCFAGCLPESSLQRVWDKVVSGSCKILVFVAVEILLTFKIKVMALNSAEKITKFLENIPQDSSDAIVSKAIDLWHKHCGTPVHSS

SEQ ID NO: 10443 - protein, 683 aa, Homo sapiens [sequence omitted]

SEQ ID NO: 10444 - protein, 1905 aa, Homo sapiens
MQSRLLLLGAPGGHGGPASRRMRLLLRQVVQRRPGGDRQRPEVRLLHAGSGADTGDTVNIGDVSYKLKIPKNPELVPQNYISDSLAQSVVQHLRWIMQKDLLGQDVFLIGPPGPLRRSIAMQYLELTKREVEYIALSRDTTETDLKQRREIRAGTAFYIDQCAVRAATEGRTLILEGLEKAERNVLPVLNNLLENREMQLEDGRFLMSAERYDKLLRDHTKKELDSWKIVRVSENFRVIALGLPVPRYSGNPLDPPLRSRFQARDIYYLPFKDQLKLLYSIGANVSAEKVSQLLSFATTLCSQESSTLGLPDFPLDSLAAAVQILDSFPMMPIKHAIQWLYPYSILLGHEGKMAVEGVLKRFELQDSGSSLLPKEIVKVEKMMENHVSQASVTIRIADKEVTIKVPAGTRLLSQPCASDRFIQTLSHKQLQAEMMQSHMVKDICLIGGKGCGKTVIAKNFADTLGYNIEPIMLYQDMTARDLLQQRYTLPNGDTAWRSSPLVNAALEGKLVLLDGIHRVNAGTLAVLQRLIHDRELSLYDGSRLLREDRYMRLKEELQLSDEQLQKRSIFPIHPSFRIIALAEPPVIGSTAHQWLGPEFLTMFFFHYMKPLVKSEEIQVIKEKVPNVPQEALDKLLSFTHKLRETQDPTAQSLAASLSTRQLLRISRRLSQYPNENLHSAVTKACLSRFLPSLARSALEKNLADATIEINTDDNLEPELKDYKCEVTSGTLRIGAVSAPIYNAHEKMKVPDVLFYDNIQHVIVMEDMLKDFLLGEHLLLVGNQGVGKNKIVDRFLHLLNRPREYIQLHRDTTVQTLTLQPSVKDGLIVYEDSPLVKAVKLGHILVVDEADKAPTNVTCILKTLVENGEMILADGRRIVANSANVNGRENVVVIHPDFRMIVLANRPGFPFLGNDFFGTLGDIFSCHAVDNPKPHSELEMLRQYGPNVPEPILQKLVAAFGELRSLADQGIINYPYSTREVVNIVKHLQKFPTEGLSSVVRNVFDFDSYNNDMREILINTLHKYGIPIGAKPTSVQLAKELTLPEQTFMGYWTIGQARSGMQKLLCPVETHHIDIKGPALINIQEYPIERHEERSLNFTEECASWRIPLDEINIICDIATSHENEQNTLYVVTCNPASLYFMNMTGKSGFFVDFFDIFPRTANGVWHPFVTVAPLGSPLKGQVVLHEQQSNVILLLDTTGRALHRLILPSEKFTSKKPFWWNKEEAETYKMCKEFSHKNWLVFYKEKGNSLTVLDVLEGRTHTISLPINLKTVFLVAEDKWLLVESKTNQKYLLTKPAHIESEGSGVCQLYVLKEEPPSTGFGVTQETEFSIPHKISSDQLSSEHLSSAVEQKIASPNRILSDEKNYATIVVGFPDLMSPSEVYSWKRPSSLHKRSGTDTSFYRGKKKRGTPKQSNCVTLLDTNQVVRILPPGEVPLKDIYPKDVTPPQTSGYIEVTDLQSKKLRYIPIPRSESLSPYTTWLSTISDTDALLAEWDKSGVVTVDMGGHIRLWETGLERLQRSLMEWRNMIGQDDRNMQITINRDSGEDVSSPKHGKEDPDNMPHVGGNTWAGGTGGRDTAGLGGKGGPYRLDAGHTVYQVSQAEKDAVPEEVKRAAREMGQRAFQQRLKEIQMSEYDAATYERFSGAVRRQVHSLRIILDNLQAKGKERQWLRHQATGELDDAKIIDGLTGEKAIYKRRGELEPQLGSPQQKPKRLRLVVDVSGSMYRFNRMDGRLERTMEAVCMVMEAFENYEEKFQYDIVGHSGDGYNIGLVPMNKIPKDNKQRLEILKTMHAHSQFCMSGDHTLEGTEHAIKEIVKEEADEYFVIVLSDANLSRYGIHPAKFAQILTRDPQVNAFAIFIGSLGDQATRLQRTLPAGRSFVAMDTKDIPQILQQIFTSTMLSSV

SEQ ID NO: 10445 - protein, 1223 aa, Homo sapiens
MMSLSVRPQRRLLSARVNRSQSFAGVLGSHERGPSLSFRSFPVFSPPGPPRKPPALSRVSRMFSVAHPAAKVPQPERLDLVYTALKRGLTAYLEVHQQEQEKLQGQIRESKRNSRLGFLYDLDKQVKSIERFLRRLEFHASKIDELYEAYCVQRRLRDGAYNMVRAYTTGSPGSREARDSLAEATRGHREYTESMCLLESELEAQLGEFHLRMKGLAGFARLCVGDQYEICMKYGRQRWKLRGRIEGSGKQVWDSEETIFLPLLTEFLSIKVTELKGLANHVVVGSVSCETKDLFAALPQVVAVDINDLGTIKLSLEVTWSPFDKDDQPSAASSVNKASTVTKRFSTYSQSPPDTPSLREQAFYNMLRRQEELENGTAWSLSSESSDDSSSPQLSGTARHSPAPRPLVQQPEPLPIQVAFRRPETPSSGPLDEEGAVAPVLANGHAPYSRTLSHISEASVDAALAEASVEAVGPESLAWGPSPPTHPAPTHGEHPSPVPPALDPGHSATSSTLGTTGSVPTSTDPAPSAHLDSVHKSTDSGPSELPGPTHTTTGSTYSAITTTHSAPSPLTHTTTGSTHKPIISTLTTTGPTLNIIGPVQTTTSPTHTMPSPTHTTASPTHTSTSPTHTPTSPTHKTSMSPPTTTSPTPSGMGLVQTATSPTHPTTSPTHPTTSPILINVSPSTSLELATLSSPSKHSDPTLPGTDSLPCSPPVSNSYTQADPMAPRTPHPSPAHSSRKPLTSPAPDPSESTVQSLSPTPSPPTPAPQHSDLCLAMAVQTPVPTAAGGSGDRSLEEALGALMAALDDYRGQFPELQGLEQEVTRLESLLMQRQGLTRSRASSLSITVEHALESFSFLNEDEDEDNDVPGDRPPSSPEAGAEDSIDSPSARPLSTGCPALDAALVRHLYHCSRLLLKLGTFGPLRCQEAWALERLLREARVLEAVCEFSRRWEIPASSAQEVVQFSASRPGFLTFWDQCTERLSCFLCPVERVLLTFCNQYGARLSLRQPGLAEAVCVKFLEDALGQKLPRRPQPGPGEQLTVFQFWSFVETLDSPTMEAYVTETAEEVLLVRNLNSDDQAVVLKALRLAPEGRLRRDGLRALSSLLVHGNNKVMAAVSTQLRSLSLGPTFRERALLCFLDQLEDEDVQTRVAGCLALGCIKAPEGIEPLVYLCQTDTEAVREAARQSLQQCGEEGQSAHRRLEESLDALPRIFGPGSMASTAF

SEQ ID NO: 10446 - protein, 444 aa, Homo sapiens
MEVTADQPRWVSHHHPAVLNGQHPDTHHPGLSHSYMDAAQYPLPEEVDVLFNIDGQGNHVPPYYGNSVRATVQRYPPTHHGSQVCRPPLLHGSLPWLDGGKALGSHHTASPWNLSPFSKTSIHHGSPGPLSVYPPASSSSLSGGHASPHLFTFPPTPPKDVSPDPSLSTPGSAGSARQDEKECLKYQVPLPDSMKLESSHSRGSMTALGGASSSTHHPITTYPPYVPEYSSGLFPPSSLLGGSPTGFGCKSRPKARSSTEGRECVNCGATSTPLWRRDGTGHYLCNACGLYHKMNGQNRPLIKPKRRLSAARRAGTSCANCQTTTTTLWRRNANGDPVCNACGLYYKLHNINRPLTMKKEGIQTRNRKMSSKSKKCKKVHDSLEDFPKNSSFNPAALSRHMSSLSHISPFSHSSHMLTTPTPMHPPSSLSFGPHHPSSMVTAMG

SEQ ID NO: 10447 - protein, 501 aa, Homo sapiens
MGTIHLFRKPQRSFFGKLLREFRLVAADRRSWKILLFGVINLICTGFLLMWCSSTNSIALTAYTYLTIFDLFRDGVSPFWLGWSQTPDLKWSTHLGLPKCWDNRRELPCLSNSLMTCLISYWVTLRKPSPVYSFGFERLEVLAVFASTVLAQLGALFILKESAERFLEQPEIHTGRLLVGTFVALCFNLFTMLSIRNKPFAYVSEAASTSWLQEHVADLSRSLCGIIPGLSSIFLPRMNPFVLIDLAGAFALCITYMLIEINNYFAVDTASAIAIALMTFGTMYPMSVYSGKVLLQTTPPHVIGQLDKLIREVSTLDGVLEVRNEHFWTLGFGSLAGSVHVRIRRDANEQMVLAHVTNRLYTLVSTLTVQIFKDDWIRPALLSGPVAANVLNFSDHHVIPMPLLKGTDDLNPVTSTPAKPSSPPPEFSFNTPGKNVNPVILLNTQTRPYGFGLNHGHTPYSSMLNQGLGVPGIGATQGLRTGFTNIPSRYGTNNRIGQPRP

SEQ ID NO: 10448 - protein, 169 aa, Homo sapiens
MDYPKMDYFLDVESAHRLLDVESAQRFFYSQGAQARRATLLLPPTLMAASSEDDIDRRPIRRVRSKSDTPYLAEARISFNLGAGVSLFGDMDEARMGPAVPTLGRPLGLELCSLENHGLLKTAPTYTTSAHICSGPSTGGQFSTQGMSPVQGAKRRRVVWLPLEGEEFG

SEQ ID NO: 10449 - protein, 888 aa, Homo sapiens
MLRQVLHRGLRTCFSRLGHFIASHPVFFASAPVLISILLGASFSRYQVEESVEHLLAPQHSLAKIERNLVNSLFPVNRSKHRLYSDLQTPGRYGRVIVTSFQKANMLDQHHTDLILKLHAAVTKIQVPRPGFNYTFAHICILNNDKTCIVDDIVHVLEELKNARATNRTNFAITYPITHLKDGRAVYNGHQLGGVTVHSKDRVKSAEAIQLTYYLQSINSLNDMVAERWESSFCDTVRLFQKSNSKVKMYPYTSSSLREDFQKTSRVSERYLVTSLILVVTMAILCCSMQDCVRSKPWLGLLGLVTISLATLTAAGIINLTGGKYNSTFLGVPFVMLGHGLYGTFEMLSSWRKTREDQHVKERTAAVYADSMLSFSLTTAMYLVTFGIGASPFTNIEAARIFCCNSCIAIFFNYLYVLSFYGSSLVFTGYIENNYQHSIFCRKVPKPEALQEKPAWYRFLLTARFSEDTAEGEEANTYESHLLVCFLKRYYCDWITNTYVKPFVVLFYLIYISFALMGYLQVSEGSDLSNIVATATQTIEYTTAQQKYFSNYSPVIGFYIYESIEYWNTSVQEDVLEYTKGFVRISWFESYLNYLRKLNVSTGLPKKNFTDMLRNSFLKAPQFSHFQEDIIFSKKYNDEVDVVASRMFLVAKTMETNREELYDLLETLRRLSVTSKVKFIVFNPSFVYMDRYASSLGAPLHNSCISALFLLFFSAFLVADSLINVWITLTVVSVEFGVIGFMTLWKVELDCISVLCLIYGINYTIDNCAPMLSTFVLGKDFTRTKWVKNALEVHGVAILQSYLCYIVGLIPLAAVPSNLTCTLFRCLFLIAFVTFFHCFAILPVILTFLPPSKKKRKEKKNPENREEIECVEMVDIDSTRVVDQITTV

SEQ ID NO: 10450 - protein, 2045 aa, Homo sapiens
MAGRSHPGPLRPLLPLLVVAACVLPGAGGTCPERALERREEEANVVLTGTVEEILNVDPVQHTYSCKVRVWRYLKGKDLVARESLLDGGNKVVISGFGDPLICDNQVSTGDTRIFFVNPAPPYLWPAHKNELMLNSSLMRITLRNLEEVEFCVEDKPGTHFTPVPPTPPDACRGMLCGFGAVCEPNAEGPGRASCVCKKSPCPSVVAPVCGSDASTYSNECELQRAQCSQQRRIRLLSRGPCGSRDPCSNVTCSFGSTCARSADGLTASCLCPATCRGAPEGTVCGSDGADYPGECQLLRRACARQENVFKKFDGPCDPCQGALPDPSRSCRVNPRTRRPEMLLRPESCPARQAPVCGDDGVTYENDCVMGRSGAARGLLLQKVRSGQCQGRDQCPEPCRFNAVCLSRRGRPRCSCDRVTCDGAYRPVCAQDGRTYDSDCWRQQAECRQQRAIPSKHQGPCDQAPSPCLGVQCAFGATCAVKNGQAACECLQACSSLYDPVCGSDGVTYGSACELEATACTLGREIQVARKGPCDRCGQCRFGALCEAETGRCVCPSECVALAQPVCGSDGHTYPSECMLHVHACTHQISLHVASAGPCETCGDAVCAFGAVCSAGQCVCPRCEHPPPGPVCGSDGVTYGSACELREAACLQQTQIEEARAGPCEQAECGSGGSGSGEDGDCEQELCRQRGGIWDEDSEDGPCVCDFSCQSVPGSPVCGSDGVTYSTECELKKARCESQRGLYVAAQGACRGPTFAPLPPVAPLHCAQTPYGCCQDNITAARGVGLAGCPSACQCNPHGSYGGTCDPATGQCSCRPGVGGLRCDRCEPGFWNFRGIVTDGRSGCTPCSCDPQGAVRDDCEQMTGLCSCKPGVAGPKCGQCPDGRALGPAGCEADASAPATCAEMRCEFGARCVEESGSAHCVCPMLTCPEANATKVCGSDGVTYGNECQLKTIACRQGLQISIQSLGPCQEAVAPSTHPTSASVTVTTPGLLLSQALPAPPGALPLAPSSTAHSQTTPPPSSRPRTTASVPRTTVWPVLTVPPTAPSPAPSLVASAFGESGSTDGSSDEELSGDQEASGGGSGGLEPLEGSSVATPGPPVERASCYNSALGCCSDGKTPSLDAEGSNCPATKVFQGVLELEGVEGQELFYTPEMADPKSELFGETARSIESTLDDLFRNSDVKKDFRSVRLRDLGPGKSVRAIVDVHFDPTTAFRAPDVARALLRQIQVSRRRSLGVRRPLQEHVRFMDFDWFPAFITGATSGAIAAGATARATTASRLPSSAVTPRAPHPSHTSQPVAKTTAAPTTRRPPTTAPSRVPGRRPPAPQQPPKPCDSQPCFHGGTCQDWALGGGFTCSCPAGRGGAVCEKVLGAPVPAFEGRSFLAFPTLRAYHTLRLALEFRALEPQGLLLYNGNARGKDFLALALLDGRVQLRFDTGSGPAVLTSAVPVEPGQWHRLELSRHWRRGTLSVDGETPVLGESPSGTDGLNLDTDLFVGGVPEDQAAVALERTFVGAGLRGCIRLLDVNNQRLELGIGPGAATRGSGVGECGDHPCLPNPCHGGAPCQNLEAGRFHCQCPPGRVGPTCADEKSPCQPNPCHGAAPCRVLPEGGAQCECPLGREGTFCQTASGQDGSGPFLADFNGFSHLELRGLHTFARDLGEKMALEVVFLARGPSGLLLYNGQKTDGKGDFVSLALRDRRLEFRYDLGKGAAVIRSREPVTLGAWTRVSLERNGRKGALRVGDGPRVLGESPVPHTVLNLKEPLYVGGAPDFSKLARAAAVSSGFDGAIQLVSLGGRQLLTPEHVLRQVDVTSFAGHPCTRASGHPCLNGASCVPREAAYVCLCPGGFSGPHCEKGLVEKSAGDVDTLAFDGRTFVEYLNAVTESEKALQSNHFELSLRTEATQGLVLWSGKATERADYVALAIVDGHLQLSYNLGSQPVVLRSTVPVNTNRWLRVVAHREQREGSLQVGNEAPVTGSSPLGATQLDTDGALWLGGLPELPVGPALPKAYGTGFVGCLRDVVVGRHPLHLLEDAVTKPELRPCPTP

SEQ ID NO: 10451 - protein, 326 aa, Homo sapiens
MDYSHQTSLVPCGQDKYISKNELLLHLKTYNLYYEGQNLQLRHREEEDEFIVEGLLNISWGLRRPIRLQMQDDNERIRPPPSSSSWHSGCNLGAQGTTLKPLTVPKVQISEVDAPPEGDQMPSSTDSRGLKPLQEDTPQLMRTRSDVGVRRRGNVRTPSDQRRIRRHRFSINGHFYNHKTSVFTPAYGSVTNVRINSTMTTPQVLKLLLNKFKIENSAEEFALYVVHTSGEKQKLKATDYPLIARILQGPCEQISKVFLMEKDQVEEVTYDVAQYIKFEMPVLKSFIQKLQEEEDREVKKLMRKYTVLRLMIRQRLEEIAETPATI

SEQ ID NO: 10452 - protein, 2718 aa, Homo sapiens
MPRTKQIHPRNLRDKIEEAQKELNGAEVSKKEILQAGVKGTSESLKGVKRKKIVAENHLKKIPKSPLRNPLQAKHKQNTEESSFAVLHSASESHKKQNYIPVKNGKQFTKQNGETPGIIAEASKSEESVSPKKPLFLQQPSELRRWRSEGADPAKFSDLDEQCDSSSLSSKTRTDNSECISSHCGTTSPSYTNTAFDVLLKAMEPELSTLSQKGSPCAIKTEKLRPNKTARSPPKLKNSSMDAPNQTSQELVAESQSSCTSYTVHMSAAQKNEQGAMQSASHLYHQHEHFVPKSNQHNQQLPGCSGFTGSLTNLQNQENAKLEQVYNIAVTSSVGLTSPSSRSQVTPQNQQMDSASPLSISPANSTQSPPMPIYNSTHVASVVNQSVEQMCNLLLKDQKPKKQGKYICEYCNRACAKPSVLLKHIRSHTGERPYPCVTCGFSFKTKSNLYKHKKSHAHTIKLGLVLQPDAGGLFLSHESPKALSIHSDVEDSGESEEEGATDERQHDLGAMELQPVHIIKRMSNAETLLKSSFTPSSPENVIGDFLLQDRSAESQAVTELPKVVVHHVTVSPLRTDSPKAMDPKPELSSAQKQKDLQVTNVQPLSANMSQGGVSRLETNENSHQKGDMNPLEGKQDSHVGTVHAQLQRQQATDYSQEQQGKLLSPRSLGSTDSGYFSRSESADQTVSPPTPFARRLPSTEQDSGRSNGPSAALVTTSTPSALPTGEKALLLPGQMRPPLATKTLEERISKLISDNEALVDDKQLDSVKPRRTSLSRRGSIDSPKSYIFKDSFQFDLKPVGRRTSSSSDIPKSPFTPTEKSKQVFLLSVPSLDCLPITRSNSMPTTGYSAVPANIIPPPHPLRGSQSFDDKIGAFYDDVFVSGPNAPVPQSGHPRTLVRQAAIEDSSANESHVLGTGQSLDESHQGCHAAGEAMSVRSKALAQGPHIEKKKSHQGRGTMFECETCRNRYRKLENFENHKKFYCSELHGPKTKVAMREPEHSPVPGGLQPQILHYRVAGSSGIWEQTPQIRKRRKMKSVGDDEELQQNESGTSPKSSEGLQFQNALGCNPSLPKHNVTIRSDQQHKNIQLQNSHIHLVARGPEQTMDPKLSTIMEQQISSAAQDKIELQRHGTGISVIQHTNSLSRPNSFDKPEPFERASPVSFQELNRTGKSGSLKVIGISQEESHPSRDGSHPHQLALSDALRGELQESSRKSPSERHVLGQPSRLVRQHNIQVPEILVTEEPDRDLEAQCHDQEKSEKFSWPQRSETLSKLPTEKLPPKKKRLRLAEIEHSSTESSFDSTLSRSLSRESSLSHTSSFSASLDIEDVSKTEASPKIDFLNKAEFLMIPAGLNTLNVPGCHREMRRTASEQINCTQTSMEVSDLRSKSFDCGSITPPQTTPLTELQPPSSPSRVGVTGHVPLLERRRGPLVRQISLNIAPDSHLSPVHPTSFQNTALPSVNAVPYQGPQLTSTSLAEFSANTLHSQTQVKDLQAETSNSSSTNVFPVQQLCDINLLNQIHAPPSHQSTQLSLQVSTQGSKPDKNSVLSGSSKSEDCFAPKYQLHCQVFTSGPSCSSNPVHSLPNQVISDPVGTDHCVTSATLPTKLIDSMSNSHPLLPPELRPLGSQVQKVPSSFMLPIRLQSSVPAYCFATLTSLPQILVTQDLPNQPICQTNHSVVPISEEQNSVPTLQKGHQNALPNPEKEFLCENVFSEMSQNSSLSESLPITQKISVGRLSPQQESSASSKRMLSPANSLDIAMEKHQKRAKDENGAVCATDVRPLEALSSRVNEASKQKKPILVRQVCTTEPLDGVMLEKDVFSQPEISNEAVNLTNVLPADNSSTGCSKFVVIEPISELQEFENIKSSTSLTLTVRSSPAPSENTHISPLKCTDNNQERKSPGVKNQGDKVNIQEQSQQPVTSLSLFNIKDTQQLAFPSLKTTTNFTWCYLLRQKSLHLPQKDQKTSAYTDWTVSASNPNPLGLPTKVALALLNSKQNTGKSLYCQAITTHSKSDLLVYSSKWKSSLSKRALGNQKSTVVEFSNKDASEINSEQDKENSLIKSEPRRIKIFDGGYKSNEEYVYVRGRGRGKYICEECGIRCKKPSMLKKHIRTHTDVRPYHCTYCNFSFKTKGNLTKHMKSKAHSKKCVDLGVSVGLIDEQDTEESDEKQRFSYERSGYDLEESDGPDEDDNENEDDDEDSQAESVLSATPSVTASPQHLPSRSSLQDPVSTDEDVRITDCFSGVHTDPMDVLPRALLTRMTVLSTAQSDYNRKTLSPGKARQRAARDENDTIPSVDTSRSPCHQMSVDYPESEEILRSSMAGKAVAITQSPSSVRLPPAAAEHSPQTAAGMPSVASPHPDPQEQKQQITLQPTPGLPSPHTHLFSHLPLHSQQQSRTPYNMVPVGGIHVVPAGLTYSTFVPLQAGPVQLTIPAVSVVHRTLGTHRNTVTEVSGTTNPAGVAELSSVVPCIPIGQIRVPGLQNLSTPGLQSLPSLSMETVNIVGLANTNMAPQVHPPGLALNAVGLQVLTANPSSQSSPAPQAHIPGLQILNIALPTLIPSVSQVAVDAQGAPEMPASQSKACETQPKQTSVASANQVSRTESPQGLPTVQRENAKKVLNPPAPAGDHARLDGLSKMDTEKAASANHVKPKPELTSIQGQPASTSQPLLKAHSEVFTKPSGQQTLSPDRQVPRPTALPRRQPTVHFSDVSSDDDEDRLVIAT

SEQ ID NO: 10453 - protein, 864 aa, Homo sapiens
MPNVLLPPKESNLFKRILKCYEQKQYKNGLKFCKMILSNPKFAEHGETLAMKGLTLNCLGKKEEAYEFVRKGLRNDVKSHVCWHVYGLLQRSDKKYDEAIKCYRNALKLDKDNLQILRDLSLLQIQMRDLEGYRETRYQLLQLRPTQRASWIGYAIAYHLLKDYDMALKLLEEFRQTQQVPPNKIDYEYSELILYQNQVMREADLLQESLEHIEMYEKQICDKLLVEEIKGEILLKLGRLKEASEVFKNLIDRNAENWCYYEGLEKALQISTLEERLQIYEEISKQHPKAITPRRLPLTLVPGERFRELMDKFLRVNFSKGCPPLFTTLKSLYYNTEKVSIIQELVTNYEASLKTCDFFSPYENGEKEPPTTLLWVQYFLAQHFDKLGQYSLALDYINAAIASTPTLIELFYMKAKIYKHIGNLKEAAKWMDEAQSLDTADRFINSKCAKYMLRANMIKEAEEMCSKFTREGTSAMENLNEMQCMWFQTECISAYQRLGRYGDALKKCHEVERHFFEITDDQFDFHTYCMRKMTLRAYVDLLRLEDILRRHAFYFKAARSAIEIYLKLYDNPLTNESKQQEINSENLSAKELKKMLSKQRRAQKKAKLEEERKHAERERQQKNQKKKRDEEEEEASGLKEELIPEKLERVENPLEEAVKFLIPLKNLVADNIDTHLLAFEIYFRKGKFLLMLQSVKRAFAINSNNPWLHECLIRFSKSVSNHSNLPDIVSKVLSQEMQKIFVKKDLESFNEDFLKRNATSLQHLLSGAKMMYFLDKSRQEKAIAIATRLDETIKDKDVKTLIKVSEALLDGSFGNCSSQYEEYRMACHNLLPFTSAFLPAVNEVDNPNVALNHTANYDVLANEI

SEQ ID NO: 10454 - protein, 576 aa, Homo sapiens
MGNSHCVPQAPRRLRASFSRKPSLKGNREDSARMSAGLPGPEAARSGDAAANKLFHYIPGTDILDLENQRENLEQPFLSVFKKGRRRVPVRNLGKVVHYAKVQLRFQHSQDVSDCYLELFPAHLYFQAHGSEGLTFQGLLPLTELSVCPLEGSREHAFQITGPLPAPLLVLCPSRAELDRWLYHLEKQTALLGGPRRCHSAPPQGSCGDELPWTLQRRLTRLRTASGHEPGGSAVCASRVKLQHLPAQEQWDRLLVLYPTSLAIFSEELDGLCFKGELPLRAVHINLEEKEKQIRSFLIEGPLINTIRVVCASYEDYGHWLLCLRAVTHREGAPPLPGAESFPGSQVMGSGRGSLSSGGQTSWDSGCLAPPSTRTSHSLPESSVPSTVGCSSQHTPLHRLSLESSPDAPDHTSETSHSPLYADPYTPPATSHRRVTDVRGLEEFLSAMQSARGPTPSSPLPSVPVSVPASDPRSCSSGPAGPYLLSKKGALQSRAAQRHRGSAKDGGPQPPDAPQLVSSAREGSPEPWLPLTDGRSPRRSRDPGYDHLWDETLSSSHQKCPQLGGPEASGGLVQWI

SEQ ID NO: 10455 - protein, 663 aa, Homo sapiens
MGNSHCVPQAPRRLRASFSRKPSLKGNREDSARMSAGLPGPEAARSGDAAANKLFHYIPGTDILDLENQRENLEQPFLSVFKKGRRRVPVRNLGKVVHYAKVQLRFQHSQDVSDCYLELFPAHLYFQAHGSEGLTFQGLLPLTELSVCPLEGSREHAFQITGVWDASRAPRGTPDPGLGEGPALWLRSTCVYVCALSALPAGPLPAPLLVLCPSRAELDRWLYHLEKQTALLGGPRRCHSAPPQGSCGDELPWTLQRRLTRLRTASGHEPGGSAVCASRVKLQHLPAQEQWDRLLVLYPTSLAIFSEELDGLCFKGELPLRAVHINLEEKEKQIRSFLIEGPLINTIRVVCASYEDYGHWLLCLRAVTHREGAPPLPGAESFPGSQVMGSGRGSLSSGGQTSWDSGCLAPPSTRTSHSLPESSVPSTVGCSSQHTPDQANSDRASIGRRRTELRRSGSSRSPGSKARAEGRGPVTPLHLDLTQLHRLSLESSPDAPDHTSETSHSPLYADPYTPPATSHRRVTDVRGLEEFLSAMQSARGPTPSSPLPSVPVSVPASDPRSCSSGPAGPYLLSKKGALQSRAAQRHRGSAKDGGPQPPDAPQLVSSAREGSPEPWLPLTDGRSPRRSRDPGYDHLWDETLSSSHQKCPQLGGPEASGGLVQWI

SEQ ID NO: 10456 - protein, 611 aa, Homo sapiens
MGNSHCVPQAPRRLRASFSRKPSLKGNREDSARMSAGLPGPEAARSGDAAANKLFHYIPGTDILDLENQRENLEQPFLSVFKKGRRRVPVRNLGKVVHYAKVQLRFQHSQDVSDCYLELFPAHLYFQAHGSEGLTFQGLLPLTELSVCPLEGSREHAFQITGPLPAPLLVLCPSRAELDRWLYHLEKQTALLGGPRRCHSAPPQRRLTRLRTASGHEPGGSAVCASRVKLQHLPAQEQWDRLLVLYPTSLAIFSEELDGLCFKGELPLRAVHINLEEKEKQIRSFLIEGPLINTIRVVCASYEDYGHWLLCLRAVTHREGAPPLPGAESFPGSQVMGSGRGSLSSGGQTSWDSGCLAPPSTRTSHSLPESSVPSTVGCSSQHTPDQANSDRASIGRRRTELRRSGSSRSPGSKARAEGRGPVTPLHLDLTQLHRLSLESSPDAPDHTSETSHSPLYADPYTPPATSHRRVTDVRGLEEFLSAMQSARGPTPSSPLPSVPVSVPASDPRSCSSGPAGPYLLSKKGALQSRAAQRHRGSAKDGGPQPPDAPQLVSSAREGSPEPWLPLTDGRSPRRSRDPGYDHLWDETLSSSHQKCPQLGGPEASGGLVQWI

SEQ ID NO: 10457 - protein, 1333 aa, Homo sapiens
MTADKLVFFVNGRKVVEKNADPETTLLAYLRRKLGLSGTKLGCGEGGCGACTVMLSKYDRLQNKIVHFSANACLAPICSLHHVAVTTVEGIGSTKTRLHPVQERIAKSHGSQCGFCTPGIVMSMYTLLRNQPEPTMEEIENAFQGNLCRCTGYRPILQGFRTFARDGGCCGGDGNNPNCCMNQKKDHSVSLSPSLFKPEEFTPLDPTQEPIFPPELLRLKDTPRKQLRFEGERVTWIQASTLKELLDLKAQHPDAKLVVGNTEIGIEMKFKNMLFPMIVCPAWIPELNSVEHGPDGISFGAACPLSIVEKTLVDAVAKLPAQKTEVFRGVLEQLRWFAGKQVKSVASVGGNIITASPISDLNPVFMASGAKLTLVSRGTRRTVQMDHTFFPGYRKTLLSPEEILLSIEIPYSREGEYFSAFKQASRREDDIAKVTSGMRVLFKPGTTEVQELALCYGGMANRTISALKTTQRQLSKLWKEELLQDVCAGLAEELHLPPDAPGGMVDFRCTLTLSFFFKFYLTVLQKLGQENLEDKCGKLDPTFASATLLFQKDPPADVQLFQEVPKGQSEEDMVGRPLPHLAADMQASGEAVYCDDIPRYENELSLRLVTSTRAHAKIKSIDTSEAKKVPGFVCFISADDVPGSNITGICNDETVFAKDKVTCVGHIIGAVVADTPEHTQRAAQGVKITYEELPAIITIEDAIKNNSFYGPELKIEKGDLKKGFSEADNVVSGEIYIGGQEHFYLETHCTIAVPKGEAGEMELFVSTQNTMKTQSFVAKMLGVPANRIVVRVKRMGGGFGGKETRSTVVSTAVALAAYKTGRPVRCMLDRDEDMLITGGRHPFLARYKVGFMKTGTVVALEVDHFSNVGNTQDLSQSIMERALFHMDNCYKIPNIRGTGRLCKTNLPSNTAFRGFGGPQGMLIAECWMSEVAVTCGMPAEEVRRKNLYKEGDLTHFNQKLEGFTLPRCWEECLASSQYHARKSEVDKFNKENCWKKRGLCIIPTKFGISFTVPFLNQAGALLHVYTDGSVLLTHGGTEMGQGLHTKMVQVASRALKIPTSKIYISETSTNTVPNTSPTAASVSADLNGQAVYAACQTILKRLEPYKKKNPSGSWEDWVTAAYMDTVSLSATGFYRTPNLGYSFETNSGNPFHYFSYGVACSEVEIDCLTGDHKNLRTDIVMDVGSSLNPAIDIGQVEGAFVQGLGLFTLEELHYSPEGSLHTRGPSTYKIPAFGSIPIEFRVSLLRDCPNKKAIYASKAVGEPPLFLAASIFFAIKDAIRAARAQHTGNNVKELFRLDSPATPEKIRNACVDKFTTLCVTGVPENCKPWSVRV

SEQ ID NO: 10458 - protein, 456 aa, Homo sapiens
MGITLIWCLALVLIKWITSKRRGAISYDSSDQTALYIRMLGDVRVRSRAGFESERRGSHPYIDFRIFHSQSEIEVSVSARNIRRLLSFQRYLRSSRFFRGTAVSNSLNILDDDYNGQAKCMLEKVGNWNFDIFLFDRLTNGNSLVSLTFHLFSLHGLIEYFHLDMMKLRRFLVMIQEDYHSQNPYHNAVHAADVTQAMHCYLKEPKLANSVTPWDILLSLIAAATHDLDHPGVNQPFLIKTNHYLATLYKNTSVLENHHWRSAVGLLRESGLFSHLPLESRQQMETQIGALILATDISRQNEYLSLFRSHLDRGDLCLEDTRHRHLVLQMALKCADICNPCRTWELSKQWSEKVTEEFFHQGDIEKKYHLGVSPLCDRHTESIANIQIGFMTYLVEPLFTEWARFSNTRLSQTMLGHVGLNKASWKGLQREQSSSEDTDAAFELNSQLLPQENRLS

SEQ ID NO: 10459 - protein, 281 aa, Homo sapiens
MGVATTLQPPTTSKTLQKQHLEAVGAYQYVLTFLFMGPFFSLLVFVLLFTSLWPFSVFYLVWLYVDWDTPNQGGRRSEWIRNRAIWRQLRDYYPVKLVKTAELPPDRNYVLGAHPHGIMCTGFLCNFSTESNGFSQLFPGLRPWLAVLAGLFYLPVYRDYIMSFGLCPVSRQSLDFILSQPQLGQAVVIMVGGAHEALYSVPGEHCLTLQKRKGFVRLALRHGGPPHPRPPAPPPHRGGSQSLSRPLHDGPGAALRGAQGKLWGPRFHLPHLHLGLAAAFR

SEQ ID NO: 10460 - protein, 4262 aa, Homo sapiens
MPRPGTMALCLLTLVLSLLPPQAAAEQDLSVNRAVWDGGGCISQGDVLNRQCQQLSQHVRTGSAANTATGTTSTNVVEPRMYLSCSTNPEMTSIESSVTSDTPGVSSTRMTPTESRTTSESTSDSTTLFPSSTEDTSSPTTPEGTDVPMSTPSEESISSTMAFVSTAPLPSFEAYTSLTYKVDMSTPLTTSTQASSSPTTPESTTIPKSTNSEGSTPLTSMPASTMKVASSEAITLLTTPVEISTPVTISAQASSSPTTAEGPSLSNSAPSGGSTPLTRMPLSVMLVVSSEASTLSTTPAATNIPVITSTEASSSPTTAEGTSIPTSTYTEGSTPLTSTPASTMPVATSEMSTLSITPVDTSTLVTTSTEPSSLPTTAEATSMLTSTLSEGSTPLTNMPVSTILVASSEASTTSTIPVDSKTFVTTASEASSSPTTAEDTSIATSTPSEGSTPLTSMPVSTTPVASSEASNLSTTPVDSKTQVTTSTEASSSPPTAEVNSMPTSTPSEGSTPLTSMSVSTMPVASSEASTLSTTPVDTSTPVTTSSEASSSSTTPEGTSIPTSTPSEGSTPLTNMPVSTRLVVSSEASTTSTTPADSNTFVTTSSEASSSSTTAEGTSMPTSTYSERGTTITSMSVSTTLVASSEASTLSTTPVDSNTPVTTSTEATSSSTTAEGTSMPTSTYTEGSTPLTSMPVNTTLVASSEASTLSTTPVDTSTPVTTSTEASSSPTTADGASMPTSTPSEGSTPLTSMPVSKTLLTSSEASTLSTTPLDTSTHITTSTEASCSPTTTEGTSMPISTPSEGSPLLTSIPVSITPVTSPEASTLSTTPVDSNSPVTTSTEVSSSPTPAEGTSMPTSTYSEGRTPLTSMPVSTTLVATSAISTLSTTPVDTSTPVTNSTEARSSPTTSEGTSMPTSTPGEGSTPLTSMPDSTTPVVSSEARTLSATPVDTSTPVTTSTEATSSPTTAEGTSIPTSTPSEGTTPLTSTPVSHTLVANSEASTLSTTPVDSNTPLTTSTEASSPPPTAEGTSMPTSTPSEGSTPLTRMPVSTTMVASSETSTLSTTPADTSTPVTTYSQASSSSTTADGTSMPTSTYSEGSTPLTSVPVSTRLVVSSEASTLSTTPVDTSIPVTTSTEASSSPTTAEGTSIPTSPPSEGTTPLASMPVSTTLVVSSEANTLSTTPVDSKTQVATSTEASSPPPTAEVTSMPTSTPGERSTPLTSMPVRHTPVASSEASTLSTSPVDTSTPVTTSAETSSSPTTAEGTSLPTSTTSEGSTLLTSIPVSTTLVTSPEASTLLTTPVDTKGPVVTSNEVSSSPTPAEGTSMPTSTYSEGRTPLTSIPVNTTLVASSAISILSTTPVDNSTPVTTSTEACSSPTTSEGTSMPNSNPSEGTTPLTSIPVSTTPVVSSEASTLSATPVDTSTPGTTSAEATSSPTTAEGISIPTSTPSEGKTPLKSIPVSNTPVANSEASTLSTTPVDSNSPVVTSTAVSSSPTPAEGTSIAISTPSEGSTALTSIPVSTTTVASSEINSLSTTPAVTSTPVTTYSQASSSPTTADGTSMQTSTYSEGSTPLTSLPVSTMLVVSSEANTLSTTPIDSKTQVTASTEASSSTTAEGSSMTISTPSEGSPLLTSIPVSTTPVASPEASTLSTTPVDSNSPVITSTEVSSSPTPAEGTSMPTSTYTEGRTPLTSITVRTTPVASSAISTLSTTPVDNSTPVTTSTEARSSPTTSEGTSMPNSTPSEGTTPLTSIPVSTTPVLSSEASTLSATPIDTSTPVTTSTEATSSPTTAEGTSIPTSTLSEGMTPLTSTPVSHTLVANSEASTLSTTPVDSNSPVVTSTAVSSSPTPAEGTSIATSTPSEGSTALTSIPVSTTTVASSETNTLSTTPAVTSTPVTTYAQVSSSPTTADGSSMPTSTPREGRPPLTSIPVSTTTVASSEINTLSTTLADTRTPVTTYSQASSSPTTADGTSMPTPAYSEGSTPLTSMPLSTTLVVSSEASTLSTTPVDTSTPATTSTEGSSSPTTAGGTSIQTSTPSERTTPLAGMPVSTTLVVSSEGNTLSTTPVDSKTQVTNSTEASSSATAEGSSMTISAPSEGSPLLTSIPLSTTPVASPEASTLSTTPVDSNSPVITSTEVSSSPIPTEGTSMQTSTYSDRRTPLTSMPVSTTVVASSAISTLSTTPVDTSTPVTNSTEARSSPTTSEGTSMPTSTPSEGSTPFTSMPVSTMPVVTSEASTLSATPVDTSTPVTTSTEATSSPTTAEGTSIPTSTLSEGTTPLTSIPVSHTLVANSEVSTLSTTPVDSNTPFTTSTEASSPPPTAEGTSMPTSTSSEGNTPLTRMPVSTTMVASFETSTLSTTPADTSTPVTTYSQAGSSPTTADDTSMPTSTYSEGSTPLTSVPVSTMPVVSSEASTHSTTPVDTSTPVTTSTEASSSPTTAEGTSIPTSPPSEGTTPLASMPVSTTPVVSSEAGTLSTTPVDTSTPMTTSTEASSSPTTAEDIVVPISTASEGSTLLTSIPVSTTPVASPEASTLSTTPVDSNSPVVTSTEISSSATSAEGTSMPTSTYSEGSTPLRSMPVSTKPLASSEASTLSTTPVDTSIPVTTSTETSSSPTTAKDTSMPISTPSEVSTSLTSILVSTMPVASSEASTLSTTPVDTRTLVTTSTGTSSSPTTAEGSSMPTSTPGERSTPLTNILVSTTLLANSEASTLSTTPVDTSTPVTTSAEASSSPTTAEGTSMRISTPSDGSTPLTSILVSTLPVASSEASTVSTTAVDTSIPVTTSTEASSSPTTAEVTSMPTSTPSETSTPLTSMPVNHTPVASSEAGTLSTTPVDTSTPVTTSTKASSSPTTAEGIVVPISTASEGSTLLTSIPVSTTPVASSEASTLSTTPVDTSIPVTTSTEGSSSPTTAEGTSMPISTPSEVSTPLTSILVSTVPVAGSEASTLSTTPVDTRTPVTTSAEASSSPTTAEGTSMPISTPGERRTPLTSMSVSTMPVASSEASTLSRTPADTSTPVTTSTEASSSPTTAEGTGIPISTPSEGSTPLTSIPVSTTPVAIPEASTLSTTPVDSNSPVVTSTEVSSSPTPAEGTSMPISTYSEGSTPLTGVPVSTTPVTSSAISTLSTTPVDTSTPVTTSTEAHSSPTTSEGTSMPTSTPSEGSTPLTYMPVSTMLVVSSEDSTLSATPVDTSTPVTTSTEATSSTTAEGTSIPTSTPSEGMTPLTSVPVSNTPVASSEASILSTTPVDSNTPLTTSTEASSSPPTAEGTSMPTSTPSEGSTPLTSMPVSTTTVASSETSTLSTTPADTSTPVTTYSQASSSPPIADGTSMPTSTYSEGSTPLTNMSFSTTPVVSSEASTLSTTPVDTSTPVTTSTEASLSPTTAEGTSIPTSSPSEGTTPLASMPVSTTPVVSSEVNTLSTTPVDSNTLVTTSTEASSSPTIAEGTSLPTSTTSEGSTPLSIMPLSTTPVASSEASTLSTTPVDTSTPVTTSSPTNSSPTTAEVTSMPTSTAGEGSTPLTNMPVSTTPVASSEASTLSTTPVDSNTFVTSSSQASSSPATLQVTTMRMSTPSEGSSSLTTMLLSSTYVTSSEASTPSTPSVDRSTPVTTSTQSNSTPTPPEVITLPMSTPSEVSTPLTIMPVSTTSVTISEAGTASTLPVDTSTPVITSTQVSSSPVTPEGTTMPIWTPSEGSTPLTTMPVSTTRVTSSEGSTLSTPSVVTSTPVTTSTEAISSSATLDSTTMSVSMPMEISTLGTTILVSTTPVTRFPESSTPSIPSVYTSMSMTTASEGSSSPTTLEGTTTMPMSTTSERSTLLTTVLISPISVMSPSEASTLSTPPGDTSTPLLTSTKAGSFSIPAEVTTIRISITSERSTPLTTLLVSTTLPTSFPGASIASTPPLDTSTTFTPSTDTASTPTIPVATTISVSVITEGSTPGTTIFIPSTPVTSSTADVFPATTGAVSTPVITSTELNTPSTSSSSTTTSFSTTKEFTTPAMTTAAPLTYVTMSTAPSTPRTTSRGCTTSASTLSATSTPHTSTSVTTRPVTPSSESSRPSTITSHTIPPTFPPAHSSTPPTTSASSTTVNPEAVTTMTTRTKPSTRTTSFPTVTTTAVPTNTTIKSNPTSTPTVPRTTTCFGDGCQNTASRCKNGGTWDGLKCQCPNLYYGELCEEVVSSIDIGPPETISAQMELTVTVTSVKFTEELKNHSSQEFQEFKQTFTEQMNIVYSGIPEYVGVNITKLRHDVFQHHWHPSAKHYGDPVRP

SEQ ID NO: 10461 - protein, 253 aa, Homo sapiens
MANLGCWMLVLFVATWSDLGLCKKRPKPGGWNTGGSRYPGQGSPGGNRYPPQGGGGWGQPHGGGWGQPHGGGWGQPHGGGWGQPHGGGWGQGGGTHSQWNKPSKPKTNMKHMAGAAAAGAVVGGLGGYMLGSAMSRPIIHFGSDYEDRYYRENMHRYPNQVYYRPMDEYSNQNNFVHDCVNITIKQHTVTTTTKGENFTETDVKMMERVVEQMCITQYERESQAYYQRGSSMVLFSSPPVILLISFLIFLIVG

SEQ ID NO: 10462 - protein, 1875 aa, Homo sapiens
MEMEANDHFNFTGLPPAPAASGLKPSPSSGEGLYTNGSPMNFPQQGKSLNGDVNVNGLSTVSHTTTSGILNSAPHSSSTSHLHHPSVAYDCLWNYSQYPSANPGSNLKDPPLLSQFSGGQYPLNGILGGSRQPSSPSHNTNLRAGSQEFWANGTQSPMGLNFDSQELYDSFPDQNFEEVGSGIHPDEAAEKEMTSVVAENGTGLVGSLELEEEQPELKMCGYNGSVPSVESLHQEVSVLVPDPTVSCLDDPSHLPDQLEDTPILSEDSLEPFNSLAPEPVSGGLYGIDDTELMGAEDKLPLEDSPVISALDCPSLNNATAFSLLADDSQTSTSIFASPTSPPVLGESVLQDNSFDLNNGSDAEQEEMETQSSDFPPSLTQPAPDQSSTIQLHPATSPAVSPTTSPAVSLVVSPAASPEISPEVCPAASTVVSPAVFSVVSPASSAVLPAVSLEVPLTASVTSPKASPVTSPAAAFPTASPANKDVSSFLETTADVEEITGEGLTASGSGDVMRRRIATPEEVRLPLQHGWRREVRIKKGSHRWQGETWYYGPCGKRMKQFPEVIKYLSRNVVHSVRREHFSFSPRMPVGDFFEERDTPEGLQWVQLSAEEIPSRIQAITGKRGRPRNTEKAKTKEVPKVKRGRGRPPKVKITELLNKTDNRPLKKLEAQETLNEEDKAKIAKSKKKMRQKVQRGECQTTIQGQARNKRKQETKSLKQKEAKKKSKAEKEKGKTKQEKLKEKVKREKKEKVKMKEKEEVTKAKPACKADKTLATQRRLEERQRQQMILEEMKKPTEDMCLTDHQPLPDFSRVPGLTLPSGAFSDCLTIVEFLHSFGKVLGFDPAKDVPSLGVLQEGLLCQGDSLGEVQDLLVRLLKAALHDPGFPSYCQSLKILGEKVSEIPLTRDNVSEILRCFLMAYGVEPALCDRLRTQPFQAQPPQQKAAVLAFLVHELNGSTLIINEIDKTLESMSSYRKNKWIVEGRLRRLKTVLAKRTGRSEVEMEGPEECLGRRRSSRIMEETSGMEEEEEEESIAAVPGRRGRRDGEVDATASSIPELERQIEKLSKRQLFFRKKLLHSSQMLRAVSLGQDRYRRRYWVLPYLAGIFVEGTEGNLVPEEVIKKETDSLKVAAHASLNPALFSMKMELAGSNTTASSPARARGRPRKTKPGSMQPRHLKSPVRGQDSEQPQAQLQPEAQLHAPAQPQPQLQLQLQSHKGFLEQEGSPLSLGQSQHDLSQSAFLSWLSQTQSHSSLLSSSVLTPDSSPGKLDPAPSQPPEEPEPDEAESSPDPQALWFNISAQMPCNAAPTPPPAVSEDQPTPSPQQLASSKPMNRPSAANPCSPVQFSSTPLAGLAPKRRAGDPGEMPQSPTGLGQPKRRGRPPSKFFKQMEQRYLTQLTAQPVPPEMCSGWWWIRDPEMLDAMLKALHPRGIREKALHKHLNKHRDFLQEVCLRPSADPIFEPRQLPAFQEGIMSWSPKEKTYETDLAVLQWVEELEQRVIMSDLQIRGWTCPSPDSTREDLAYCEHLSDSQEDITWRGRGREGLAPQRKTTNPLDLAVMRLAALEQNVERRYLREPLWPTHEVVLEKALLSTPNGAPEGTTTEISYEITPRIRVWRQTLERCRSAAQVCLCLGQLERSIAWEKSVNKVTCLVCRKGDNDEFLLLCDGCDRGCHIYCHRPKMEAVPEGDWFCTVCLAQQVEGEFTQKPGFPKRGQKRKSGYSLNFSEGDGRRRRVLLRGRESPAAGPRYSEEGLSPSKRRRLSMRNHHSDLTFCEIILMEMESHDAAWPFLEPVNPRLVSGYRRIIKNPMDFSTMRERLLRGGYTSSEEFAADALLVFDNCQTFNEDDSEVGKAGHIMRRFFESRWEEFYQGKQANL

SEQ ID NO: 10463 - protein, 5478 aa, Homo sapiens
MLVIWILTLALRLCASVTTVTPEGSAVHKAISQQGTLWTGEVLEKQTVEQGKSTLRRQKNHFHRSAGELRCRNALKDEGASAGWSVMFAGESVVVLVHLWMTGARVKNLGLVEFASPGDDGDGRAEGFSLGLPLSEQARAAGAREKERQETVINHSTFSGFSQITGSTVNTSIGGNTTSASTPSSSDPFTTFSDYGVSVTFITGSTATKHFLDSSTNSGHSEESTVSHSGPGATGTTLFPSHSATSVFVGEPKTSPITSASMETTALPGSTTTAGLSEKSTTFYSSPRSPDRTLSPARTTSSGVSEKSTTSHSRPGPTHTIAFPDSTTMPGVSQESTASHSIPGSTDTTLSPGTTTPSSLGPESTTFHSSPGYTKTTRLPDNTTTSGLLEASTPVHSSTGSPHTTLSPSSSTTHEGEPTTFQSWPSSKDTSPAPSGTTSAFVKLSTTYHSSPSSTPTTHFSASSTTLGHSEESTPVHSSPVATATTPPPARSATSGHVEESTAYHRSPGSTQTMHFPESSTTSGHSEESATFHGSTTHTKSSTPSTTAALAHTSYHSSLGSTETTHFRDSSTISGRSEESKASHSSPDAMATTVLPAGSTPSVLVGDSTPSPISSGSMETTALPGSTTKPGLSEKSTTFYSSPRSPDTTHLPASMTSSGVSEESTTSHSRPGSTHTTAFPGSTTMPGLSQESTASHSSPGPTDTTLSPGSTTASSLGPEYTTFHSRPGSTETTLLPDNTTASGLLEASMPVHSSTRSPHTTLSPAGSTTRQGESTTFHSWPSSKDTRPAPPTTTSAFVEPSTTSHGSPSSIPTTHISARSTTSGLVEESTTYHSSPGSTQTMHFPESDTTSGRGEESTTSHSSTTHTISSAPSTTSALVEEPTSYHSSPGSTATTHFPDSSTTSGRSEESTASHSSQDATGTIVLPARSTTSVLLGESTTSPISSGSMETTALPGSTTTPGLSERSTTFHSSPRSPATTLSPASTTSSGVSEESTTSRSRPGSTHTTAFPDSTTTPGLSRHSTTSHSSPGSTDTTLLPASTTTSGPSQESTTSHSSSGSTDTALSPGSTTALSFGQESTTFHSNPGSTHTTLFPDSTTSSGIVEASTRVHSSTGSPRTTLSPASSTSPGLQGESTAFQTHPASTHTTPSPPSTATAPVEESTTYHRSPGSTPTTHFPASSTTSGHSEKSTIFHSSPDASGTTPSSAHSTTSGRGESTTSRISPGSTEITTLPGSTTTPGLSEASTTFYSSPRSPTTTLSPASMTSLGVGEESTTSRSQPGSTHSTVSPASTTTPGLSEESTTVYSSSRGSTETTVFPHSTTTSVHGEEPTTFHSRPASTHTTLFTEDSTTSGLTEESTAFPGSPASTQTGLPATLTTADLGEESTTFPSSSGSTGTKLSPARSTTSGLVGESTPSRLSPSSTETTTLPGSPTTPSLSEKSTTFYTSPRSPDATLSPATTTSSGVSEESSTSHSQPGSTHTTAFPDSTTTSDLSQEPTTSHSSQGSTEATLSPGSTTASSLGQQSTTFHSSPGDTETTLLPDDTITSGLVEASTPTHSSTGSLHTTLTPASSTSAGLQEESTTFQSWPSSSDTTPSPPGTTAAPVEVSTTYHSRPSSTPTTHFSASSTTLGRSEESTTVHSSPGATGTALFPTRSATSVLVGEPTTSPISSGSTETTALPGSTTTAGLSEKSTTFYSSPRSPDTTLSPASTTSSGVSEESTTSHSRPGSTHTTAFPGSTTMPGVSQESTASHSSPGSTDTTLSPGSTTASSLGPESTTFHSSPGSTETTLLPDNTTASGLLEASTPVHSSTGSPHTTLSPAGSTTRQGESTTFQSWPSSKDTMPAPPTTTSAFVELSTTSHGSPSSTPTTHFSASSTTLGRSEESTTVHSSPVATATTPSPARSTTSGLVEESTAYHSSPGSTQTMHFPESSTASGRSEESRTSHSSTTHTISSPPSTTSALVEEPTSYHSSPGSTATTHFPDSSTTSGRSEESTASHSSQDATGTIVLPARSTTSVLLGESTTSPISSGSMETTALPGSTTTPGLSEKSTTFHSSPRSPATTLSPASTTSSGVSEESTTSHSRPGSTHTTAFPDSTTTPGLSRHSTTSHSSPGSTDTTLLPASTTTSGPSQESTTSHSSPGSTDTALSPGSTTALSFGQESTTFHSSPGSTHTTLFPDSTTSSGIVEASTRVHSSTGSPRTTLSPASSTSPGLQGESTAFQTHPASTHTTPSPPSTATAPVEESTTYHRSPGSTPTTHFPASSTTSGHSEKSTIFHSSPDASGTTPSSAHSTTSGRGESTTSRISPGSTEITTLPGSTTTPGLSEASTTFYSSPRSPTTTLSPASMTSLGVGEESTTSRSQPGSTHSTVSPASTTTPGLSEESTTVYSSSPGSTETTVFPRTPTTSVRGEEPTTFHSRPASTHTTLFTEDSTTSGLTEESTAFPGSPASTQTGLPATLTTADLGEESTTFPSSSGSTGTTLSPARSTTSGLVGESTPSRLSPSSTETTTLPGSPTTPSLSEKSTTFYTSPRSPDATLSPATTTSSGVSEESSTSHSQPGSTHTTAFPDSTTTPGLSRHSTTSHSSPGSTDTTLLPASTTTSGPSQESTTSHSSPGSTDTALSPGSTTALSFGQESTTFHSSPGSTHTTLFPDSTTSSGIVEASTRVHSSTGSPRTTLSPASSTSPGLQGESTTFQTHPASTHTTPSPPSTATAPVEESTTYHRSPGSTPTTHFPASSTTSGHSEKSTIFHSSPDASGTTPSSAHSTTSGRGESTTSRISPGSTEITTLPGSTTTPGLSEASTTFYSSPRSPTTTLSPASMTSLGVGEESTTSRSQPGSTHSTVSPASTTTPGLSEESTTVYSSSPGSTETTVFPRSTTTSVRGEEPTTFHSRPASTHTTLFTEDSTTSGLTEESTAFPGSPASTQTGLPATLTTADLGEESTTFPSSSGSTGTTLSPARSTTSGLVGESTPSRLSPSSTETTTLPGSPTTPSLSEKSTTFYTSPRSPDATLSPATTTSSGVSEESSTSHSQPGSTHTTAFPDSTTTSGLSQEPTASHSSQGSTEATLSPGSTTASSLGQQSTTFHSSPGDTETTLLPDDTITSGLVEASTPTHSSTGSLHTTLTPASSTSAGLQEESTTFQSWPSSSDTTPSPPGTTAAPVEVSTTYHSRPSSTPTTHFSASSTTLGRSEESTTVHSSPGATGTALFPTRSATSVLVGEPTTSPISSGSTETTALPGSTTTAGLSEKSTTFYSSPRSPDTTLSPASTTSSGVSEESTTSHSRPGSTHTTAFPGSTTMPGVSQESTASHSSPGSTDTTLSPGSTTASSLGPESTTFHSGPGSTETTLLPDNTTASGLLEASTPVHSSTGSPHTTLSPAGSTTRQGESTTFQSWPNSKDTTPAPPTTTSAFVELSTTSHGSPSSTPTTHFSASSTTLGRSEESTTVHSSPVATATTPSPARSTTSGLVEESTTYHSSPGSTQTMHFPESDTTSGRGEESTTSHSSTTHTISSAPSTTSALVEEPTSYHSSPGSTATTHFPDSSTTSGRSEESTASHSSQDATGTIVLPARSTTSVLLGESTTSPISSGSMETTALPGSTTTPGLSEKSTTFHSSPRSPATTLSPASTTSSGVSEESTTSHSRPGSTHTTAFPDSTTTPGLSRHSTTSHSSPGSTDTTLLPASTTTSGSSQESTTSHSSSGSTDTALSPGSTTALSFGQESTTFHSSPGSTHTTLFPDSTTSSGIVEASTRVHSSTGSPRTTLSPASSTSPGLQGESTAFQTHPASTHTTPSPPSTATAPVEESTTYHRSPGSTPTTHFPASSTTSGHSEKSTIFHSSPDASGTTPSSAHSTTSGRGESTTSRISPGSTEITTLPGSTTTPGLSEASTTFYSSPRSPTTTLSPASMTSLGVGEESTTSRSQPGSTHSTVSPASTTTPGLSEESTTVYSSSPGSTETTVFPRSTTTSVRREEPTTFHSRPASTHTTLFTEDSTTSGLTEESTAFPGSPASTQTGLPATLTTADLGEESTTFPSSSGSTGTKLSPARSTTSGLVGESTPSRLSPSSTETTTLPGSPTTPSLSEKSTTFYTSPRSPDATLSPATTTSSGVSEESSTSHSQPGSTHTTAFPDSTTTSGLSQEPTTSHSSQGSTEATLSPGSTTASSLGQQSTTFHSSPGDTETTLLPDDTITSGLVEASTPTHSSTGSLHTTLTPASSTSTGLQEESTTFQSWPSSSDTTPSPPSTTAVPVEVSTTYHSRPSSTPTTHFSASSTTLGRSEESTTVHSSPGATGTALFPTRSATSVLVGEPTTSPISSGSTETTALPGSTTTAGLSEKSTTFYSSPRSPDTTLSPASTTSSGVSEESTTSHSRPGSMHTTAFPSSTTMPGVSQESTASHSSPGSTDTTLSPGSTTASSLGPESTTFHSSPGSTETTLLPDNTTASGLLEASTPVHSSTGSPHTTLSPAGSTTRQGESTTFQSWPNSKDTTPAPPTTTSAFVELSTTSHGSPSSTPTTHFSASSTTLGRSEESTTVHSSPVATATTPSPARSTTSGLVEESTTYHSSPGSTQTMHFPESNTTSGRGEESTTSHSSTTHTISSAPSTTSALVEEPTSYHSSPGSTATTHFPDSSTTSGRSEESTASHSSQDATGTIVLPARSTTSVLLGESTTSPISSGSMETTALPGSTTTPGLSEKSTTFHSSPSSTPTTHFSASSTTLGRSEESTTVHSSPVATATTPSPARSTTSGLVEESTAYHSSPGSTQTMHFPESSTASGRSEESRTSHSSTTHTISSPPSTTSALVEEPTSYHSSPGSIATTHFPESSTTSGRSEESTASHSSPDTNGITPLPAHFTTSGRIAESTTFYISPGSMETTLASTATTPGLSAKSTILYSSSRSPDQTLSPASMTSSSISGEPTSLYSQAESTHTTAFPASTTTSGLSQESTTFHSKPGSTETTLSPGSITTSSFAQEFTTPHSQPGSALSTVSPASTTVPGLSEESTTFYSSPGSTETTAFSHSNTMSIHSQQSTPFPDSPGFTHTVLPATLTTTDIGQESTAFHSSSDATGTTPLPARSTASDLVGEPTTFYISPSPTYTTLFPASSSTSGLTEESTTFHTSPSFTSTIVSTESLETLAPGLCQEGQIWNGKQCVCPQGYVGYQCLSPLESFPVETPEKLNATLGMTVKVTYRNFTEKMNDASSQEYQNFSTLFKNRMDVVLKGDNLPQYRGVNIRRLLNGSIVVKNDVILEADYTLEYEELFENLAEIVKAKIMNETRTTLLDPDSCRKAILCYSEEDTFVDSSVTPGFDFQEQCTQKAAEGYTQFYYVDVLDGKLACVNKCTKGTKSQMNCNLGTCQLQRSGPRCLCPNTNTHWYWGETCEFNIAKSLVYGIVGAVMAVLLLALIILIILFSLSQRKRHREQYDVPQEWRKEGTPGIFQKTAIWEDQNLRESRFGLENAYNNFRPTLETVDSGTELHIQRPEMVASTV

SEQ ID NO: 10464 - protein, 834 aa, Homo sapiens
MKYKNLMARALYDNVPECAEELAFRKGDILTVIEQNTGGLEGWWLCSLHGRQGIVPGNRVKLLIGPMQETASSHEQPASGLMQQTFGQQKLYQVPNPQAAPRDTIYQVPPSYQNQGIYQVPTGHGTQEQEVYQVPPSVQRSIGGTSGPHVGKKVITPVRTGHGYVYEYPSRYQKDVYDIPPSHTTQGVYDIPPSSAKGPVFSVPVGEIKPQGVYDIPPTKGVYAIPPSACRDEAGLREKDYDFPPPMRQAGRPDLRPEGVYDIPPTCTKPAGKDLHVKYNCDIPGAAEPVARRHQSLSPNHPPPQLGQSVGSQNDAYDVPRGVQFLEPPAETSEKANPQERDGVYDVPLHNPPDAKGSRDLVDGINRLSFSSTGSTRSNMSTSSTSSKESSLSASPAQDKRLFLDPDTAIERLQRLQQALEMGVSSLMALVTTDWRCYGYMERHINEIRTAVDKVELFLKEYLHFVKGAVANAACLPELILHNKMKRELQRVEDSHQILSQTSHDLNECSWSLNILAINKPQNKCDDLDRFVMVAKTVPDDAKQLTTTINTNAEALFRPGPGSLHLKNGPESIMNSTEYPHGGSQGQLLHPGDHKAQAHNKALPPGLSKEQAPDCSSSDGSERSWMDDYDYVHLQGKEEFERQQKELLEKENIMKQNKMQLEHHQLSQFQLLEQEITKPVENDISKWKPSQSLPTTNSGVSAQDRQLLCFYYDQCETHFISLLNAIDALFSCVSSAQPPRIFVAHSKFVILSAHKLVFIGDTLTRQVTAQDIRNKVMNSSNQLCEQLKTIVMATKMAALHYPSTTALQEMVHQVTDLSRNAQLFKRSLLEMATF

SEQ ID NO: 10465 - protein, 1077 aa, Homo sapiens
MPRRKQEQPKRLPSHVSRQEEAEGELSEGEHWYGNSSETPSEASYGEVQENYKLSLEDRIQEQSTSPDTSLGSTTPSSHTLELVALDSEVLRDSLQCQDHLSPGVSSLCDDDPGSNKPLSSNLRRLLEAGSLKLDAAATANGRVESPVNVGSNLSFSPPSHHAQQLSVLARKLAEKQEQNDQYTPSNRFIWNQGKWLPNSTTTCSLSPDSAILKLKAAANAVLQDKSLTRTEETMRFESFSSPFSSQSASSTLAALSKKVSERSLTPGQEHPPPASSFLSLASMTSSAALLKEVAARAAGSLLAEKSSLLPEDPLPPPPSEKKPEKVTPPPPPPPPPPPPPPPQSLELLLLPVPKGRVSKPSNSASEEESGKPFQCPICGLVIKRKSYWKRHMVIHTGLKSHQCPLCPFRCARKDNLKSHMKVHQHQDRGETFQCQLCPFTSSRHFSLKLHMRCHQHFLRTEAKVKEEIPDPDVKGSPHLSDSACLGQQREGGGTELVGTMMTSNTPERTSQGGAGVSPLLVKEEPKEDNGLPTSFTLNAADRPANHTKLKDPSEYVANSASALFSQDISVKMASDFLMKLSAANQKEPMNLNFKVKEEPKEGESLSTTLPRSSYVFSPESEVSAPGVSEDALKPQEGKGSVLRRDVSVKAASELLMKLSAESYKETQMVKIKEEPMEVDIQDSHVSISPSRNVGYSTLIGREKTEPLQKMPEGRVPPERNLFSQDISVKMASELLFQLSEKVSKEHNHTKENTIRTTTSPFFSEDTFRQSPFTSNSKELLPSDSVLHGRISAPETEKIVLEAGNGLPSWKFNDQLFPCDVCGKVFGRQQTLSRHLSLHTEERKYKCHLCPYAAKCRANLNQHLTVHSVKLVSTDTEDIVSAVTSEGSDGKKHPYYYSCHVCGFETELNVQFVSHMSLHVDKEQWMFSICCTACDFVTMEEAEIKTHIGTKHTGEDRKTPSESNSPSSSSLSALSDSANSKDDSDGSQKNKGGNNLLVISVMPGSQPSLNSEEKPEKGFECVFCNFVCKTKNMFERHLQIHLITRMFECDVCHKFMKTPEQLLEHKKCHTVPTGGLK

SEQ ID NO: 10466 - protein, 572 aa, Homo sapiens
MTFRDLLSVSFEGPRPDSSAGGSSAGGGGGSAGGAAPSEGPAVGGVPGGAGGGGGVVGAGSGEDNRSSAGEPGSAGAGGDVNGTAAVGGLVVSAQGVGVGVFLAAFILMAVAGNLLVILSVACNRHLQTVTNYFIVNLAVADLLLSATVLPFSATMEVLGFWAFGRAFCDVWAAVDVLCCTASILSLCTISVDRYVGVRHSLKYPAIMTERKAAAILALLWVVALVVSVGPLLGWKEPVPPDERFCGITEEAGYAVFSSVCSFYLPMAVIVVMYCRVYVVARSTTRSLEAGVKRERGKASEVVLRIHCRGAATGADGAHGMRSAKGHTFRSSLSVRLLKFSREKKAAKTLAIVVGVFVLCWFPFFFVLPLGSLFPQLKPSEGVFKVIFWLGYFNSCVNPLIYPCSSREFKRAFLRLLRCQCRRRRRRRPLWRVYGHHWRASTSGLRQDCAPSSGDAPPGAPLALTALPDPDPEPPGTPEMQAPVASRRKPPSAFREWRLLGPFRRPTTQLRAKVSSLSHKIRAGGAQRAEAACAQRSEVEAVSLGVPHEVAEGATCQAYELADYSNLRETDI

SEQ ID NO: 10467 - protein, 758 aa, Homo sapiens
MAQRKNAKSSGNSSSSGSGSGSTSAGSSSPGARRETKHGGHKNGRKGGLSGTSFFTWFMVIALLGVWTSVAVVWFDLVDYEEVLGKLGIYDADGDGDFDVDDAKVLLGLKERSTSEPAVPPEEAEPHTEPEEQVPVEAEPQNIEDEAKEQIQSLLHEMVHAEHVEGEDLQQEDGPTGEPQQEDDEFLMATDVDDRFETLEPEVSHEETEHSYHVEETVSQDCNQDMEEMMSEQENPDSSEPVVEDERLHHDTDDVTYQVYEEQAVYEPLENEGIEITEVTAPPEDNPVEDSQVIVEEVSIFPVEEQQEVPPETNRKTDDPEQKAKVKKKKPKLLNKFDKTIKAELDAAEKLRKRGKIEEAVNAFKELVRKYPQSPRARYGKAQCEDDLAEKRRSNEVLRGAIETYQEVASLPDVPADLLKLSLKRRSDRQQFLGHMRGSLLTLQRLVQLFPNDTSLKNDLGVGYLLIGDNDNAKKVYEEVLSVTPNDGFAKVHYGFILKAQNKIAESIPYLKEGIESGDPGTDDGRFYFHLGDAMQRVGNKEAYKWYELGHKRGHFASVWQRSLYNVNGLKAQPWWTPKETGYTELVKSLERNWKLIRDEGLAVMDKAKGLFLPEDENLREKGDWSQFTLWQQGRRNENACKGAPKTCTLLEKFPETTGCRRGQIKYSIMHPGTHVWPHTGPTNCRLRMHLGLVIPKEGCKIRCANETKTWEEGKVLIFDDSFEHEVWQDASSFRLIFIVDVWHPELTPQQRRSLPAI

SEQ ID NO: 10468 - protein, 3323 aa, Homo sapiens
MQLLGLLGLLWMLKASPWATGTLSTATSISQVPFPRAEAASAVLSNSPHSRDLAGWPLGVPQLASPAPGHRENAPMTLTTSPHDTLISETLLNSPVSSNTSTTPTSKFAFKVETTPPTVLVYSATTECVYPTSFIITISHPTSICVTTTQVAFTSSYTSTPVTQKPVTTVTSTYSMTTTEKGTSAMTSSPSTTTARETPIVTVTPSSVSATDTTFHTTISSTTRTTERTPLPTGSIHTTTSPTPVFTTLKTAVTSTSPITSSITSTNTVTSMTTTASQPTATNTLSSPTRTILSSTPVLSTETITSGITNTTPLSTLVTTLPTTISRSTPTSETTYTTSPTSTVTDSTTKIAYSTSMTGTLSTETSLPPTSSSLPTTETATTPMTNLVTTTTEISSHSTPSFSSSTIYSTVSTSTTAISSLPPTSGTMVTSTTMTPSSLSTDIPFTTPTTITHHSVGSTGFLTTATDLTSTFTVSSSSAMSTSVIPSSPSIQNTETSSLVSMTSATTPNVRPTFVSTLSTPTSSLLTTFPATYSFSSSMSASSAGTTHTESISSPPASTSTLHTTAESTLAPTTTTSFTTSTTMEPPSTTAATTGTGQTTFTSSTATFPETTTPTPTTDMSTESLTTAMTSPPITSSVTSTNTVTSMTTTTSPPTTTNSFTSLTSMPLSSTPVPSTEVVTSGTINTIPPSILVTTLPTPNASSMTTSETTYPNSPTGPGTNSTTEITYPTTMTETSSTATSLPPTSPLVSTAKTAKTPTTNLVTTTTKTTSHSTTSFTSSTVYSTASTYTTAITSVPTTLGTMVTSTSMISSTVSTGIPTSQPTTITPSSVGISGSLPMMTDLTSVYTVSNMSARPTTVIPSSPTVQNTEISISVSMTSATTPSGGPTFTSTENTPTRSLLTSFPMTHSFSSSMSESSAGTTHTESISSPRGTTSTLHTTVESTPSPTTTTSFTTSTMMEPPSSTVSTTGRGQTTFPSSTATFPETTTLTPTTDISTVSLTTAMTSPPPVSSSITPTNTMTSMRTTTYWPTATNTLSPLTSSILSSTPVPSTEMITSHTTNTTPLSTLVTTLLTTITRSTPTSETTYPTSPTSIVSDSTTEITYSTSITGTLSTATTLPPTSSSLPTTETATMTPTTTLITTTPNTTSLSTPSFTSSTIYSTVSTSTTAISSASPTSGTMVTSTTMTPSSLSTDTPSTTPTTITYPSVGSTGFLTTATDLTSTFTVSSSSAMSTSVIPSSPSIQNTETSSLVSMTSATTPSLRPTITSTDSTLTSSLLTTFPSTYSFSSSMSASSAGTTHTETISSLPASTNTIHTTAESALAPTTTTSFTTSPTMEPPSTTVATTGTGQTTFPSSTATFLETTTLTPTTDFSTESLTTAMTSTPPITSSITPTDTMTSMRTTTSWPTATNTLSPLTSSILSSTPVPSTEVTTSHTTNTNPVSTLVTTLPITITRSTLTSETAYPSSPTSTVTESTTEITYPTTMTETSSTATSLPPTSSLVSTAETAKTPTTNLVTTTTKTTSHSTTSFTSSTIYSTASTPTTAITSVPTTLGTMVTSTSMIPSTVSTGIPTSQPTTITPSSVGISGSLPMMTDLTSVYTVSSMSARPTSVIPSSPTVQNTETSIFVSMMSATTPSGGPTFTSTENTPTRSLLTSFPVTHSFSSSMSASSVGTTHTQSISSPPAITSTLHTTAESTPSPTTTMSFTTFTKMETPSSTVATTGTGQTTFTSSTATSPKTTTLTPTSDISTGSFKTAVSSTPPITSSITSTYTVTSMTTTTPLGPTATNTLPSFTSSVSSSTPVPSTEAITSGTTNTTPLSTLVTTFSNSDTSSTPTSETTYPTSLTSALTDSTTRTTYSTNMTGTLSTVTSLRPTSSSLLTTVTATVPTTNLVTTTTKITSHSTPSFTSSIATTETPSHSTPRFTSSITTTETPSHSTPRFTSSITNTKTTSHSSPSFTSSITTTETTSHNTPSLTSSITTTKTTSHSTPSYTSLITTTTTTSHSTPSFTSSITTTETTSHNTPSLTSSITTTETTSHSTPSFTSSITTETTSHSTPSFTSLITITEITSHSTLSYTTSITTTETPSHSTLSFTSSITTTETTSHSTPSFTSSITTSEMPSHSTPSFTSSITTTENATHSTPNFTSSITTTETTSHSTPSFTSLITTTETTSHRWGTTETTSYSTPSFTSSNTITETTSHSTPSYITSITTTETPSSSTPSFSSSITTTETTSHSTPGFTSSITTTETTSHSTPSFTSSITTTETTSHDTPSFTSSITTSETPSHSTPSSTSLITTTKTTSHSTPSFTSSITTTETTSHSAHSFTSSITTTETTSHNTRSFTSSITTTETNSHSTTSFTSSITTTETTSHSTPSFSSSITTTETPLHSTPGLTSWVTTTKTTSHITPGLTSSITTTETTSHSTPGFTSSITTTETTSESTPSLSSSTIYSTVSTSTTAITSHFTTSETAVTPTPVTPSSLSTDIPTTSLRTLTPSSVGTSTSLTTTTDFPSIPTDISTLPTRTHIISSSPSIQSTETSSLVGTTSPTMSTVRMTLRITENTPISSFSTSIVVIPETPTQTPPVLTSATGTQTSPAPTTVTFGSTDSSTSTLHTLTPSTALSTIVSTSQVPIPSTHSSTLQTTPSTPSLQTSLTSTSEFTTESFTRGSTSTNAILTSFSTIIWSSTPTIIMSSSPSSASITPVFSTTIHSVPSSPYIFSTENVGSASITGFPSLSSSATTSTSSTSSSLTTALTEITPFSYISLPSTTPCPGTITITIVPASPTDPCVEMDPSTEATSPPTTPLTVFPFTTEMVTCPTSISIQTTLTTYMDTSSMMPESESSISPNASSSTGTGTVPTNTVFTSTRLPTSETWLSNSSVIPLPLPGVSTIPLTMKPSSSLPTILRTSSKSTHPSPPTTRTSETPVATTQTPTTLTSRRTTRITSQMTTQSTLTTTAGTCDNGGTWEQGQCACLPGFSGDRCQLQTRCQNGGQWDGLKCQCPSTFYGSSCEFAVEQVDLDVVETEVGMEVSVDQQFSPDLNDNTSQAYRDFNKTFWNQMQKIFADMQGFTFKGVEILSLRNGSIVVDYLVLLEMPFSPQLESEYEQVKTTLKEGLQNASQDVNSCQDSQTLCFKPDSIKVNNNSKTELTPAAICRRAAPTGYEEFYFPLVEATRLRCVTKCTSGVDNAIDCHQGQCVLETSGPTCRCYSTDTHWFSGPRCEVAVHWRALVGGLTAGAALLVLLLLALGVRAVRSGWWGGQRRGRSWDQDRKWFETWDEEVVGTFSNWGFEDDGTDKDTNFYVALENVDTTMKVHIKRPEMTSSSV

SEQ ID NO: 10469 - protein, 528 aa, Homo sapiens
MDAQQTKTNEARLWGDHGQEALESAHVCLINATATGTEILKNLVLPGIGSFTIIDGNQVSGEDAGNNFFLQRSSIGKNRAEAAMEFLQELNSDVSGSFVEESPENLLDNDPSFFCRFTVVVATQLPESTSLRLADVLWNSQIPLLICRTYGLVGYMRIIIKEHPVIESHPDNALEDLRLDKPFPELREHFQSYDLDHMEKKDHSHTPWIVIIAKYLAQWYSETNGRIPKTYKEKEDFRDLIRQGILKNENGAPEDEENFEEAIKNVNTALNTTQIPSSIEDIFNDDRCINITKQTPSFWILARALKEFVAKEGQGNLPVRGTIPDMIADSGKYIKLQNVYREKAKKDAAAVGNHVAKLLQSIGQAPESISEKELKLLCSNSAFLRVVRCRSLAEEYGLDTINKDEIISSMDNPDNEIVLYLMLRAVDRFHKQQGRYPGVSNYQVEEDIGKLKSCLTGFLQEYGLSVMVKDDYVHEFCRYGAAEPHTIAAFLGGAAAQEVIKIITKQFVIFNNTYIYSGMSQTSATFQL

SEQ ID NO: 10470 - protein, 1008 aa, Homo sapiens
MGPAPAGEQLRGATGEPEVMEPALEGTGKEGKKASSRKRTLAEPPAKGLLQPVKLSRAELYKEPTNEELNRLRETEILFHSSLLRLQVEELLKEVRLSEKKKDRIDAFLREVNQRVVRVPSVPETELTDQAWLPAGVRVPLHQVPYAVKGCFRFLPPAQVTVVGSYLLGTCIRPDINVDVALTMPREILQDKDGLNQRYFRKRALYLAHLAHHLAQDPLFGSVCFSYTNGCHLKPSLLLRPRGKDERLVTVRLHPCPPPDFFRPCRLLPTKNNVRSAWYRGQSPAGDGSPEPPTPRYNTWVLQDTVLESHLQLLSTILSSAQGLKDGVALLKVWLRQRELDKGQGGFTGFLVSMLVVFLVSTRKIHTTMSGYQVLRSVLQFLATTDLTVNGISLCLSSDPSLPALADFHQAFSVVFLDSSGHLNLCADVTASTYHQVQHEARLSMMLLDSRADDGFHLLLMTPKPMIRAFDHVLHLRPLSRLQAACHRLKLWPELQDNGGDYVSAALGPLTTLLEQGLGARLNLLAHSRPPVPEWDISQDPPKHKDSGTLTLGLLLRPEGLTSVLELGPEADQPEAAKFRQFWGSRSELRRFQDGAIREAVVWEAASMSQKRLIPHQVVTHLLALHADIPETCVHYVGGPLDALIQGLKETSSTGEEALVAAVRCYDDLSRLLWGLEGLPLTVSAVQGAHPVLRYTEVFPPTPVRPAFSFYETLRERSSLLPRLDKPCPAYVEPMTVVCHLEGSGQWPQDAEAVQRVRAAFQLRLAELLTQQHGLQCRATATHTDVLKDGFVFRIRVAYQREPQILKEVQSPEGMISLRDTAASLRLERDTRQLPLLTSALHGLQQQHPAFSGVARLAKRWVRAQLLGEGFADESLDLVAAALFLHPEPFTPPSSPQVGFLRFLFLVSTFDWKNNPLFVNLNNELTVEEQVEIRSGFLAARAQLPVMVIVTPQDRKNSVWTQDGPSAQILQQLVVLAAEALPMLEKQLMDPRGPGDIRMGPSENVALL

SEQ ID NO: 10471 - protein, 511 aa, Homo sapiens
MGQGDESERIVINVGGTRHQTYRSTLRTLPGTRLAWLAEPDAHSHFDYDPRADEFFFDRHPGVFAHILNYYRTGKLHCPADVCGPLYEEELAFWGIDETDVEPCCWMTYRQHRDAEEALDSFGGAPLDNSADDADADGPGDSGDGEDELEMTKRLALSDSPDGRPGGFWRRWQPRIWALFEDPYSSRYARYVAFASLFFILVSITTFCLETHERFNPIVNKTEIENVRNGTQVRYYREAETEAFLTYIEGVCVVWFTFEFLMRVIFCPNKVEFIKNSLNIIDFVAILPFYLEVGLSGLSSKAAKDVLGFLRVVRFVRILRIFKLTRHFVGLRVLGHTLRASTNEFLLLIIFLALGVLIFATMIYYAERIGAQPNDPSASEHTHFKNIPIGFWWAVVTMTTLGYGDMYPQTWSGMLVGALCALAGVLTIAMPVPVIVNNFGMYYSLAMAKQKLPKKKKKHIPRPPQLGSPNYCKSVVNSPHHSTQSDTCPLAQEEILEINRAGRKPLRGMSI

SEQ ID NO: 10472 - protein, 445 aa, Homo sapiens
MNRHLCVWLFRHPSLNGYLQCHIQLHSHQFRQIHLDTRLQVFRQNRNCILHLLSKNWSRRYCHQDTKMLWKHKALQKYMENLSKEYQTLEQCLQHIPVNEENRRSLNRRHAELAPLAAIYQEIQETEQAIEELESMCKSLNKQDEKQLQELALEERQTIDQKINMLYNELFQSLVPKEKYDKNDVILEVTAGRTTGGDICQQFTREIFDMYQNYSCYKHWQFELLNYTPADYGGLHHAAARISGDGVYKHLKYEGGIHRVQRIPEVGLSSRMQRIHTGTMSVIVLPQPDEVDVKLDPKDLRIDTFRAKGAGGQHVNKTDSAVRLVHIPTGLVVECQQERSQIKNKEIAFRVLRARLYQQIIEKDKRQQQSARKLQVGTRAQSERIRTYNFTQDRVSDHRIAYEVRDIKEFLCGGKGLDQLIQRLLQSADEEAIAELLDEHLKSAK

SEQ ID NO: 10473 - protein, 674 aa, Homo sapiens
MQSREDAPRSRRLASPRGGKRPKKIHKPTVSAFFTGPEELKDTAHSAALLAQLKSFYDARLLCDVTIEVVTPGSGPGTGRLFPCNRNVLAAACPYFKSMFTGGMYESQQASVTMHDVDAESFEVLVDYCYTGRVSLSEANVERLYAASDMLQLEYVREACASFLARRLDLTNCTAILKFADAFGHRKLRSQAQSYIAQNFKQLSHMGSIREETLADLTLAQLLAVLRLDSLDVESEQTVCHVAVQWLEAAPKERGPSAAEVFKCVRWMHFTEEDQDYLEGLLTKPIVKKYCLDVIEGALQMRYGDLLYKSLVPVPNSSSSSSSSNSLVSAAENPPQRLGMCAKEMVIFFGHPRDPFLCCDPYSGDLYKVPSPLTCLAHTRTVTTLAVCISPDHDIYLAAQPRTDLWVYKPAQNSWQQLADRLLCREGMDVAYLNGYIYILGGRDPITGVKLKEVECYNVKRNQWALVAPLPHSFLSFDLMVIRDYLYALNSKRMFCYDPSHNMWLKCVSLKRNDFQEACVFNEEIYCICDIPVMKVYNPVRAEWRQMNNIPLVSETNNYRIIKHGQKLLLITSRTPQWKKNRVTVYEYDIRGDQWINIGTTLGLLQFDSNFFCLSARVYPSCLEPGQSFLTEEEEIPSESSTEWDLGGFSEPDSESGSSSSLSDDDFWVRVAPQ

SEQ ID NO: 10474 - protein, 376 aa, Homo sapiens
MADYWKSQPKKFCDYCKCWIADNRPSVEFHERGKNHKENVAKRISEIKQKSLDKAKEEEKASKEFAAMEAAALKAYQEDLKRLGLESEILEPSITPVTSTIPPTSTSNQQKEKKEKKKRKKDPSKGRWVEGITSEGYHYYYDLISGASQWEKPEGFQGDLKKTAVKTVWVEGLSEDGFTYYYNTETGESRWEKPDDFIPHTSDLPSSKVNENSLGTLDESKSSDSHSDSDGEQEAEEGGVSTETEKPKIKFKEKNKNSDGGSDPETQKEKSIQKQNSLGSNEEKSKTLKKSNPYGEWQEIKQEVESHEEVDLELPSTENEYVSTSEADGGGEPKVVFKEKTVTSLGVMADGVAPVFKKRRTENGKSRNLRQRGDDQ

SEQ ID NO: 10475 - protein, 644 aa, Homo sapiens
MSYFLSYCKAHGGALLTGYQALRAEGFLCDVTLETEGSEFPAHRSLLACSSDYFRALFKSHTQESRARVIHLHVPSAAGLQRLLDFIYTAWLSLSMDTVEDTLEAASYLQVTEALGLCGRYLERQLAPENCCFAANVAARFGLAHTLDAAERCIVSHLQELLARGAGPAGLLELNPTSLRAVLGAPDVARVPEARLLGLALAWLRQEPTTERLAHCTELLERVRFGLVPADVLRRVYSGSGLVLPARVKGLIIQALNYHTTPSRQPLMQGEQTSIRSPQTRILLVGGRRAREVVIEEVAAPQRAARGQVAAPEPEEEEEELEEEEEEEEWELTQNVVAFDVYNHRWRSLTQLPTPLLGHSVCTAGNFLFVLGGESPSGSASSPLADDSRVVTAQVHRYDPRFHAWTEVPAMREARAHFWCGAVGERLLAVGGLGAGGEVLASVEMYDLRRDRWTAAGALPRALHGHAGAVGDRGVVYISGGKAGRGEGGASSLRDLYVLGPEEQVWSKKAPMGTARFGHHMAVLRGAVFAFLGRYEPFSEIERYDPGADQWTRLRPLPYDRFCYGLAVVEETALLLGGLKWRDSRQVPTRNVVGYDLDLDRWEDIGCALPWAWSGLRCAVLQLAEGGDDEREGEVGEALDLVLG

SEQ ID NO: 10476 - protein, 376 aa, Homo sapiens
MVSWKGIYFILTLFWGSFFGSIFMLSPFLPLMFVNPSWYRWINNRLVATWLTLPVALLETMFGVKVIITGDAFVPGERSVIIMNHRTRMDWMFLWNCLMRYSYLRLEKICLKASLKGVPGFGWAMQAAAYIFIHRKWKDDKSHFEDMIDYFCDIHEPLQLLIFPEGTDLTENSKSRSNAFAEKNGLQKYEYVLHPRTTGFTFVVDRLREGKNLDAVHDITVAYPHNIPQSEKHLLQGDFPREIHFHVHRYPIDTLPTSKEDLQLWCHKRWEEKEERLRSFYQGEKNFYFTGQSVIPPCKSELRVLVVKLLSILYWTLFSPAMCLLIYLYSLVKWYFIITIVIFVLQERIFGGLEIIELACYRLLHKQPHLNSKKNE

SEQ ID NO: 10477 - protein, 1034 aa, Homo sapiens
MALIMEPVSKWSPSQVVDWMKGLDDCLQQYIKNFEREKISGDQLLRITHQELEDLGVSRIGHQELILEAVDLLCALNYGLETENLKTLSHKLNASAKNLQNFITGRRRSGHYDGRTSRKLPNDFLTSVVDLIGAAKSLLAWLDRSPFAAVTDYSVTRNNVIQLCLELTTIVQQDCTVYETENKILHVCKTLSGVCDHIISLSSDPLVSQSAHLEVIQLANIKPSEGLGMYIKSTYDGLHVITGTTENSPADRCKKIHAGDEVIQVNHQTVVGWQLKNLVNALREDPSGVILTLKKRPQSMLTSAPALLKNMRWKPLALQPLIPRSPTSSVATPSSTISTPTKRDSSALQDLYIPPPPAEPYIPRDEKGNLPCEDLRGHMVGKPVHKGSESPNSFLDQEYRKRFNIVEEDTVLYCYEYEKGRSSSQGRRESTPTYGKLRPISMPVEYNWVGDYEDPNKMKRDSRRENSLLRYMSNEKIAQEEYMFQRNSKKDTGKKSKKKGDKSNSPTHYSLLPSLQMDALRQDIMGTPVPETTLYHTFQQSSLQHKSKKKNKGPIAGKSKRRISCKDLGRGDCEGWLWKKKDAKSYFSQKWKKYWFVLKDASLYWYINEEDEKAEGFISLPEFKIDRASECRKKYAFKACHPKIKSFYFAAEHLDDMNRWLNRINMLTAGYAERERIKQEQDYWSESDKEEADTPSTPKQDSPPPPYDTYPRPPSMSCASPYVEAKHSRLSSTETSQSQSSHEEFRQEVTGSSAVSPIRKTASQRRSWQDLIETPLTSSGLHYLQTLPLEDSVFSDSAAISPEHRRQSTLPTQKCHLQDHYGPYPLAESERMQVLNGNGGKPRSFTLPRDSGFNHCCLNAPVSACDPQDDVQPPEVEEEEEEEEEEGEAAGENIGEKSESREEKLGDSLQDLYRALEQASLSPLGEHRISTKMEYKLSFIKRCNDPVMNEKLHRLRILKSTLKAREGEVAIIDKVLDNPDLTSKEFQQWKQMYLDLFLDICQNTTSNDPLSISSEVDVITSSLAHTHSYIETHV

SEQ ID NO: 10478 - protein, 519 aa, Homo sapiens
MAAEREPPPLGDGKPTDFEDLEDGEDLFTSTVSTLESSPSSPEPASLPAEDISANSNGPKPTEVVLDDDREDLFAEATEEVSLDSPEREPILSSEPSPAVTPVTPTTLIAPRIESKSMSAPVIFDRSREEIEEEANGDIFDIEIGVSDPEKVGDGMNAYMAYRVTTKTSLSMFSKSEFSVKRRFSDFLGLHSKLASKYLHVGYIVPPAPEKSIVGMTKVKVGKEDSSSTEFVEKRRAALERYLQRTVKHPTLLQDPDLRQFLESSELPRAVNTQALSGAGILRMVNKAADAVNKMTIKMNESDAWFEEKQQQFENLDQQLRKLHVSVEALVCHRKELSANTAAFAKSAAMLGNSEDHTALSRALSQLAEVEEKIDQLHQEQAFADFYMFSELLSDYIRLIAAVKGVFDHRMKCWQKWEDAQITLLKKREAEAKMMVANKPDKIQQAKNEIREWEAKVQQGERDFEQISKTIRKEVGRFEKERVKDFKTVIIKYLESLVQTQQQLIKYWEAFLPEAKAIA

SEQ ID NO: 10479 - protein, 603 aa, Homo sapiens
MTYLIQSHHSRRSQNCAEDVIRKTKTDQNGQLECVRWMVSETEAIAELSCSKDFPSLIHYAGCYGQEKILLWLLQFMQEQGISLDEVDQDGNSAVHVASQHGYLGCIQTLVEYGANVTMQNHAGEKPSQSAERQGHTLCSRYLVVVETCMSLASQVVKLTKQLKEQTVERVTLQNQLQQFLEAQKSEGKSLPSSPSSPSSPASRKSQWKSPDADDDSVAKSKPGVQEGIQVLGSLSASSRARPKAKDEDSDKILRQLLGKEISENVCTQEKLSLEFQDAQASSRNSKKIPLEKRELKLARLRQLMQRSLSESDTDSNNSEDPKTTPVRKADRPRPQPIVESVESMDSAESLHLMIKKHTLASGGRRFPFSIKASKSLDGHSPSPTSESSEPDLESQYPGSGSIPPNQPSGDPQQPSPDSTAAQKVATSPKSALKSPSSKRRTSQNLKLRVTFEEPVVQMEQPSLELNGEKDKDKGRTLQRTSTSNESGDQLKRPFGAFRSIMETLSGNQNNNNNYQAANQLKTSTLPLTSLGRKTDAKGNPASSASKGKNKAEMYSSCINLSSNMLIEEHLCNDTRHNDINRKMKKSYSIKHIAEPESKELFL

SEQ ID NO: 10480 - protein, 1120 aa, Homo sapiens
MAEAPPVSGTFKFNTDAAEFIPQEKKNSGLNCGTQRRLDSNRIGRRNYSSPPPCHLSRQVPYDEISAVHQHSYHPSGSKPKSQQTSFQSSPCNKSPKSHGLQNQPWQKLRNEKHHIRVKKAQSLAEQTSDTAGLESSTRSESGTDLREHSPSESEKEVVGADPRGAKPKKATQFVYSYGRGPKVKGKLKCEWSNRTTPKPEDAGPESTKPVGVFHPDSSEASSRKGVLDGYGARRNEQRRYPQKRPPWEVEGARPRPGRNPPKQEGHRHTNAGHRNNMGPIPKDDLNERPAKSTCDSENLAVINKSSRRVDQEKCTVRRQDPQVVSPFSRGKQNHVLKNVETHTGSLIEQLTTEKYECMVCCELVRVTAPVWSCQSCYHVFHLNCIKKWARSPASQADGQSGWRCPACQNVSAHVPNTYTCFCGKVKNPEWSRNEIPHSCGEVCRKKQPGQDCPHSCNLLCHPGPCPPCPAFMTKTCECGRTRHTVRCGQAVSVHCSNPCENILNCGQHQCAELCHGGQCQPCQIILNQVCYCGSTSRDVLCGTDVGKSDGFGDFSCLKICGKDLKCGNHTCSQVCHPQPCQQCPRLPQLVRCCPCGQTPLSQLLELGSSSRKTCMDPVPSCGKVCGKPLPCGSLDFIHTCEKLCHEGDCGPCSRTSVISCRCSFRTKELPCTSLKSEDATFMCDKRCNKKRLCGRHKCNEICCVDKEHKCPLICGRKLRCGLHRCEEPCHRGNCQTCWQASFDELTCHCGASVIYPPVPCGTRPPECTQTCARVHECDHPVYHSCHSEEKCPPCTFLTQKWCMGKHEFRSNIPCHLVDISCGLPCSATLPCGMHKCQRLCHKGECLVDEPCKQPCTTPRADCGHPCMAPCHTSSPCPVTACKAKVELQCECGRRKEMVICSEASSTYQRIAAISMASKITDMQLGGSVEISKLITKKEVHQARLECDEECSALERKKRLAEAFHISEDSDPFNIRSSGSKFSDSLKEDARKDLKFVSDVEKEMETLVEAVNKGKNSKKSHSFPPMNRDHRRIIHDLAQVYGLESVSYDSEPKRNVVVTAIRGKSVCPPTTLTGVLEREMQARPPPPIPHHRHQSDKNPGSSNLQKITKEPIIDYFDVQD

SEQ ID NO: 10481 - protein, 281 aa, Homo sapiens
MAQSGLTATSASQVQAILLPQPASVRHYAWVVDQIDTLTSDLQLEDEMTDSSKTDTLNSSSSGTTASSLEKIKVQANAPLIKPPAHPSAILTVLRKPNPPPPPPRLTPVKCEDPKRVVPTANPVKTNGTLLRNGGLPGGPNKIPNGDICCIPNSNLDKAPVQLLMHRPEKDRCPQAGPRERVRFNEKVQYHGYCPDCDTRYNIKNREVHLHSEPVHPPGKIPHQGPPLPPTPHLPPFPLENGGMGISHSNSFPPIRPATVPPPTAPKPQKTILRKSTTTTV

SEQ ID NO: 10482 - protein, 579 aa, Homo sapiens
MRRPPGNGEAASEGPGGWGLWGVQESRRLCCAGHDRCKQALLQIGINMMALPGGRHLDSVTLPGQRLHLMQVDSVQRWMEDLKLMTECECMCVLQAKPISLEEDAQGDLILAGGPGPGDPLQLLLKRGWVISTELRRIGQKLAQDRWARVHSMSVRLTCHARSMVSEYSAVSRNSLKEMGEIEKLLMEKCSELSAVTERCLQVENEHVLKSMKACVSETLSMLGQHFGQLLELALTREVQALVRKIDASDNIYTTESTTGNLFSLTQEGAPLCRIIAKEGGVVALFKVCRQDSFRCLYPQALRTLASICCVEEGVHQLEKVDGVLCLADILTDNSHSEATRAEAAAVVAQVTSPHLPVTQHLSSFLESMEEIVTALVKLCQEASSGEVFLLASAALANITFFDTMACEMLLQLNAIRVLLEACSDKQRVDTPYTRDQIVTILANMSVLEQCASDIIQENGVQLIMGMLSEKPRSGTPAEVAACERVQQKAAVTLARLSRDPDVAREAVRLSCMSRLIELCRSPSERNSSDAVLVACLAALRRLAGVCPEGLQDSDFQQLVQPRLVDSFLLCSNMEESFV

SEQ ID NO: 10483 - protein, 532 aa, Homo sapiens
MMALPGGRHLDSVTLPGQRLHLMQVDSVQRWMEDLKLMTECECMCVLQAKPISLEEDAQGDLILAGGPGPGDPLQLLLKRGWVISTELRRIGQKLAQDRWARVHSMSVRLTCHARSMVSEYSAVSRNSLKEMGEIEKLLMEKCSELSAVTERCLQVENEHVLKSMKACVSETLSMLGQHFGQLLELALTREVQALVRKIDASDNIYTTESTTGNLFSLTQEGAPLCRIIAKEGGVVALFKVCRQDSFRCLYPQALRTLASICCVEEGVHQLEKVDGVLCLADILTDNSHSEATRAEAAAVVAQVTSPHLPVTQHLSSFLESMEEIVTALVKLCQEASSGEVFLLASAALANITFFDTMACEMLLQLNAIRVLLEACSDKQRVDTPYTRDQIVTILANMSVLEQCASDIIQENGVQLIMGMLSEKPRSGTPAEVAACERVQQKAAVTLARLSRDPDVAREAVRLSCMSRLIELCRSPSERNSSDAVLVACLAALRRLAGVCPEGLQDSDFQQLVQPRLVDSFLLCSNMEESFV

SEQ ID NO: 10484 - protein, 1019 aa, Homo sapiens
MGTRDDVPEAKVLVPVAVYCGSIPRTSAGPRVLPPGSINSSLPHGEGSLQPEPRALLNNEEPSQLLRGLGQLGGLKLDTPSKGWQARNGHPRNLRALSLGDQPLVLLPSPESEANSVARDTIQIKDKLKKRRLSEGLAASSRASLDPGGGPQGVPLHSTIPRATSQRLLRVPRPMPLIQSIPTTPEASGVKEKGLDLPGSIPGPHELRPGAQEAQISWQYLHCNDEKMQKSLGAIVIPPIPKARTVAATPSRVPGSLPSPLPPGQGVLTGLRAPRTRLARGSGPREKTPASLEPKPLASPIRDRPAAAKKPALPFSQSAPTLTAFSFDCAREACPPLKEEDQKEIGTKIQVTISKSAREKMQLKQMKEMELLRRLEEPRTGQELTSQCLGSQRAFMKEGLLPLRGSGTLSVPTRLSGPCRNDVSIILRKWASRASLPSIPISRQEPRFARHASANSLPAVLTLGSPEWEEEEEMDLRACKELRPFSNPELGLRDALQCLNSSDWQMKEKGLVSIQRLAACHSEVLTGKLHDVCLVVTGEVTNLRSKVSHLAISTLGDLFQALKKNMDQEAEEIARCLLQKMADTNEFIQRAAGQSLRAMVENVTLARSLVVLTSAGVYHRNPLIRKYAAEHLSAVLEQIGAEKLLSGTRDSTDMLVHNLVRLAQDSNQDTRFYGRKMVNILMANTKFDAFLKQSLPSYDLQKVMAAIKQQGIEDNDELPSAKGRKVLRSLVVCENGLPIKEGLSCNGPRLVGLRSTLQGRGEMVEQLRELTRLLEAKDFRSRMEGVGQLLELCKAKTELVTAHLVQVFDAFTPRLQDSNKKVNQWALESFAKMIPLLRESLHPMLLSIIITVADNLNSKNSGIYAAAVAVLDAMVESLDNLCLLPALAGRVRFLSGRAVLDVTDRLAVLVASVYPRKPQAVERHVLPILWHFLNTATRNGTLPGPSGNIRGVVCRLSRSLQEHMGSRLLDFAASQPKHVLKTLQELLDSESLGGSRKATDRGVAPDSKTTGSSYPFQLD

SEQ ID NO: 10485 - protein, 655 aa, Homo sapiens
MAEAPQVVEIDPDFEPLPRPRSCTWPLPRPEFSQSNSATSSPAPSGSAAANPDAAAGLPSASAAAVSADFMSNLSLLEESEDFPQAPGSVAAAVAAAAAAAATGGLCGDFQGPEAGCLHPAPPQPPPPGPLSQHPPVPPAAAGPLAGQPRKSSSSRRNAWGNLSYADLITKAIESSAEKRLTLSQIYEWMVKSVPYFKDKGDSNSSAGWKNSIRHNLSLHSKFIRVQNEGTGKSSWWMLNPEGGKSGKSPRRRAASMDNNSKFAKSRSRAAKKKASLQSGQEGAGDSPGSQFSKWPASPGSHSNDDFDNWSTFRPRTSSNASTISGRLSPIMTEQDDLGEGDVHSMVYPPSAAKMASTLPSLSEISNPENMENLLDNLNLLSSPTSLTVSTQSSPGTMMQQTPCYSFAPPNTSLNSPSPNYQKYTYGQSSMSPLPQMPIQTLQDNKSSYGGMSQYNCAPGLLKELLTSDSPPHNDIMTPVDPGVAQPNSRVLGQNVMMGPNSVMSTYGSQASHNKMMNPSSHTHPGHAQQTSAVNGRPLPHTVSTMPHTSGMNRLTQVKTPVQVPLPHPMQMSALGGYSSVSSCNGYGRMGLLHQEKLPSDLDGMFIERLDCDMESIIRNDLMDGDTLDFNFDNVLPNQSFPHSVKTTTHSWVSG

SEQ ID NO: 10486 - protein, 740 aa, Homo sapiens
MPLAQLADPWQKMAVESPSDSAENGQQIMDEPMGEEEINPQTEEVSIKEIAITHHVKEGHEKADPSQFELLKVLGQGSFGKVFLVKKISGSDARQLYAMKVLKKATLKVRDRVRTKMERDILVEVNHPFIVKLHYAFQTEGKLYLILDFLRGGDLFTRLSKEVMFTEEDVKFYLAELALALDHLHSLGIIYRDLKPENILLDEEGHIKLTDFGLSKESIDHEKKAYSFCGTVEYMAPEVVNRRGHTQSADWWSFGVLMFEMLTGTLPFQGKDRKETMTMILKAKLGMPQFLSPEAQSLLRMLFKRNPANRLGAGPDGVEEIKRHSFFSTIDWNKLYRREIHPPFKPATGRPEDTFYFDPEFTAKTPKDSPGIPPSANAHQLFRGFSFVAITSDDESQAMQTVGVHSIVQQLHRNSIQFTDGYEVKEDIGVGSYSVCKRCIHKATNMEFAVKIIDKSKRDPTEEIEILLRYGQHPNIITLKDVYDDGKYVYVVTELMKGGELLDKILRQKFFSEREASAVLFTITKTVEYLHAQGVVHRDLKPSNILYVDESGNPESIRICDFGFAKQLRAENGLLMTPCYTANFVAPEVLKRQGYDAACDIWSLGVLLYTMLTGYTPFANGPDDTPEEILARIGSGKFSLSGGYWNSVSDTAKDLVSKMLHVDPHQRLTAALVLRHPWIVHWDQLPQYQLNRQDAPHLVKGAMAATYSALNRNQSPVLEPVGRSTLAQRRGIKKITSTAL

SEQ ID NO: 10487 - protein, 935 aa, Homo sapiens
MKRLTCFFICFFLSEVSGFEIPINGLSEFVDYEDLVELAPGKFQLVAENRRYQEEVDQVTLYSYKVQSTITSRMATTMIQSKVVNNSPQPQNVVFDVQIPKGAFISNFSMTVDGKTFRSSIKEKTVGRALYAQARAKGKTAGLVRSSALDMENFRTEVNVLPGAKVQFELHYQEVKWRKLGSYEHRIYLQPGRLAKHLEVDVWVIEPQGLRFLHVPDTFEGHFDGVPVISKGQQKAHVSFKPTVAQQRICPNCRETAVDGELVVLYDVKREEKAGELEVFNGYFVHFFAPDNLDPIPKNILFVIDVSGSMWGVKMKQTVEAMKTILDDLRAEDHFSVIDFNQNIRTWRNDLISATKTQVADAKRYIEKIQPSGGTNINEALLRAIFILNEANNLGLLDPNSVSLIILVSDGDPTVGELKLSKIQKNVKENIQDNISLFSLGMGFDVDYDFLKRLSNENHGIAQRIYGNQDTSSQLKKFYNQVSTPLLRNVQFNYPHTSVTDVTQNNFHNYFGGSEIVVAGKFDPAKLDQIESVITATSANTQLVLETLAQMDDLQDFLSKDKHADPDFTRKLWAYLTINQLLAERSLAPTAAAKRRITRSILQMSLDHHIVTPLTSLVIENEAGDERMLADAPPQDPSCCSGALYYGSKVVPDSTPSWANPSPTPVISMLAQGSQVLESTPPPHVMRVENDPHFIIYLPKSQKNICFNIDSEPGKILNLVSDPESGIVVNGQLVGAKKPNNGKLSTYFGKLGFYFQSEDIKIEISTETITLSHGSSTFSLSWSDTAQVTNQRVQISVKKEKVVTITLDKEMSFSVLLHRVWKKHPVNVDFLGIYIPPTNKFSPKAHGLIGQFMQEPKIHIFNERPGKDPEKPEASMEVKGQKLIITRGLQKDYRTDLVFGTDVTCWFVHNSGKGFIDGHYKDYFVPQLYSFLKRP

SEQ ID NO: 10488 - protein, 402 aa, Homo sapiens
MMGSWKHCLFSASLISALIFVFVYNTELWENKRFLRAALSNASLLAEACHQIFEGKVFYPTENALKTTLDEATCYEYMVRSHYVTETLSEEEAGFPLAYTVTIHKDFGTFERLFRAIYMPQNVYCVHLDQKATDAFKGAVKQLLSCFPNAFLASKKESVVYGGISRLQADLNCLEDLVASEVPWKYVINTCGQDFPLKTNREIVQYLKGFKGKNITPGVLPPDHAVGRTKYVHQELLNHKNSYVIKTTKLKTPPPHDMVIYFGTAYVALTRDFANFVLQDQLALDLLSWSKDTYSPDEHFWVTLNRIPGVPGSMPNASWTGNLRAIKWSDMEDRHGGCHGHYVHGICIYGNGDLKWLVNSPSLFANKFELNTYPLTVECLELRHRERTLNQSETAIQPSWYF

SEQ ID NO: 10489 - protein, 280 aa, Homo sapiens
MARFWVCVAGAGFFLAFLVLHSRFCGSPVLRNFTFAVSWRTEKILYRLDVGWPKHPEYFTGTTFCVAVDSLNGLVYIGQRGDNIPKILVFTEDGYFLRAWNYTVDTPHGIFAASTLYEQSVWITDVGSDFMILWLHGENGTGPAKFNIPHSVTLDSAGRVWVADRGNKRIQVFDKDTGEWLGAWNNCFTEEGPSSVRFTPDGKYLIVAQLNLSRLSVVAAPPVGSIGECSVISTIQLADQVLPHLLEVDRKTGAVYVAEIGAKQVQKYVPLNSYVPSFGS

SEQ ID NO: 10490 - protein, 347 aa, Homo sapiens
MARFWVCVAGAGFFLAFLVLHSRFCGSPVLRNFTFAVSWRTEKILYRLDVGWPKHPEYFTGTTFCVAVDSLNGLVYIGQRGDNIPKILVFTEDGYFLRAWNYTVDTPHGIFAASTLYEQSVWITDVGSGFFGHTVKKYSSFGDLVQVLGTPGKKGTSLNPLQFDNPAELYVEDTGDIYIVDGDGGLNNRLIKLSQDFMILWLHGENGTGPAKFNIPHSVTLDSAGRVWVADRGNKRIQVFDKDTGEWLGAWNNCFTEEGPSSVRFTPDGKYLIVAQLNLSRLSVVAAPPVGSIGECSVISTIQLADQVLPHLLEVDRKTGAVYVAEIGAKQVQKYVPLNSYVPSFGS

SEQ ID NO: 10491 - protein, 318 aa, Homo sapiens
MVQGWRIKSKFRVDMPGSGSAFIPTINAITTSQDLQWMVQPTVITSMSNPYPRSHPYSPLPGLASVPGHMALPRPGVIKTIGTTVGRRRRDEQLSPEEEEKRRIRRERNKLAAAKCRNRRRELTEKLQAIGPWQVAVPHIPLFPWQETEELEEEKSGLQKEIAELQKEKEKLEFMLVAHGPVCKISPEERRSPPAPGLQPMRSGGGSVGAVVVKQEPLEEDSPSSSSAGLDKAQRSVIKPISIAGGFYGEEPLHTPIVVTSTPAVTPGTSNLVFTYPSVLEQESPASPSESCSKAHRRSSSSGDQSSDSLNSPTLLAL

SEQ ID NO: 10492 - protein, 284 aa, Homo sapiens
MSPEVALNRISPMLSPFISSVVRNGKVGLDATNCLRITDLKSGCTSLTPGPNCDRFKLHIPYAGETLKWDIIFNAQYPELPPDFIFGEDAEFLPDPSALQNLASWNPSNPECLLLVVKELVQQYHQFQCSRLRESSRLMFEYQTLLEEPQYGENMEIYAGKKNNWTGEFSARFLLKLPVDFSNIPTYLLKDVNEDPGEDVALLSVSFEDTEATQVYPKLYLSPRIEQLSLSPCHTDFLLTRFLPAPLWGSEVSVPSGPFHLLIILPQPLSGLVRPCLLFSQPCS

SEQ ID NO: 10493 - protein, 291 aa, Homo sapiens
MDSRVSSPEKQDKENFVGVNNKRLGVCGWILFSLSFLLVIITFPISIWMCLKIIKEYERAVVFRLGRIQADKAKGPGLILVLPCIDVFVKVDLRTVTCNIPPQEILTRDSVTTQVDGVVYYRIYSAVSAVANVNDVHQATFLLAQTTLRNVLGTQTLSQILAGREEIAHSIQTLLDDATELWGIRVARVEIKDVRIPVQLQRSMAAEAEATREARAKVLAAEGEMNASKSLKSASMVLAESPIALQLRYLQTLSTVATEKNSTIVFPLPMNILEGIGGVSYDNHKKLPNKA

SEQ ID NO: 10494 - protein, 773 aa, Homo sapiens
MERGGGGSGTGSRPEGTARGTSLPGKIAEPGAVRTSQPNYRPQGMEGFLKSDERQRLAKERREEREKCLAAREQQILEKQKRARLQYEKQMEERWRKLEEQRQREDQKRAAVEEKRKQKLREEEERLEAMMRRSLERTQQLELKKKYSWGAPLAIGPGGHDACDKLSTSTMSLPKPTEPPMNKRLSSSTVAISYSPDRAHHMHLSPMEAILVSRLLTPTQSSLARSRASVMLSGQANDSVFHVCPRLAPLGPLNPSYKSSPTRNIEKKKATSTSTSGAGDVGKEALSGGEASLVEKVKRGQRTATSLPVVNFGSPLRRCEFSGGIPKRPSSPVISKTATKAYPQSPKTTKPPYPGSPVKYRLPALSGQDMPKRKAEKEKSNKEREGTLAQQAAGPQGEEALEKHVVDKHASEKHAAAAGGKAENSAALGKPTAGTTDAGEAAKILAEKRRQARLQKEQEEQERLEKEEQDRLEREELKRKAEEERLRLEEEARKQEEERKRQEEEKKKQEGEEKRKAGEEAKRKAEEELLLKEKQEQEKQEKAMIEKQKEAAETKAREVAEQMRLEREQIMLQIEQERLERKKRIDEIMKRTRKSDVSPQVKKEDPKVGVQPAVCVEKKTKLVVPNKMEINGLNTCQEVNGVDHAAPETYPQDIFSNGLKPAGGLIHLDALDGKSNSLDDSTEEVQSMDVSPVSKEELISIPEFSPVSEMIPGVSLDQNGTGNARALQDLLDFTGPPTFPKRSSENLSLDDCNKNLIEGFNSPGQETPLNTFC

SEQ ID NO: 10495 - protein, 635 aa, Homo sapiens
MSGAGRALAALLLAASVLSAALLAPGGSSGRDAQAAPPRDLDKKRHAELKMDQALLLIHNELLWTNLTVYWKSECCYHCLFQVLVNVPQSPKAGKPSAAAASVSTQHGSILQLNDTLEEKEVCRLEYRFGEFGNYSLLVKNIHNGVSEIACDLAVNEDPVDSNLPVSIAFLIGLAVIIVISFLRLLLSLDDFNNWISKAISSRETDRLINSELGSPSRTDPLDGDVQPATWRLSALPPRLRSVDTFRGIALILMVFVNYGGGKYWYFKHASWNGLTVADLVFPWFVFIMGSSIFLSMTSILQRGCSKFRLLGKIAWRSFLLICIGIIIVNPNYCLGPLSWDKVRIPGVLQRLGVTYFVVAVLELLFAKPVPEHCASERSCLSLRDITSSWPQWLLILVLEGLWLGLTFLLPVPGCPTGYLGPGGIGDFGKYPNCTGGAAGYIDRLLLGDDHLYQHPSSAVLYHTEVAYDPEGILGTINSIVMAFLGVQAGKILLYYKARTKDILIRFTAWCCILGLISVALTKVSENEGFIPVNKNLWSLSYVTTLSSFAFFILLVLYPVVDVKGLWTGTPFFYPGMNSILVYVGHEVFENYFPFQWKLKDNQSHKEHLTQNIVATALWVLIAYILYRKKIFWKI

SEQ ID NO: 10496 - protein, 921 aa, Homo sapiens
MSTKVRKCKEQARVTFPAPEEEEDEGEDEGAEPQRRRRGWRGVNGGLEPRSAPSQREPHGYCPPPFSHGPDLSMEGSPSLRRMTVMREKGRRQAVRGPAFMFNDRGTSLTAEEERFLDAAEYGNIPVVRKMLEESKTLNVNCVDYMGQNALQLAVGNEHLEVTELLLKKENLARIGDALLLAISKGYVRIVEAILNHPGFAASKRLTLSPCEQELQDDDFYAYDEDGTRFSPDITPIILAAHCQKYEVVHMLLMKGARIERPHDYFCKCGDCMEKQRHDSFSHSRSRINAYKGLASPAYLSLSSEDPVLTALELSNELAKLANIEKEFKNDYRKLSMQCKDFVVGVLDLCRDSEEVEAILNGDLESAEPLEVHRHKASLSRVKLAIKYEVKKFVAHPNCQQQLLTIWYENLSGLREQTIAIKCLVVLVVALGLPFLAIGYWIAPCSRLGKILRSPFMKFVAHAASFIIFLGLLVFNASDRFEGITTLPNITVTDYPKQIFRVKTTQFTWTEMLIMVWVLGMMWSECKELWLEGPREYILQLWNVLDFGMLSIFIAAFTARFLAFLQATKAQQYVDSYVQESDLSEVTLPPEIQYFTYARDKWLPSDPQIISEGLYAIAVVLSFSRIAYILPANESFGPLQISLGRTVKDIFKFMVLFIMVFFAFMIGMFILYSYYLGAKVNAAFTTVEESFKTLFWSIFGLSEVTSVVLKYDHKFIENIGYVLYGIYNVTMVVVLLNMLIAMINSSYQEIEDDSDVEWKFARSKLWLSYFDDGKTLPPPFSLVPSPKSFVYFIMRIVNFPKCRRRRLQKDIEMGMGNSKSRLNLFTQSNSRVFESHSFNSILNQPTRYQQIMKRLIKRYVLKAQVDKENDEVNEGELKEIKQDISSLRYELLEDKSQATEELAILIHKLSEKLNPSMLRCE

SEQ ID NO: 10497 - protein, 732 aa, Homo sapiens
MERGGGGSGTGSRPEGTARGTSLPGKIAEPGAVRTSQPNYRPQGMEGFLKSDERQRLAKERREEREKCLAAREQQILEKQKRARLQYEKQMEERWRKLEEQRQREDQKRAAVEEKRKQKLREEEERLEAMMRRSLERTQQLELKKKYSWGAPLAIGPGGHDACDKLSTSTMSLPKPTEPPMNKRLSSSTVAISYSPDRVFHVCPRLAPLGPLNPSYKSSPTRNIEKKKATSTSTSGAGDVGKEALSGGEASLVEKVKRGQRTATSLPVVNFGSPLRRCEFSGGIPKRPSSPVISKTATKAYPQSPKTTKPPYPGSPVKYRLPALSGQDMPKRKAEKEKSNKEREGTLAQQAAGPQGEEALEKHVVDKHASEKHAAAAGGKAENSAALGKPTAGTTDAGEAAKILAEKRRQARLQKEQEEQERLEKEEQDRLEREELKRKAEEERLRLEEEARKQEEERKRQEEEKKKQEGEEKRKAGEEAKRKAEEELLLKEKQEQEKQEKAMIEKQKEAAETKAREVAEQMRLEREQIMLQIEQERLERKKRIDEIMKRTRKSDVSPQVKKEDPKVGVQPAVCVEKKTKLVVPNKMEINGLNTCQEVNGVDHAAPETYPQDIFSNGLKPAGGLIHLDALDGKSNSLDDSTEEVQSMDVSPVSKEELISIPEFSPVSEMIPGVSLDQNGTGNARALQDLLDFTGPPTFPKRSSENLSLDDCNKNLIEGFNSPGQETPLNTFC

SEQ ID NO: 10498 - protein, 833 aa, Homo sapiens
MVPSRRTWNLGATPSLRGLWRVGRAPEPEPGMARPAPAPASPAARPFPHTGPGRLRTGRGKDTPVCGDEDSSARSAARPALAQCRALSVDWAGPGSPHGLYLTLQVEHLKEKLISQAQEVSRLRSELGGTDLEKHRDLLMVENERLRQEMRRCEAELQELRTKPAGPCPGCEHSQESAQLRDKLSQLQLEMAESKGMLSELNLEVQQKTDRLAEVELRLKDCLAEKAQEEERLSRRLRDSHETIASLRAQSPPVKYVIKTVEVESSKTKQALSESQARNQHLQEQVAMQRQVLKEMEQQLQSSHQLTARLRAQIAMYESELERAHGQMLEEMQSLEEDKNRAIEEAFARAQVEMKAVHENLAGVRTNLLTLQPALRTLTNDYNGLKRQVRGFPLLLQEALRSVKAEIGQAIEEVNSNNQELLRKYRRELQLRKKCHNELVRLKGNIRVIARVRPVTKEDGEGPEATNAVTFDADDDSIIHLLHKGKPVSFELDKVFSPQASQQDVFQEVQALVTSCIDGFNVCIFAYGQTGAGKTYTMEGTAENPGINQRALQLLFSEVQEKASDWEYTITVSAAEIYNEVLRDLLGKEPQEKLEIRLCPDGSGQLYVPGLTEFQVQSVDDINKVFEFGHTNRTTEFTNLNEHSSRSHALLIVTVRGVDCSTGLRTTGKLNLVDLAGSERVGKSGAEGSRLREAQHINKSLSALGDVIAALRSRQGHVPFRNSKLTYLLQDSLSGDSKTLMVVQVSPVEKNTSETLYSLKFAERVRSVELGPGLRRAELGSWSSQEHLEWEPACQTPQPSARAHSAPSSGTSSRPGSIRRKLQPSGKSRPLPV

SEQ ID NO: 10499 - protein, 456 aa, Homo sapiens
MKETPLSNCERRFLLRAIEEKKRLDGRQTYDYRNIRISFGTDYGCCIVELGKTRVLGQVSCELVSPKLNRATEGILFFNLELSQMAAPAFEPGRQSDLLVKLNRLMERCLRNSKCIDTESLCVVAGEKVWQIRVDLHLLNHDGNIIDAASIAAIVALCHFRRPDVSVQGDEVTLYTPEERDPVPLSIHHMPICVSFAFFQQGTYLLVDPNEREERVMDGLLVIAMNKHREICTIQSSGGIMLLKDQVLRCSKIAGVKVAEITELILKALENDQKVRKEGGKFGFAESIANQRITAFKMEKAPIDTSDVEEKAEEIIAEAEPPSEVVSTPVLWTPGTAQIGEGVENSWGDLEDSEKEDDEGGGDQAIILDGIKMDTGVEVSDIGSQELGFHHVGQTGLEFLTSDAPIILSDSEEEEMIILEPDKNPKKIRTQTTSAKQEKAPSKKPVKRRKKKRAAN

SEQ ID NO: 10500 - protein, 312 aa, Homo sapiens
MPNMTSIREFILLGFTDNPELQVVIFFFMLITYLLSVSGNMIIIMLTLSNIHLKTPMYFFLRNFSFLEISFTTVFIPRFLINIATGDTTISYNASMAQVFFLILLGSTEFFLLAVMSYDRYVAICKPLHYTTIMSNKVCNWLVISSWLAGFLIIFPPVIMGLQLDFCDSSTIDHFICDSSPMLLIACTDTQFLELMAFLLAVFTLMVTLALVVLSYTLILKTILKIPSAQQRKKAFSTCSSHMIVVSVSYGSCIFMCVKTSAKEGMALSKGVAVLNTSVAPMLNPFIYTLRNQQVKQALREFTKKILSLNKQ

SEQ ID NO: 10501 - protein, 312 aa, Homo sapiens
MRNSTAVTDFILLGLTSDPQWQVVLFIFLLVTYMLSVTGNLIIITLTLSDPHLQTPMYFFLRNFSFLEISFTSVCIPRFLVTVVTGNRTISYNGCVAQLFFFIFLGVTEFYLLAAMSYDRCMAICKPLHYTIIMSTRVCTLLVFSSWLAGFLIIFPPVMLLLQLDFCASNVIDHFICDSSPMLQLSCTNTHFLELMAFFLAVVTLMVTLTLVILSYTNIIRTILKIPSMSQRKKAFSTCSSHMIVVSISYSSCIFMYIKTSARERVTLSKGVAVLNTSVAPLLNPFIYTLRNKQVKQAFKSMVQKMIFSLNK

SEQ ID NO: 10502 - protein, 311 aa, Homo sapiens
MNHTMVTEFVLLGLSDDPDLQIVIFLFLFITYILSVTGNLTIITLTFVDSHLQTPMYFFLRNFSFLEISFTTVCIPRFLGAIITRNKTISYNNCAAQLFFFIFMGVTEFYILTAMSYDRYVAICKPLHYTSIMNRKLCTLLVLCAWLSGFLTIFPPLMLLLQLDYCASNVIDHFACDYFPLLQLSCSDTWLLEVIGFYFALVTLLFTLALVILSYMYIIRTILRIPSASQRKKAFSTCSSHMIVISISYGSCIFMYANPSAKEKASLTKGIAILNTSVAPMLNPFIYTLRNQQVKQAFKNVVHKVVFYANQ

SEQ ID NO: 10503 - protein, 312 aa, Homo sapiens
MRNHTEITEFILLGLTDDPNFQVVIFVFLLITYMLSITGNLTLITITLLDSHLQTPMYFFLRNFSILEISFTTVSIPKFLGNIISGDKTISFNNCIVQLFFFILLGVTEFYLLAAMSYDRYVAICKPLHCLSIMNRRVCTLLVFTSWLVSFLIIFPALMLLLKLHYCRSNIIDHFTCDYFPLLQLACSDTKFLEVMGFSCAAFTLMFTLALIFLSYIYIIRTILRIPSTSQRTKAFSTCSSHMVVVSISYGSCIFMYIKPSAKDRVSLSKGVAILNTSVAPMMNPFIYSLRNQQVKQAFINMARKTVFFTST

SEQ ID NO: 10504 - protein, 818 aa, Homo sapiens
MKKQFNRMRQLANQTVGRAEKTEVLSEDLLQVEKRLELVKQVSHSTHKKLTACLQGQQGAEADKRSKKLPLTTLAQCLMEGSAILGDDTLLGKMLKLCGETEDKLAQELIHFELQVERDVIEPLFLLAEVEIPNIQKQRKHLAKLVLDMDSSRTRWQQTSKSSGLSSSLQPAGAKADALREEMEEAANRVEICRDQLSADMYSFVAKEIDYANYFQTLIEVQAEYHRKSLTLLQAVLPQIKAQQEAWVEKPSFGKPLEEHLTISGREIAFPIEACVTMLLECGMQEEGLFRVAPSASKLKKLKAALDCCVVDVQEYSADPHAIAGALKSYLRELPEPLMTFELYDEWIQASNVQEQDKKLQALWNACEKLPKANHNNIRYLIKFLSKLSEYQDVNKMTPSNMAIVLGPNLLWPQAEGNITEMMTTVSLQIVGIIEPIIQHADWFFPGEIEFNITGNYGSPVHVNHNANYSSMPSPDMDPADRRQPEQARRPLSVATDNMMLEFYKKDGLRKIQSMGVRVMDTNWVARRGSSAGRKVSCAPPSMQPPAPPAELAAPLPSPLPEQPLDSPAAPALSPSGLGLQPGPERTSTTKSKELSPGSAQKGSPGSSQGTACAGTQPGAQPGAQPGASPSPSQPPADQSPHTLRKVSKKLAPIPPKVPFGQPGAMADQSAGQPSPVSLSPTPPSTPSPYGLSYPQGYSLASGQLSPAAAPPLASPSVFTSTLSKSRPTPKPRQRPTLPPPQPPTVNLSASSPQSTEAPMLDGMSPGESMSTDLVHFDIPSIHIELGSTLRLSPLEHMRRHSVTDKRDSEEESESTAL

SEQ ID NO: 10505 - protein, 828 aa, Homo sapiens
MAQFYYKRNVNAPYRDRIPLRIVRAESELSPSEKAYLNAVEKGDYASVKKSLEEAEIYFKININCIDPLGRTALLIAIENENLELIELLLSFNVYVGDALLHAIRKEVVGAVELLLNHKKPSGEKQVPPILLDKQFSEFTPDITPIILAAHTNNYEIIKLLVQKGVSVPRPHEVRCNCVECVSSSDVDSLRHSRSRLNIYKALASPSLIALSSEDPFLTAFQLSWELQELSKVENEFKSEYEELSRQCKQFAKDLLDQTRSSRELEIILNYRDDNSLIEEQSGNDLARLKLAIKYRQKEFVAQPNCQQLLASRWYDEFPGWRRRHWAVKMVTCFIIGLLFPVFSVCYLIAPKSPLGLFIRKPFIKFICHTASYLTFLFLLLLASQHIDRSDLNRQGPPPTIVEWMILPWVLGFIWGEIKQMWDGGLQDYIHDWWNLMDFVMNSLYLATISLKIVAFVKYSALNPRESWDMWHPTLVAEALFAIANIFSSLRLISLFTANSHLGPLQISLGRMLLDILKFLFIYCLVLLAFANGLNQLYFYYEETKGLTCKGIRCEKQNNAFSTLFETLQSLFWSIFGLINLYVTNVKAQHEFTEFVGATMFGTYNVISLVVLLNMLIAMMNNSYQLIARRAADNLRRHHQYQEVMRNLVKRYVAAMIRDAKTEEGLTEENFKELKQDISSFRFEVLGLLRGSKLSTIQSANASKESSNSADSDEKSDSEEEVARQQAAGPLERNIQLESRGLASRGDLSIPGLSEQCVLVDHRERNTDTLGLQVGKRVCPFKSEKVVVEDTVPIIPKEKHAKEEDSSIDYDLNLPDTVTHEDYVTTRL

SEQ ID NO: 10506 - protein, 568 aa, Homo sapiens
MVLLHWCLLWLLFPLSSRTQKLPTRDEELFQMQIRDKAFFHDSSVIPDGAEISSYLFRDTPKRYFFVVEEDNTPLSVTVTPCDAPLEWKLSLQELPEDRSGEGSGDLEPLEQQKQQIINEEGTELFSYKGNDVEYFISSSSPSGLYQLDLLSTEKDTHFKVYATTTPESDQPYPELPYDPRVDVTSLGRTTVTLAWKPSPTASLLKQPIQYCVVINKEHNFKSLCAVEAKLSADDAFMMAPKPGLDFSPFDFAHFGFPSDNSGKERSFQAKPSPKLGRHVYSRPKVDIQKICIGNKNIFTVSDLKPDTQYYFDVFVVNINSNMSTAYVGTFARTKEEAKQKTVELKDGKITDVFVKRKGAKFLRFAPVSSHQKVTFFIHSCLDAVQIQVRRDGKLLLSQNVEGIQQFQLRGKPKAKYLVRLKGNKKGASMLKILATTRPTKQSFPSLPEDTRIKAFDKLRTCSSATVAWLGTQERNKFCIYKKEVDDNYNEDQKKREQNQCLGPDIRKKSEKVLCKYFHSQNLQKAVTTETIKGLQPGKSYLLDVYVIGHGGHSVKYQSKVVKTRKFC

SEQ ID NO: 10507 - protein, 977 aa, Homo sapiens
MAQFYYKRNVNAPYRDRIPLRIVRAESELSPSEKAYLNAVEKGDYASVKKSLEEAEIYFKININCIDPLGRTALLIAIENENLELIELLLSFNVYVGDALLHAIRKEVVGAVELLLNHKKPSGEKQVPPILLDKQFSEFTPDITPIILAAHTNNYEIIKLLVQKGVSVPRPHEVRCNCVECVSSSDVDSLRHSRSRLNIYKALASPSLIALSSEDPFLTAFQLSWELQELSKVENEFKSEYEELSRQCKQFAKDLLDQTRSSRELEIILNYRDDNSLIEEQSGNDLARLKLAIKYRQKEFVAQPNCQQLLASRWYDEFPGWRRRHWAVKMVTCFIIGLLFPVFSVCYLIAPKSPLGLFIRKPFIKFICHTASYLTFLFLLLLASQHIDRSDLNRQGPPPTIVEWMILPWVLGFIWGEIKQMWDGGLQDYIHDWWNLMDFVMNSLYLATISLKIVAFVKYSALNPRESWDMWHPTLVAEALFAIANIFSSLRLISLFTANSHLGPLQISLGRMLLDILKFLFIYCLVLLAFANGLNQLYFYYEETKGLTCKGIRCEKQNNAFSTLFETLQSLFWSIFGLINLYVTNVKAQHEFTEFVGATMFGTYNVISLVVLLNMLIAMMNNSYQLIADHADIEWKFARTKLWMSYFEEGGTLPTPFNVIPSPKSLWYLIKWIWTHLCKKKMRRKPESFGTIGRRAADNLRRHHQYQEVMRNLVKRYVAAMIRDAKTEEGLTEENFKELKQDISSFRFEVLGLLRGSKLSTIQSANASKESSNSADSDEKSDSEGNSKDKKKNFSLFDLTTLIHPRSAAIASERHNISNGSALVVQEPPREKQRKVNFVTDIKNFGLFHRRSKQNAAEQNANQIFSVSEEVARQQAAGPLERNIQLESRGLASRGDLSIPGLSEQCVLVDHRERNTDTLGLQVGKRVCPFKSEKVVVEDTVPIIPKEKHAKEEDSSIDYDLNLPDTVTHEDYVTTRL

SEQ ID NO: 10508 - protein, 514 aa, Homo sapiens
MPAVSGPGPLFCLLLLLLDPHSPETGCPPLRRFEYKLSFKGPRLALPGAGIPFWSHHGDAILGLEEVRLTPSMRNRSGAVWSRASVPFSAWEVEVQMRVTGLGRRGAQGMAVWYTRGRGHVGSVLGGLASWDGIGIFFDSPAEDTQDSPAIRVLASDGHIPSEQPGDGASQGLGSCHWDFRNRPHPFRARITYWGQRLRMSLNSGLTPSDPGEFCVDVGPLLLVPGGFFGVSAATGTLAGEDPTGQVPPQPFLEMQQLRLARQLEGLWARLGLGTREDVTPKSDSEAQGEGERLFDLEETLGRHRRILQALRGLSKQLAQAERQWKKQLGPPGQARPDGGWALDASCQIPSTPGRGGHLSMSLNKDSAKVGALLHGQWTLLQALQEMRDAAVRMAAEAQVSYLPVGIEHHFLELDHILGLLQEELRGPAKAAAKAPRPPGQPPRASSCLQPGIFLFYLLIQTVGFFGYVHFRQELNKSLQECLSTGSLPLGPAPHTPRALGILRRQPLPASMPA

SEQ ID NO: 10509 - protein, 1038 aa, Homo sapiens
MDPNTIIEALRGTMDPALREAAERQLNEAHKSLNFVSTLLQITMSEQLDLPVRQAGVIYLKNMITQYWPDRETAPGDISPYTIPEEDRHCIRENIVEAIIHSPELIRVQLTTCIHHIIKHDYPSRWTAIVDKIGFYLQSDNSACWLGILLCLYQLVKNYEYKKPEERSPLVAAMQHFLPVLKDRFIQLLSDQSDQSVLIQKQIFKIFYALVQYTLPLELINQQNLTEWIEILKTVVNRDVPNETLQVEEDDRPELPWWKCKKWALHILARLFERYGSPGNVSKEYNEFAEVFLKAFAVGVQQVLLKVLYQYKEKQYMAPRVLQQTLNYINQGVSHALTWKNLKPHIQGIIQDVIFPLMCYTDADEELWQEDPYEYIRMKFDVFEDFISPTTAAQTLLFTACSKRKEVLQKTMGFCYQILTEPNADPRKKDGALHMIGSLAEILLKKKIYKDQMEYMLQNHVFPLFSSELGYMRARACWVLHYFCEVKFKSDQNLQTALELTRRCLIDDREMPVKVEAAIALQVLISNQEKAKEYITPFIRPVMQALLHIIRETENDDLTNVIQKMICEYSEEVTPIAVEMTQHLAMTFNQVIQTGPDEEGSDDKAVTAMGILNTIDTLLSVVEDHKEITQQLEGICLQVIGTVLQQHVLEFYEEIFSLAHSLTCQQVSPQMWQLLPLVFEVFQQDGFDYFTDMMPLLHNYVTVDTDTLLSDTKYLEMIYSMCKKVLTGVAGEDAECHAAKLLEVIILQCKGRGIDQCIPLFVEAALERLTREVKTSELRTMCLQVAIAALYYNPHLLLNTLENLRFPNNVEPVTNHFITQWLNDVDCFLGLHDRKMCVLGLCALIDMEQIPQVLNQVSGQILPAFILLFNGLKRAYACHAEHENDSDDDDEAEDDDETEELGSDEDDIDEDGQEYLEILAKQAGEDGDDEDWEEDDAEETALEGYSTIIDDEDNPVDEYQIFKAIFQTIQNRNPVWYQALTHGLNEEQRKQLQDIATLADQRRAAHESKMIEKHGGYKFSAPVVPSSFNFGGPAPGMN

SEQ ID NO: 10510 - protein, 512 aa, Homo sapiens [sequence omitted]

SEQ ID NO: 10511 - protein, 398 aa, Homo sapiens
MRLREPLLSGSAAMPGASLQRACRLLVAVCALHLGVTLVYYLAGRDLSRLPQLVGVSTPLQGGSNSAAAIGQSSGELRTGGARPPPPLGASSQPRPGGDSSPVVDSGPGPASNLTSVPVPHTTALSLPACPEESPLLVGPMLIEFNMPVDLELVAKQNPNVKMGGRYAPRDCVSPHKVAIIIPFRNRQEHLKYWLYYLHPVLQRQQLDYGIYVINQAGDTIFNRAKLLNVGFQEALKDYDYTCFVFSDVDLIPMNDHNAYRCFSQPRHISVAMDKFGFSLPYVQYFGGVSALSKQQFLTINGFPNNYWGWGGEDDDIFNRLVFRGMSISRPNAVVGRCRMIRHSRDKKNEPNPQRFDRIAHTKETMLSDGLNSLTYQVLDVQRYPLYTQITVDIGTPS

SEQ ID NO: 10512 - protein, 779 aa, Homo sapiens
MIPFLPMFSLLLLLIVNPINANNHYDKILAHSRIRGRDQGPNVCALQQILGTKKKYFSTCKNWYKKSICGQKTTVLYECCPGYMRMEGMKGCPAVLPIDHVYGTLGIVGATTTQRYSDASKLREEIEGKGSFTYFAPSNEAWDNLDSDIRRGLESNVNVELLNALHSHMINKRMLTKDLKNGMIIPSMYNNLGLFINHYPNGVVTVNCARIIHGNQIATNGVVHVIDRVLTQIGTSIQDFIEAEDDLSSFRAAAITSDILEALGRDGHFTLFAPTNEAFEKLPRGVLERIMGDKVASEALMKYHILNTLQCSESIMGGAVFETLEGNTIEIGCDGDSITVNGIKMVNKKDIVTNNGVIHLIDQVLIPDSAKQVIELAGKQQTTFTDLVAQLGLASALRPDGEYTLLAPVNNAFSDDTLSMDQRLLKLILQNHILKVKVGLNELYNGQILETIGGKQLRVFVYRTAVCIENSCMEKGSKQGRNGAIHIFREIIKPAEKSLHEKLKQDKRFSTFLSLLEAADLKELLTQPGDWTLFVPTNDAFKGMTSEEKEILIRDKNALQNIILYHLTPGVFIGKGFEPGVTNILKTTQGSKIFLKEVNDTLLVNELKSKESDIMTTNGVIHVVDKLLYPADTPVGNDQLLEILNKLIKYIQIKFVRGSTFKEIPVTVYKPIIKKYTKIIDGVPVEITEKETREERIITGPEIKYTRISTGGGETEETLKKLLQEEVTKVTKFIEGGDGHLFEDEEIKRLLQGDTPVRKLQANKKVQGSRRRLREGRSQ

SEQ ID NO: 10513 - protein, 809 aa, Homo sapiens
MIPFLPMFSLLLLLIVNPINANNHYDKILAHSRIRGRDQGPNVCALQQILGTKKKYFSTCKNWYKKSICGQKTTVLYECCPGYMRMEGMKGCPAVLPIDHVYGTLGIVGATTTQRYSDASKLREEIEGKGSFTYFAPSNEAWDNLDSDIRRGLESNVNVELLNALHSHMINKRMLTKDLKNGMIIPSMYNNLGLFINHYPNGVVTVNCARIIHGNQIATNGVVHVIDRVLTQIGTSIQDFIEAEDDLSSFRAAAITSDILEALGRDGHFTLFAPTNEAFEKLPRGVLERIMGDKVASEALMKYHILNTLQCSESIMGGAVFETLEGNTIEIGCDGDSITVNGIKMVNKKDIVTNNGVIHLIDQVLIPDSAKQVIELAGKQQTTFTDLVAQLGLASALRPDGEYTLLAPVNNAFSDDTLSMDQRLLKLILQNHILKVKVGLNELYNGQILETIGGKQLRVFVYRTAVCIENSCMEKGSKQGRNGAIHIFREIIKPAEKSLHEKLKQDKRFSTFLSLLEAADLKELLTQPGDWTLFVPTNDAFKGMTSEEKEILIRDKNALQNIILYHLTPGVFIGKGFEPGVTNILKTTQGSKIFLKEVNDTLLVNELKSKESDIMTTNGVIHVVDKLLYPADTPVGNDQLLEILNKLIKYIQIKFVRGSTFKEIPVTVYRPTLTKVKIEGEPEFRLIKEGETITEVIHGEPIIKKYTKIIDGVPVEITEKETREERIITGPEIKYTRISTGGGETEETLKKLLQEEVTKVTKFIEGGDGHLFEDEEIKRLLQGDTPVRKLQANKKVQGSRRRLREGRSQ

SEQ ID NO: 10514 - protein, 836 aa, Homo sapiens
MIPFLPMFSLLLLLIVNPINANNHYDKILAHSRIRGRDQGPNVCALQQILGTKKKYFSTCKNWYKKSICGQKTTVLYECCPGYMRMEGMKGCPAVLPIDHVYGTLGIVGATTTQRYSDASKLREEIEGKGSFTYFAPSNEAWDNLDSDIRRGLESNVNVELLNALHSHMINKRMLTKDLKNGMIIPSMYNNLGLFINHYPNGVVTVNCARIIHGNQIATNGVVHVIDRVLTQIGTSIQDFIEAEDDLSSFRAAAITSDILEALGRDGHFTLFAPTNEAFEKLPRGVLERIMGDKVASEALMKYHILNTLQCSESIMGGAVFETLEGNTIEIGCDGDSITVNGIKMVNKKDIVTNNGVIHLIDQVLIPDSAKQVIELAGKQQTTFTDLVAQLGLASALRPDGEYTLLAPVNNAFSDDTLSMDQRLLKLILQNHILKVKVGLNELYNGQILETIGGKQLRVFVYRTAVCIENSCMEKGSKQGRNGAIHIFREIIKPAEKSLHEKLKQDKRFSTFLSLLEAADLKELLTQPGDWTLFVPTNDAFKGMTSEEKEILIRDKNALQNIILYHLTPGVFIGKGFEPGVTNILKTTQGSKIFLKEVNDTLLVNELKSKESDIMTTNGVIHVVDKLLYPADTPVGNDQLLEILNKLIKYIQIKFVRGSTFKEIPVTVYTTKIITKVVEPKIKVIEGSLQPIIKTEGPTLTKVKIEGEPEFRLIKEGETITEVIHGEPIIKKYTKIIDGVPVEITEKETREERIITGPEIKYTRISTGGGETEETLKKLLQEEVTKVTKFIEGGDGHLFEDEEIKRLLQGDTPVRKLQANKKVQGSRRRLREGRSQ

SEQ ID NO: 10515 - protein, 808 aa, Homo sapiens
MIPFLPMFSLLLLLIVNPINANNHYDKILAHSRIRGRDQGPNVCALQQILGTKKKYFSTCKNWYKKSICGQKTTVLYECCPGYMRMEGMKGCPAVLPIDHVYGTLGIVGATTTQRYSDASKLREEIEGKGSFTYFAPSNEAWDNLDSDIRRGLESNVNVELLNALHSHMINKRMLTKDLKNGMIIPSMYNNLGLFINHYPNGVVTVNCARIIHGNQIATNGVVHVIDRVLTQIGTSIQDFIEAEDDLSSFRAAAITSDILEALGRDGHFTLFAPTNEAFEKLPRGVLERIMGDKVASEALMKYHILNTLQCSESIMGGAVFETLEGNTIEIGCDGDSITVNGIKMVNKKDIVTNNGVIHLIDQVLIPDSAKQVIELAGKQQTTFTDLVAQLGLASALRPDGEYTLLAPVNNAFSDDTLSMDQRLLKLILQNHILKVKVGLNELYNGQILETIGGKQLRVFVYRTAVCIENSCMEKGSKQGRNGAIHIFREIIKPAEKSLHEKLKQDKRFSTFLSLLEAADLKELLTQPGDWTLFVPTNDAFKGMTSEEKEILIRDKNALQNIILYHLTPGVFIGKGFEPGVTNILKTTQGSKIFLKEVNDTLLVNELKSKESDIMTTNGVIHVVDKLLYPADTPVGNDQLLEILNKLIKYIQIKFVRGSTFKEIPVTVYTTKIITKVVEPKIKVIEGSLQPIIKTEGPTLTKVKIEGEPEFRLIKEGETITEVIHGEPIIKKYTKIIDGVPVEITEKETREERIITGPEIKYTRISTGGGETEETLKKLLQEDTPVRKLQANKKVQGSRRRLREGRSQ

SEQ ID NO: 10516 - protein, 433 aa, Homo sapiens
MLAATVLTLALLGNAHACSKGTSHEAGIVCRITKPALLVLNHETAKVIQTAFQRASYPDITGEKAMMLLGQVKYGLHNIQISHLSIASSQVELVEAKSIDVSIQNVSVVFKGTLKYGYTTAWWLGIDQSIDFEIDSAIDLQINTQLTCDSGRVRTDAPDCYLSFHKLLLHLQGEREPGWIKQLFTNFISFTLKLVLKGQICKEINVISNIMADFVQTRAASILSDGDIGVDISLTGDPVITASYLESHHKAVLETWGFNTNQEIFQEVVGGFPSQAQVTVHCLKMPKISCQNKGVVVNSSVMVKFLFPRPDQQHSVAYTFEEDIVTTVQASYSKKKLFLSLLDFQITPKTVSNLTESSSESVQSFLQSMITAVGIPEVMSRLEVVFTALMNSKGVSLFDIINPEIITRDGFLLLQMDFGFPEHLLVDFLQSLS

SEQ ID NO: 10517 - protein, 366 aa, Homo sapiens
MESETEPEPVTLLVKSPNQRHRDLELSGDRGWSVGHLKAHLSRVYPERPRPEDQRLIYSGKLLLDHQCLRDLLPKVAESTEEPAGSNRGQYPEDSSSDGLRQREVLRNLSSPGWENISRPEAAQQAFQGLGPGFSGYTPYGWLQLSWFQQIYARQYYMQYLAATAASGAFVPPPSAQEIPVVSAPAPAPIHNQFPAENQPANQNAAPQVVVNPGANQNLRMNAQGGPIVEEDDEINRDWLDWTYSAATFSVFLSILYFYSSLSRFLMVMGATVVMYLHHVGWFPFRPRPVQNFPNDGPPPDVVNQDPNNNLQEGTDPETEDPNHLPPDRDVLDGEQTSPSFMSTAWLVFKTFFASLLPEGPPAIAN

SEQ ID NO: 10518 - protein, 678 aa, Homo sapiens
MHVFAYRVHTHHLGKVVSGYRVRNGQWTLIGRQSPQLPQAFYPVGHPVDVSFGDLLAARCVFTGEGRTEATHIGGTSSDEMCNLYIMYYMEAKHAVSFMTCTQNVAPDMFRTIPPEANIPIPVKSDMVMMHEHHKETEYKDKIPLLQQPKREEEEVLDQGDFYSLLSKLLGEREDVVHVHKYNPTEKAESESDLVAEIANVVQKKDLGRSDAREGAEHERGNAILVRDRIHKFHRLVSTLRPPESRVFSLQQPPPGEGTWEPEHTGDFHMEEALDWPGVYLLPGQVSGVALDPKNNLVIFHRGDHVWDGNSFDSKFVYQQIGLGPIEEDTILVIDPNNAAVLQSSGKNLFYLPHGLSIDKDGNYWVTDVALHQVFKLDPNNKEGPVLILGRSMQPGSDQNHFCQPTDVAVDPGTGAIYVSDGYCNSRIVQFSPSGKFITQWGEESSGSSPLPGQFTVPHSLALVPLLGQLCVADRENGRIQCFKTDTKEFVREIKHSSFGRNVFAISYIPGLLFAVNGKPHFGDQEPVQGFVMNFSNGEIIDIFKPVRKHFDMPHDIVASEDGTVYIGDAHTNTVWKFTLTEKLEHRSVKKAGIEVQEIKADSEHKLETSSGRVLGRFRGKGSGGLNLGNFFASRKGYSRKGFDRLSTEGSDQEKEDDGSESEEEYSAPLPALAPSSS

SEQ ID NO: 10519 - protein, 337 aa, Homo sapiens
MTNNSGSKAELVVGGKYKLVRKIGSGSFGDVYLGITTTNGEDVAVKLESQKVKHPQLLYESKLYTILQGGVGIPHMHWYGQEKDNNVLVMDLLGPSLEDLFNFCSRRFTMKTVLMLADQMISRIEYVHTKNFLHRDIKPDNFLMGTGRHCNKLFLIDFGLAKKYRDNRTRQHIPYREDKHLIGTVRYASINAHLGIEQSRRDDMESLGYVFMYFNRTSLPWQGLRAMTKKQKYEKISEKKMSTPVEVLCKGFPAEFAMYLNYCRGLRFEEVPDYMYLRQLFRILFRTLNHQYDYTFDWTMLKQKAAQQAASSSGQGQQAQTQTGKQTEKNKNNVKDN

SEQ ID NO: 10520 - protein, 2871 aa, Homo sapiens
MSCNGGSHPRINTLGRMIRAESGPDLRYEVTSGGGGTSRMYYSRRGVITDQNSDGYCQTGTMSRHQNQNTIQELLQNCSDCLMRAELIVQPELKYGDGIQLTRSRELDECFAQANDQMEILDSLIREMRQMGQPCDAYQKRLLQLQEQMRALYKAISVPRVRRASSKGGGGYTCQSGSGWDEFTKHVTSECLGWMRQQRAEMDMVAWGVDLASVEQHINSHRGIHNSIGDYRWQLDKIKADLREKSAIYQLEEEYENLLKASFERMDHLRQLQNIIQATSREIMWINDCEEEELLYDWSDKNTNIAQKQEAFSIRMSQLEVKEKELNKLKQESDQLVLNQHPASDKIEAYMDTLQTQWSWILQITKCIDVHLKENAAYFQFFEEAQSTEAYLKGLQDSIRKKYPCDKNMPLQHLLEQIKELEKEREKILEYKRQVQNLVNKSKKIVQLKPRNPDYRSNKPIILRALCDYKQDQKIVHKGDECILKDNNERSKWYVTGPGGVDMLVPSVGLIIPPPNPLAVDLSCKIEQYYEAILALWNQLYINMKSLVSWHYCMIDIEKIRAMTIAKLKTMRQEDYMKTIADLELHYQEFIRNSQGSEMFGDDDKRKIQSQFTDAQKHYQTLVIQLPGYPQHQTVTTTEITHHGTCQDVNHNKVIETNRENDKQETWMLMELQKIRRQIEHCEGRMTLKNLPLADQGSSHHITVKINELKSVQNDSQAIAEVLNQLKDMLANFRGSEKYCYLQNEVFGLFQKLENINGVTDGYLNSLCTVRALLQAILQTEDMLKVYEARLTEEETVCLDLDKVEAYRCGLKKIKNDLNLKKSLLATMKTELQKAQQIHSQTSQQYPLYDLDLGKFGEKVTQLTDRWQRIDKQIDFRLWDLEKQIKQLRNYRDNYQAFCKWLYDAKRRQDSLESMKFGDSNTVMRFLNEQKNLHSEISGKRDKSEEVQKIAELCANSIKDYELQLASYTSGLETLLNIPIKRTMIQSPSGVILQEAADVHARYIELLTRSGDYYRFLSEMLKSLEDLKLKNTKIEVLEEELRLARDANSENCNKNKFLDQNLQKYQAECSQFKAKLASLEELKRQAELDGKSAKQNLDKCYGQIKELNEKITRLTYEIEDEKRRRKSVEDRFDQQKNDYDQLQKARQCEKENLGWQKLESEKAIKEKEYEIERLRVLLQEEGTRKREYENELAKVRNHYNEEMSNLRNKYETEINITKTTIKEISMQKEDDSKNLRNQLDRLSRENRDLKDEIVRLNDSILQATEQRRRAEENALQQKACGSEIMQKKQHLEIELKQVMQQRSEDNARHKQSLEEAAKTIQDKNKEIERLKAEFQEEAKRRWEYENELSKVRNNYDEEIISLKNQFETEINITKTTIHQLTMQKEEDTSGYRAQIDNLTRENRSLSEEIKRLKNTLTQTTENLRRVEEDIQQQKATGSEVSQRKQQLEVELRQVTQMRTEESVRYKQSLDDAAKTIQDKNKEIERLKQLIDKETNDRKCLEDENARLQRVQYDLQKANSSATETINKLKVQEQELTRLRIDYERVSQERTVKDQDITRFQNSLKELQLQKQKVEEELNRLKRTASEDSCKRKKLEEELEGMRRSLKEQAIKITNLTQQLEQASIVKKRSEDDLRQQRDVLDGHLREKQRTQEELRRLSSEVEALRRQLLQEQESVKQAHLRNEHFQKAIEDKSRSLNESKIEIERLQSLTENLTKEHLMLEEELRNLRLEYDDLRRGRSEADSDKNATILELRSQLQISNNRTLELQGLINDLQRERENLRQEIEKFQKQALEASNRIQESKNQCTQVVQERESLLVKIKVLEQDKARLQRLEDELNRAKSTLEAETRVKQRLECEKQQIQNDLNQWKTQYSRKEEAIRKIESEREKSEREKNSLRSEIERLQAEIKRIEERCRRKLEDSTRETQSQLETERSRYQREIDKLRQRPYGSHRETQTECEWTVDTSKLVFDGLRKKVTAMQLYECQLIDKTTLDKLLKGKKSVEEVASEIQPFLRGAGSIAGASASPKEKYSLVEAKRKKLISPESTVMLLEAQAATGGIIDPHRNEKLTVDSAIARDLIDFDDRQQIYAAEKAITGFDDPFSGKTVSVSEAIKKNLIDRETGMRLLEAQIASGGVVDPVNSVFLPKDVALARGLIDRDLYRSLNDPRDSQKNFVDPVTKKKVSYVQLKERCRIEPHTGLLLLSVQKRSMSFQGIRQPVTVTELVDSGILRPSTVNELESGQISYDEVGERIKDFLQGSSCIAGIYNETTKQKLGIYEAMKIGLVRPGTALELLEAQAATGFIVDPVSNLRLPVEEAYKRGLVGIEFKEKLLSAERAVTGYNDPETGNIISLFQAMNKELIEKGHGIRLLEAQIATGGIIDPKESHRLPVDIAYKRGYFNEELSEILSDPSDDTKGFFDPNTEENLTYLQLKERCIKDEETGLCLLPLKEKKKQVQTSQKNTLRKRRVVIVDPETNKEMSVQEAYKKGLIDYETFKELCEQECEWEEITITGSDGSTRVVLVDRKTGSQYDIQDAIDKGLVDRKFFDQYRSGSLSLTQFADMISLKNGVGTSSSMGSGVSDDVFSSSRHESVSKISTISSVRNLTIRSSSFSDTLEESSPIAAIFDTENLEKISITEGIERGIVDSITGQRLLEAQACTGGIIHPTTGQKLSLQDAVSQGVIDQDMATRLKPAQKAFIGFEGVKGKKKMSAAEAVKEKWLPYEAGQRFLEFQYLTGGLVDPEVHGRISTEEAIRKGFIDGRAAQRLQDTSSYAKILTCPKTKLKISYKDAINRSMVEDITGLRLLEAASVSSKGLPSPYNMSSAPGSRSGSRSGSRSGSRSGSRSGSRRGSFDATGNSSYSYSYSFSSSSIGH

SEQ ID NO: 10521 - protein, 1162 aa, Homo sapiens
MAHAGGGSGGSGAGGPAGRGLSGARWGRSGSAGHEKLPVHVEDALTYLDQVKIRFGSDPATYNGFLEIMKEFKSQSIDTPGVIRRVSQLFHEHPDLIVGFNAFLPLGYRIDIPKNGKLNIQSPLTSQENSHNHGDGAEDFKQQVPYKEDKPQVPLESDSVEFNNAISYVNKIKTRFLDHPEIYRSFLEILHTYQKEQLNTRGRPFRGMSEEEVFTEVANLFRGQEDLLSEFGQFLPEAKRSLFTGNGPCEMHSVQKNEHDKTPEHSRKRSRPSLLRPVSAPAKKKMKLRGTKDLSIAAVGKYGTLQEFSFFDKVRRVLKSQEVYENFLRCIALFNQELVSGSELLQLVSPFLGKFPELFAQFKSFLGVKELSFAPPMSDRSGDGISREIDYASCKRIGSSYRALPKTYQQPKCSGRTAICKELDHWTLLQGSWTDDYCMSKFKNTCWIPGYSAGVLNDTWVSFPSWSEDSTFVSSKKTPYEEQLHRCEDERFELDVVLETNLATIRVLESVQKKLSRMAPEDQEKFRLDDSLGGTSEVIQRRAIYRIYGDKAPEIIESLKKNPVTAVPVVLKRLKAKEEEWREAQQGFNKIWREQYEKAYLKSLDHQAVNFKQNDTKALRSKSLLNEIESVYDEHQEQHSEGRSAPSSEPHLIFVYEDRQILEDAAALISYYVKRQPAIQKEDQGTIHQLLHQFVPSLFFSQQLDLGASEESADEDRDSPQGQTTDPSERKKPAPGPHSSPPEEKGAFGDAPATEQPPLPPPAPHKPLDDVYSLFFANNNWYFFLRLHQTLCSRLLKIYRQAQKQLLEYRTEKEREKLLCEGRREKGSDPAMELRLKQPSEVELEEYYPAFLDMVRSLLEGSIDPTQYEDTLREMFTIHAYVGFTMDKLVQNIARQLHHLVSDDVCLKVVELYLNEKKRGAAGGNLSSRCVRAARETSYQWKAERCMADENCFKVMFLQRKGQVIMTIELLDTEEAQTEDPVEVQHLARYVEQYVGTEGASSSPTEGFLLKPVFLQRNLKKFRRRWQSEQARALRGEARSSWKRLVGVESACDVDCRFKLSTHKMVFIVNSEDYMYRRGTLCRAKQVQPLVLLRHHQHFEEWHSRWLEDNVTVEAASLVQDWLMGEEDEDMVPCKTLCETVHVHGLPVTRYRVQYSRRPASP

SEQ ID NO: 10522 - protein, 719 aa, Homo sapiens
MFVGVARHSGSQDEVSRGVEPLEAARAQPAKDRRAKGTPKSSKPGKKHRYLRLLPEALIRFGGFRKRKKAKSSVSKKPGEVDDSLEQPCGLGCLVSTCCECCNNIRCFMIFYCILLICQGVVFGLIDVSIGDFQKEYQLKTIEKLALEKSYDISSGLVAIFIAFYGDRKKVIWFVASSFLIGLGSLLCAFPSINEENKQSKVGIEDICEEIKVVSGCQSSGISFQSKYLSFFILGQTVQGIAGMPLYILGITFIDENVATHSAGIYLGIAECTSMIGYALGYVLGAPLVKVPENTTSATNTTVNNGSPEWLWTWWINFLFAAVVAWCTLIPLSCFPNNMPGSTRIKARKRKQLHFFDSRLKDLKLGTNIKDLCAALWILMKNPVLICLALSKATEYLVIIGASEFLPIYLENQFILTPTVATTLAGLVLIPGGALGQLLGGVIVSTLEMSCKALMRFIMVTSVISLILLVFIIFVRCNPVQFAGINEDYDGTGKLGNLTAPCNEKCRCSSSIYSSICGRDDIEYFSPCFAGCTYSKAQNQKKMYYNCSCIKEGLITADAEGDFIDARPGKCDAKCYKLPLFIAFIFSTLIFSGFSGVPIVLAMTRVVPDKLRSLALGVSYVILRIFGTIPGPSIFKMSGETSCILRDVNKCGHTGRCWIYNKTKMAFLLVGICFLCKLCTIIFTTIAFFIYKRRLNENTDFPDVTVKNPKVKKKEETDL

SEQ ID NO: 10523 - protein, 1432 aa, Homo sapiens
MQRGKPCRALPTLKCQTFCQRHGLMFEVVDLRWGIRNIEATDHLTTELCLEEVDRCWKTSIGPAFVALIGDQYGPCLIPSRIDEKEWEVLRDHLTARPSDLELVARYFQRDENAFPPTYVLQAPGTGEACEPEEATLTSVLRSGAQEARRLGLITQEQWQHYHRSVIEWEIERSLLSSEDREQGATVFLREIQDLHKHILEDCALRMVDRLADGCLDADAQNLLSSLKSHITDMHPGVLKTHRLPWSRDLVNPKNKTHACYLKELGEQFVVRANHQVLTRLRELDTAGQELAWLYQEIRHHLWQSSEVIQTFCGRQELLARLGQQLRHDDSKQHTPLVLFGPPGIGKTALMCKLAEQMPRLLGHKTVTVLRLLGTSQMSSDARGLLKSICFQVCLAYGLPLPPAQVLDAHTRVVQFFHTLLHTVSCRNFESLVLLLDAMDDLDSVRHARRVPWLPLNCPPRVHLILSACSGALGVLDTLQRVLLDPEAYWEVKPLSGNQGQQMIQLLLAAARRTLSPVHTDLLWASLPECGNPGRLRLAFEEARKWASFTVPVPLATTAEEATHQLCTRLEQTHGQLLVAHVLGYIVSSRHGLSEAELKDVLSLDDEVLQDVYRDWTPPSKELLRFPPLLWVRLRRDLGYYLARRPVDGFTLLAIAHRQLVEVVRERYLSGSERAKRHGVLADFFSGTWSQGTKKLITLPLVGKPLNLDRKVAPQPLWFSHTVANLRKLKELPYHLLHSGRLEELKQEVLGSMSWISCRGISGGIEDLLDDFDLCAPHLDSPEVGLVREALQLCRPAVELRGMERSLLYTELLARLHFFATSHPALVGQLCQQAQSWFQLCAHPVLVPLGGFLQPPGGPLRATLSGCHKGITAMAWGVEEKLLVIGTQDGIMAVWDMEEQHVIHMLTGHTGEVRCVKIFAKGTLANSASKDYTLHLWNLLSGQEKFTIWDGGSKNPAEPQIWNLHVDEAHKVVYSASGSKINAWNLETAEPVFHILGDASDPWMCMAVLASQATLLTVSRDGVVSLWSSATGKLQGKQHMSSIKEETPTCAVSVQKQGKLVTGFSNGSISLVSSKGDRLLEKLPDAVRFLVVSEDESLLAAGFGRSVRIFLADSRGFRRFMAMDLEHEDMVETAVFGTENNLIITGSLDALIQVWSLSEQGTLLDILEGVGAPVSLLARGGALVASASPQSSSFKVWDLSDAHRSRVPAPFLDRTGLTAVSHNGSYVYFPKIGDKNKVTIWDLAEGEEQDSLDTSSEIRCLEVAEQRKLLFTGLVSGVVLVFPLNSRQDVICIPPPEARKAINCMSLSKCEDRLAIAYDNIVLVLDITSGDPCPVIDGPRYTFYTQLPETLSSVAILTDYRVVYSMTNGDLFLYECATSKAFPLETHRSRVACVEVSHKEQLVVSGSEDALLCLWDLQARKWKFEMSYTAPC

SEQ ID NO: 10524 - protein, 293 aa, Homo sapiens
MNIRGAPDLGQPSDDPSSGGERERIRQRMKMVIGQLEGILRELKEVAKELREVVSQIDKLTSDFDFELEPDDWTTATVSSTSSSDKAGMGGPFDLGHLDFMTADILSDSWEFCSFLDVSTPSDSVDGPESTRPGAGPDYRLMNGGTPIPNGPRVETPDSSSEEAFGAGPTVKSQLPQRTPGTRERVRFSDKVLYHALCCDDEEGDGEQEVEEEEVGLPPEPAHTEAHAGPHKPSPAPYKSRRSPLTSRHSGSTLAPEQTRRVTRNSSTQTVSDKSTQTVLPYTATRQKARGKN

SEQ ID NO: 10525 - protein, 467 aa, Homo sapiens
MHSTTPISSLFSFTSPAVKRLLGWKQGDEEEKWAEKAVDSLVKKLKKKKGAMDELERALSCPGQPSKCVTIPRSLDGRLQVSHRKGLPHVIYCRVWRWPDLQSHHELKPLECCEFPFGSKQKEVCINPYHYRRVETPVLPPVLVPRHSEYNPQLSLLAKFRSASLHSEPLMPHNATYPDSFQQPPCSALPPSPSHAFSQSPCTASYPHSPGSPSEPESPYQHSVDTPPLPYHATEASETQSGQPVDATADRHVVLSIPNGDFRPVCYEEPQHWCSVAYYELNNRVGETFQASSRSVLIDGFTDPSNNRNRFCLGLLSNVNRNSTIENTRRHIGKGVHLYYVGGEVYAECVSDSSIFVQSRNCNYQHGFHPATVCKIPSGCSLKVFNNQLFAQLLAQSVHHGFEVVYELTKMCTIRMSFVKGWGAEYHRQDVTSTPCWIEIHLHGPLQWLDKVLTQMGSPHNPISSVS

SEQ ID NO: 10526 - protein, 315 aa, Homo sapiens
MMWENWTIVSEFVLVSFSALSTELQALLFLLFLTIYLVTLMGNVLIILVTIADSALQSPMYFFLRNLSFLEIGFNLVIVPKMLGTLIIQDTTISFLGCATQMYFFFFFGAAECCLLATMAYDRYVAICDPLHYPVIMGHISCAQLAAASWFSGFSVATVQTTWIFSFPFCGPNRVNHFFCDSPPVIALVCADTSVFELEALTATVLFILFPFLLILGSYVRILSTIFRMPSAEGKHQAFSTCSAHLLVVSLFYSTAILTYFRPQSSASSESKKLLSLSSTVVTPMLNPIIYSSRNKEVKAALKRLIHRTLGSQKL

SEQ ID NO: 10527 - protein, 579 aa, Homo sapiens
MWRVLFLLSGLGGLRMDSNFDSLPVQITVPEKIRSIIKEGIESQASYKIVIEGKPYTVNLMQKNFLPHNFRVYSYSGTGIMKPLDQDFQNFCHYQGYIEGYPKSVVMVSTCTGLRGVLQFENVSYGIEPLESSVGFEHVIYQVKHKKADVSLYNEKDIESRDLSFKLQSVEHPRTISLESLAVILAQLLSLSMGITYDDINKCQCSGAVCIMNPEAIHFSGVKIFSNCSFEDFAHFISKQKSQCLHNQPRLDPFFKQQAVCGNAKLEAGEECDCGTEQDCALIGETCCDIATCRFKAGSNCAEGPCCENCLFMSKERMCRPSFEECDLPEYCNGSSASCPENHYVQTGHPCGLNQWICIDGVCMSGDKQCTDTFGKEVEFGPSECYSHLNSKTDVSGNCGISDSGYTQCEADGHLCIAVEFASDHADSQKMWIKDGTSCGSNKVCRNQRCVSSSYLGYDCTTDKCNDRGVCNNKKHCHCSASYLPPDCSVQSDLWPGGSIDSGNFPPVAIPARLPERRYIENIYHSKPMRWPFFLFIPFFIIFCVLIAIMVKVNFQRKKWRTEDYSSDEQPESESEPKG

SEQ ID NO: 10528 - protein, 980 aa, Homo sapiens
MIMASAAKEFKMDNFSPKAGTSKLQQTVPADASPDSKCPICLDRFDNVSYLDRCLHKFCFRCVQEWSKNKAECPLCKQPFDSIFHSVRAEDDFKEYVLRPSYNGSFVTPDRRFRYRTTLTRERNASVYSPSGPVNRRTTTPPDSGVLFEGLGISTRPRDVEIPQFMRQIAVRRPTTADERSLRKIQEQDIINFRRTLYRAGARVRNIEDGGRYRDISAEFFRRNPACLHRLVPWLKRELTVLFGAHGSLVNIVQHIIMSNVTRYDLESQAFVSDLRPFLLNRTEHFIHEFISFARSPFNMAAFDQHANYDCPAPSYEEGSHSDSSVITISPDEAETQELDINVATVSQAPWDDETPGPSYSSSEQVHVTMSSLLNTSDSSDEELVTGGATSQIQGVQTNDDLNNDSDDSSDNCVIVGFVKPLAERTPELVELSSDSEDLGSYEKMETVKTQEQEQSYSSGDSDVSRCSSPHSVLGKDEQINKGHCDSSTRIKSKKEEKRSTSLSSPRNLNSSVRGDRVYSPYNHRHRKRGRSRSSDSRSQSRSGHDQKNHRKHHGKKRMKSKRSRSRESSRPRGRRDKKRSRTRDSSWSRRSQTLSLSSESTSRSRSRSSDHGKRRSRSRNRDRYYLRNNYGSRYKWEYTYYSRNKDRDGYESSYRRRTLSRAHYSRQSSSPEFRVQSFSERTNARKKNNHSERKYYYYERHRSRSLSSNRSRTASTGTDRVRNEKPGGKRKYKTRHLEGTNEVAQPSREFASKAKDSHYQKSSSKLDGNYKNESDTFSDSRSSDRETKHKRRKRKTRSLSVEIVYEGKATDTTKHHKKKKKKHKKKHKKHHGDNASRSPVVITIDSDSDKDSEVKEDTECDNSGPQDPLQNEFLAPSLEPFETKDVVTIEAEFGVLDKECDIATLSNNLNNANKTVDNIPPLAASVEQTLDVREESTFVSDLENQPSNIVSLQTEPSRQLPSPRTSLMSVCLGRDCDMS

SEQ ID NO: 10529 - protein, 812 aa, Homo sapiens
MGWRPRRARGTPLLLLLLLLLLWPVPGAGVLQGHIPGQPVTPHWVLDGQPWRTVSLEEPVSKPDMGLVALEAEGQELLLELEKNHRLLAPGYIETHYGPDGQPVVLAPNHTDHCHYQGRVRGFPDSWVVLCTCSGMSGLITLSRNASYYLRPWPPRGSKDFSTHEIFRMEQLLTWKGTCGHRDPGNKAGMTSLPGGPQSRGRREARRTRKYLELYIVADHTLFLTRHRNLNHTKQRLLEVANYVDQLLRTLDIQVALTGLEVWTERDRSRVTQDANATLWAFLQWRRGLWAQRPHDSAQLLTGRAFQGATVGLAPVEGMCRAESSGGVSTDHSELPIGAAATMAHEIGHSLGLSHDPDGCCVEAAAESGGCVMAAATGHPFPRVFSACSRRQLRAFFRKGGGACLSNAPDPGLPVPPALCGNGFVEAGEECDCGPGQECRDLCCFAHNCSLRPGAQCAHGDCCVRCLLKPAGALCRQAMGDCDLPEFCTGTSSHCPPDVYLLDGSPCARGSGYCWDGACPTLEQQCQQLWGPGSHPAPEACFQVVNSAGDAHGNCGQDSEGHFLPCAGRDALCGKLQCQGGKPSLLAPHMVPVDSTVHLDGQEVTCRGALALPSAQLDLLGLGLVEPGTQCGPRMVCQSRRCRKNAFQELQRCLTACHSHGVCNSNHNCHCAPGWAPPFCDKPGFGGSMDSGPVQAENHDTFLLAMLLSVLLPLLPGAGLAWCCYRLPGAHLQRCSWGCRRDPACSGPKDGPHRDHPLGGVHPMELGPTATGQPWPLDPENSHEPSSHPEKPLPAVSPDPQDQVQMPRSCLW

SEQ ID NO: 10530 - protein, 543 aa, Homo sapiens
MSEGESQTVLSSGSDPKVESSSSAPGLTSVSPPVTSTTSAASPEEEEESEDESEILEESPCGRWQKRREEVNQRNVPGIDSAYLAMDTEEGVEVVWNEVQFSERKNYKLQEEKVRAVFDNLIQLEHLNIVKFHKYWADIKENKARVIFITEYMSSGSLKQFLKKTKKNHKTMNEKAWKRWCTQILSALSYLHSCDPPIIHGNLTCDTIFIQHNGLIKIGSVFHRIFANVAPDTINNHVKTCREEQKNLHFFAPEYGEVTNVTTAVDIYSFGMCALEMAVLEIQGNGESSYVPQEAISSAIQLLEDPLQREFIQKCLQSEPARRPTARELLFHPALFEVPSLKLLAAHCIVGHQHMIPENALEEITKNMDTSAVLAEIPAGPGREPVQTLYSQSPALELDKFLEDVRNGIYPLTAFGLPRPQQPQQEEVTSPVVPPSVKTPTPEPAEVETRKVVLMQCNIESVEEGVKHHLTLLLKLEDKLNRHLSCDLMPNENIPELAAELVQLGFISEADQSRLTSLLEETLNKFNFARNSTLNSAAVTVSS

SEQ ID NO: 10531 - protein, 715 aa, Homo sapiens
MFLLLALLTELGRLQAHEGSEGIFLHVTVPRKIKSNDSEVSERKMIYIITIDGQPYTLHLGKQSFLPQNFLVYTYNETGSLHSVSPYFMMHCHYQGYAAEFPNSFVTLSICSGLRGFLQFENISYGIEPVESSARFEHIIYQMKNNDPNVSILAVNYSHIWQKDQPYKVPLNSQIKNLSKLLPQYLEIYIIVEKALMFTQFKLTVILSSLELWSNENQISTSGDADDILQRFLAWKRDYLILRPHDIAYLLVYRKHPKYVGATFPGTVCNKSYDAGIAMYPDAIGLEGFSVIIAQLLGLNVGLTYDDITQCFCLRATCIMNHEAVSASGRKIFSNCSMHDYRYFVSKFETKCLQKLSNLQPLHQNQPVCGNGILESNEECDCGNKNECQFKKCCDYNTCKLKGSVKCGSGPCCTSKCELSIAGTPCRKSIDPECDFTEYCNGTSSNCVPDTYALNGRLCKLGTAYCYNGQCQTTDNQCAKIFGKGAQGAPFACFKEVNSLHERSENCGFKNSQPLPCERKDVLCGKLACVQPHKNANKSDAQSTVYSYIQDHVCVSIATGSSMRSDGTDNAYVADGTMCGPEMYCVNKTCRKVHLMGYNCNATTKCKGKGICNNFGNCQCFPGHRPPDCKFQFGSPGGSIDDGNFQKSGDFYTEKGYNTHWNNWFILSFCIFLPFFIVFTTVIFKRNEISKSCNRENAEYNRNSSVVSESDDVGH

SEQ ID NO: 10532 - protein, 1017 aa, Homo sapiens
MVFSVRQCGHVGRTEEVLLTFKIFLVIICLHVVLVTSLEEDTDNSSLSPPPAKLSVVSFAPSSNGTPEVETTSLNDVTLSLLPSNETEKTKITIVKTFNASGVKPQRNICNLSSICNDSAFFRGEIMFQYDKESTVPQNQHITNGTLTGVLSLSELKRSELNKTLQTLSETYFIMCATAEAQSTLNCTFTIKLNNTMNACAVIAALERVKIRPMEHCCCSVRIPCPSSPEELEKLQCDLQDPIVCLADHPRGPPFSSSQSIPVVPRATVLSQVPKATSFAEPPDYSPVTHNVPSPIGEIQPLSPQPSAPIASSPAIDMPPQSETISSPMPQTHVSGTPPPVKASFSSPTVSAPANVNTTSAPPVQTDIVNTSSISDLENQVLQMEKALSLGSLEPNLAGEMINQVSRLLHSPPDMLAPLAQRLLKVVDDIGLQLNFSNTTISLTSPSLALAVIRVNASSFNTTTFVAQDPANLQVSLETQAPENSIGTITLPSSLMNNLPAHDMELASRVQFNFFETPALFQDPSLENLSLISYVISSSVANLTVRNLTRNVTVTLKHINPSQDELTVRCVFWDLGRNGGRGGWSDNGCSVKDRRLNETICTCSHLTSFGVLLDLSRTSVLPAQMMALTFITYIGCGLSSIFLSVTLVTYIAFEKIRRDYPSKILIQLCAALLLLNLVFLLDSWIALYKMQGLCISVAVFLHYFLLVSFTWMGLEAFHMYLALVKVFNTYIRKYILKFCIVGWGVPAVVVTIILTISPDNYGLGSYGKFPNGSPDDFCWINNNAVFYITVVGYFCVIFLLNVSMFIVVLVQLCRIKKKKQLGAQRKTSIQDLRSIAGLTFLLGITWGFAFFAWGPVNVTFMYLFAIFNTLQGFFIFIFYCVAKENVRKQWRRYLCCGKLRLAENSDWSKTATNGLKKQTVNQGVSSSSNSLQSSSNSTNSTTLLVNNDCSVHASGNGNASTERNGVSFSVQNGDVCLHDFTGKQHMFNEKEDSCNGKGRMALRRTSKRGSLHFIEQM

SEQ ID NO: 10533 - protein, 966 aa, Homo sapiens
MVFSVRQCGHVGRTEEVLLTFKIFLVIICLHVVLVTSLEEDTDNSSLSPPPAKLSVVSFAPSSNGTPEVETTSLNDVTLSLLPSNETEKTKITIVKTFNASGVKPQRNICNLSSICNDSAFFRGEIMFQYDKESTVPQNQHITNGTLTGVLSLSELKRSELNKTLQTLSETYFIMCATAEAQSTLNCTFTIKLNNTMNACAVIAALERVKIRPMEHCCCSVRIPCPSSPEELEKLQCDLQDPIVCLADHPRGPPFSSSQSIPVVPRATVLSQVPKATSFAEPPDYSPVTHNVPSPIGEIQPLSPQPSAPIASSPAIDMPPQSETISSPMPQTHVSGTPPPVKASFSSPTVSAPANVNTTSAPPVQTDIVNTSSISDLENQVLQMEKALSLGSLEPNLAGEMINQVSRLLHSPPDMLAPLAQRLLKVVDDIGLQLNFSNTTISLTSPSLALAVIRVNASSFNTTTFVAQDPANLQVSLETQAPENSIGTITLPSSLMNNLPAHDMELASRVQFNFFETPALFQDPSLENLSLISYVISSSVANLTVRNLTRNVTVTLKHINPSQDELTVRCVFWDLGRNGGRGGWSDNGCSVKDRRLNETICTCSHLTSFGVLLDLSRTSVLPAQMMALTFITYIGCGLSSIFLSVTLVTYIAFEKIRRDYPSKILIQLCAALLLLNLVFLLDSWIALYKMQGLCISVAVFLHYFLLVSFTWMGLEAFHMYLALVKVFNTYIRKYILKFCIVGWGVPAVVVTIILTISPDNYGLGSYGKFPNGSPDDFCWINNNAVFYITVVGYFCVIFLLNVSMFIVVLVQLCRIKKKKQLGAQRKTSIQDLRSIAGLTFLLGITWGFAFFAWGPVNVTFMYLFAIFNTLQGFFIFIFYCVAKENVRKQWRRYLCCGKLRLAENSGNASTERNGVSFSVQNGDVCLHDFTGKQHMFNEKEDSCNGKGRMALRRTSKRGSLHFIEQM

SEQ ID NO: 10534 - protein, 993 aa, Homo sapiens
MVFSVRQCGHVGRTEEVLLTFKIFLVIICLHVVLVTSLEEDTDNSSLSPPPDVTLSLLPSNETEKTKITIVKTFNASGVKPQRNICNLSSICNDSAFFRGEIMFQYDKESTVPQNQHITNGTLTGVLSLSELKRSELNKTLQTLSETYFIMCATAEAQSTLNCTFTIKLNNTMNACAVIAALERVKIRPMEHCCCSVRIPCPSSPEELEKLQCDLQDPIVCLADHPRGPPFSSSQSIPVVPRATVLSQVPKATSFAEPPDYSPVTHNVPSPIGEIQPLSPQPSAPIASSPAIDMPPQSETISSPMPQTHVSGTPPPVKASFSSPTVSAPANVNTTSAPPVQTDIVNTSSISDLENQVLQMEKALSLGSLEPNLAGEMINQVSRLLHSPPDMLAPLAQRLLKVVDDIGLQLNFSNTTISLTSPSLALAVIRVNASSFNTTTFVAQDPANLQVSLETQAPENSIGTITLPSSLMNNLPAHDMELASRVQFNFFETPALFQDPSLENLSLISYVISSSVANLTVRNLTRNVTVTLKHINPSQDELTVRCVFWDLGRNGGRGGWSDNGCSVKDRRLNETICTCSHLTSFGVLLDLSRTSVLPAQMMALTFITYIGCGLSSIFLSVTLVTYIAFEKIRRDYPSKILIQLCAALLLLNLVFLLDSWIALYKMQGLCISVAVFLHYFLLVSFTWMGLEAFHMYLALVKVFNTYIRKYILKFCIVGWGVPAVVVTIILTISPDNYGLGSYGKFPNGSPDDFCWINNNAVFYITVVGYFCVIFLLNVSMFIVVLVQLCRIKKKKQLGAQRKTSIQDLRSIAGLTFLLGITWGFAFFAWGPVNVTFMYLFAIFNTLQGFFIFIFYCVAKENVRKQWRRYLCCGKLRLAENSDWSKTATNGLKKQTVNQGVSSSSNSLQSSSNSTNSTTLLVNNDCSVHASGNGNASTERNGVSFSVQNGDVCLHDFTGKQHMFNEKEDSCNGKGRMALRRTSKRGSLHFIEQM

SEQ ID NO: 10535 - protein, 1001 aa, Homo sapiens
MVFSVRQCGHVGRTEEVLLTFKIFLVIICLHVVLVTSLEEDTDNSSLSPPPEVETTSLNDVTLSLLPSNETEKTKITIVKTFNASGVKPQRNICNLSSICNDSAFFRGEIMFQYDKESTVPQNQHITNGTLTGVLSLSELKRSELNKTLQTLSETYFIMCATAEAQSTLNCTFTIKLNNTMNACAVIAALERVKIRPMEHCCCSVRIPCPSSPEELEKLQCDLQDPIVCLADHPRGPPFSSSQSIPVVPRATVLSQVPKATSFAEPPDYSPVTHNVPSPIGEIQPLSPQPSAPIASSPAIDMPPQSETISSPMPQTHVSGTPPPVKASFSSPTVSAPANVNTTSAPPVQTDIVNTSSISDLENQVLQMEKALSLGSLEPNLAGEMINQVSRLLHSPPDMLAPLAQRLLKVVDDIGLQLNFSNTTISLTSPSLALAVIRVNASSFNTTTFVAQDPANLQVSLETQAPENSIGTITLPSSLMNNLPAHDMELASRVQFNFFETPALFQDPSLENLSLISYVISSSVANLTVRNLTRNVTVTLKHINPSQDELTVRCVFWDLGRNGGRGGWSDNGCSVKDRRLNETICTCSHLTSFGVLLDLSRTSVLPAQMMALTFITYIGCGLSSIFLSVTLVTYIAFEKIRRDYPSKILIQLCAALLLLNLVFLLDSWIALYKMQGLCISVAVFLHYFLLVSFTWMGLEAFHMYLALVKVFNTYIRKYILKFCIVGWGVPAVVVTIILTISPDNYGLGSYGKFPNGSPDDFCWINNNAVFYITVVGYFCVIFLLNVSMFIVVLVQLCRIKKKKQLGAQRKTSIQDLRSIAGLTFLLGITWGFAFFAWGPVNVTFMYLFAIFNTLQGFFIFIFYCVAKENVRKQWRRYLCCGKLRLAENSDWSKTATNGLKKQTVNQGVSSSSNSLQSSSNSTNSTTLLVNNDCSVHASGNGNASTERNGVSFSVQNGDVCLHDFTGKQHMFNEKEDSCNGKGRMALRRTSKRGSLHFIEQM

SEQ ID NO: 10536 - protein, 425 aa, Homo sapiens
MASSIICQEHCQISGQAKIDILLVGDVTVGYLADTVQKLFANIAEVTITISDTKEAAALLDDCIFNMVLLKVPSSLSAEELEAIKLIRFGKKKNTHSLFVFIIPENFKGCISGHGMDIALTEPLTMEKMSNVVKYWTTCPSNTVKTENATGPEELGLPLQRSYSEHLGYFPTDLFACSESLRNGNGLELNASLSEFEKNKKISLLHSSKEKLRRERIKYCCEQLRTLLPYVKGRKNDAASVLEATVDYVKYIREKISPAVMAQITEALQSNMRFCKKQQTPIELSLPGTVMAQRENSVMSTYSPERGLQFLTNTCWNGCSTPDAESSLDEAVRVPSSSASENAIGDPYKTHISSAALSLNSLHTVRYYSKVTPSYDATAVTNQNISIHLPSAMPPVSKLLPRHCTSGLGQTCTTHPNCLQQFWAY

SEQ ID NO: 10537 - protein, 363 aa, Homo sapiens
MSFGRDMELEHFDERDKAQRYSRGSRVNGLPSPTHSAHCSFYRTRTLQTLSSEKKAKKVRFYRNGDRYFKGIVYAISPDRFRSFEALLADLTRTLSDNVNLPQGVRTIYTIDGLKKISSLDQLVEGESYVCGSIEPFKKLEYTKNVNPNWSVNVKTTSASRAVSSLATAKGSPSEVRENKDFIRPKLVTIIRSGVKPRKAVRILLNKKTAHSFEQVLTDITDAIKLDSGVVKRLYTLDGKQVMCLQDFFGDDDIFIACGPEKFRYQDDFLLDESECRVVKSTSYTKIASSSRRSTTKSPGPSRRSKSPASTSSVNGTPGSQLSTPRSGKSPSPSPTSPGSLRKQRDLYRPLSSDDLDSVGDSV

SEQ ID NO: 10538 - protein, 433 aa, Homo sapiens
MLELIEVNGTPGSQLSTPRSGKSPSPSPTSPGSLRKQRSSQHGGSSTSLASTKVCSSMDENDGPGEEVSEEGFQIPATITERYKVGRTIGDGNFAVVKECVERSTAREYALKIIKKSKCRGKEHMIQNEVSILRRVKHPNIVLLIEEMDVPTELYLVMELVKGGDLFDAITSTNKYTERDASGMLYNLASAIKYLHSLNIVHRDIKPENLLVYEHQDGSKSLKLGDFGLATIVDGPLYTVCGTPTYVAPEIIAETGYGLKVDIWAAGVITYILLCGFPPFRGSGDDQEVLFDQILMGQVDFPSPYWDNVSDSAKELITMMLLVDVDQRFSAVQVLEHPWVNDDGLPENEHQLSVAGKIKKHFNTGPKPNSTAAGVSVIATTALDKERQVFRRRRNQDVRSRYKAQPAPPELNSESEDYSPSSSETVRSPNSPF

SEQ ID NO: 10539 - protein, 1285 aa, Homo sapiens
MERRWDLDLTYVTERILAAAFPARPDEQRHRGHLRELAHVLQSKHRDKYLLFNLSEKRHDLTRLNPKVQDFGWPELHAPPLDKLCSICKAMETWLSADPQHVVVLYCKGNKGKLGVIVSAYMHYSKISAGADQALATLTMRKFCEDKVATELQPSQRRYISYFSGLLSGSIRMNSSPLFLHYVLIPMLPAFEPGTGFQPFLKIYQSMQLVYTSGVYHIAGPGPQQLCISLEPALLLKGDVMVTCYHKGGRGTDRTLVFRVQFHTCTIHGPQLTFPKDQLDEAWTDERFPFQASVEFVFSSSPEKIKGSTPRNDPSVSVDYNTTEPAVRWDSYENFNQHHEDSVDGSLTHTRGPLDGSPYAQVQRPPRQTPPAPSPEPPPPPMLSVSSDSGHSSTLTTEPAAESPGRPPPTAAERQELDRLLGGCGVASGGRGAGRETAILDDEEQPTVGGGPHLGVYPGHRPGLSRHCSCRQGYREPCGVPNGGYYRPEGTLERRRLAYGGYEGSPQGYAEASMEKRRLCRSLSEGLYPYPPEMGKPATGDFGYRAPGYREVVILEDPGLPALYPCPACEEKLALPTAALYGLRLEREAGEGWASEAGKPLLHPVRPGHPLPLLLPACGHHHAPMPDYSCLKPPKAGEEGHEGCSYTMCPEGRYGHPGYPALVTYSYGGAVPSYCPAYGRVPHSCGSPGEGRGYPSPGAHSPRAGSISPGSPPYPQSRKLSYEIPTEEGGDRYPLPGHLASAGPLASAESLEPVSWREGPSGHSTLPRSPRDAPCSASSELSGPSTPLHTSSPVQGKESTRRQDTRSPTSAPTQRLSPGEALPPVSQAGTGKAPELPSGSGPEPLAPSPVSPTFPPSSPSDWPQERSPGGHSDGASPRSPVPTTLPGLRHAPWQGPRGPPDSPDGSPLTPVPSQMPWLVASPEPPQSSPTPAFPLAASYDTNGLSQPPLPEKRHLPGPGQQPGPWGPEQASSPARGISHHVTFAPLLSDNVPQTPEPPTQESQSNVKFVQDTSKFWYKPHLSRDQAIALLKDKDPGAFLIRDSHSFQGAYGLALKVATPPPSAQPWKGDPVEQLVRHFLIETGPKGVKIKGCPSEPYFGSLSALVSQHSISPISLPCCLRIPSKDPLEETPEAPVPTNMSTAADLLRQGAACSVLYLTSVETESLTGPQAVARASSAALSCSPRPTPAVVHFKVSAQGITLTDNQRKLFFRRHYPVNSITFSSTDPQDRRWTNPDGTTSKIFGFVAKKPGSPWENVCHLFAELDPDQPAGAIVTFITKVLLGQRK

SEQ ID NO: 10540 - protein, 787 aa, Homo sapiens
MFRLWLLLAGLCGLLASRPGFQNSLLQIVIPEKIQTNTNDSSEIEYEQISYIIPIDEKLYTVHLKQRYFLADNFMIYLYNQGSMNTYSSDIQTQCYYQGNIEGYPDSMVTLSTCSGLRGILQFENVSYGIEPLESAVEFQHVLYKLKNEDNDIAIFIDRSLKEQPMDDNIFISEKSEPAVPDLFPLYLEMHIVVDKTLYDYWGSDSMIVTNKVIEIVGLANSMFTQFKVTIVLSSLELWSDENKISTVGEADELLQKFLEWKQSYLNLRPHDIAYLLIYMDYPRYLGAVFPGTMCITRYSAGVALYPKEITLEAFAVIVTQMLALSLGISYDDPKKCQCSESTCIMNPEVVQSNGVKTFSSCSLRSFQNFISNVGVKCLQNKPQMQKKSPKPVCGNGRLEGNEICDCGTEAQCGPASCCDFRTCVLKDGAKCYKGLCCKDCQILQSGVECRPKAHPECDIAENCNGTSPECGPDITLINGLSCKNNKFICYDGDCHDLDARCESVFGKGSRNAPFACYEEIQSQSDRFGNCGRDRNNKYVFCGWRNLICGRLVCTYPTRKPFHQENGDVIYAFVRDSVCITVDYKLPRTVPDPLAVKNGSQCDIGRVCVNRECVESRIIKASAHVCSQQCSGHGVCDSRNKCHCSPGYKPPNCQIRSKGFSIFPEEDMGSIMERASGKTENTWLLGFLIALPILIVTTAIVLARKQLKKWFAKEEEFPSSESKSEGSTQTYASQSSSEGSTQTYASQTRSESSSQADTSKSKSEDSAEAYTSRSKSQDSTQTQSSSN

SEQ ID NO: 10541 - protein, 655 aa, Homo sapiens
MGSGARFPSGTLRVRWLLLLGLVGPVLGAARPGFQQTSHLSSYEIITPWRLTRERREAPRPYSKQVSYVIQAEGKEHIIHLERNKDLLPEDFVVYTYNKEGTLITDHPNIQNHCHYRGYVEGVHNSSIALSDCFGLRGLLHLENASYGIEPLQNSSHFEHIIYRMDDVYKEPLKCGVSNKDIEKETAKDEEEEPPSMTQLLRRRRAVLPQTRYVELFIVVDKERYDMMGRNQTAVREEMILLANYLDSMYIMLNIRIVLVGLEIWTNGNLINIVGGAGDVLGNFVQWREKFLITRRRHDSAQLVLKKGFGGTAGMAFVGTVCSRSHAGGINVFGQITVETFASIVAHELGHNLGMNHDDGRDCSCGAKSCIMNSGASGSRNFSSCSAEDFEKLTLNKGGNCLLNIPKPDEAYSAPSCGNKLVDAGEECDCGTPKECELDPCCEGSTCKLKSFAECAYGDCCKDCRFLPGGTLCRGKTSECDVPEYCNGSSQFCQPDVFIQNGYPCQNNKAYCYNGMCQYYDAQCQVIFGSKAKAAPKDCFIEVNSKGDRFGNCGFSGNEYKKCATGNALCGKLQCENVQEIPVFGIVPAIIQTPSRGTKCWGVDFQLGSDVPDPGMVNEGTKCGAGKICRNFQCVDASVLNYDCDVQKKCHGHGK

SEQ ID NO: 10542 - protein, 817 aa, Homo sapiens
MNKDYQKFWSSPSDPVHFEVDTSHEKVESMSESDTMNVSNLSQGVMLSHSPICMETTGTTCDLPQNEIKNFERENEYESTLCEDAYGTLDNLLNDNNIENYSTNALIQPVDTISISSLRQFETVCKFHWVEAFDDEMTEKPEFQSQVYNYAKDNNIKQDSFKEENPMETSVSANTDQLGNEYFRQPPPRSPPLIHCSGEMLKFTEKSLAKSIAKESALNPSQPPSFLCKTAVPSKEIQNYGEIPEMSVSYEKEVTAEGVERPEIVSTWSSAGISWRSEACRENCEMPDWEQSAESLQPVQEDMALNEVLQKLKHTNRKQEVRIQELQCSNLYLEKRVKELQMKITKQQVFIDVINKLKENVEELIEDKYKIILEKNDTKKTLQNLEEVLANTQKHLQESRNDKEMLQLQFKKIKANYVCLQERYMTEMQQKNKSVSQYLEMDKTLSKKEEEVERLQQLKKELEKATASALDLLKREKEAQEQEFLSLQEEFQKLEKENLEERQKLKSRLEKLLTQVRNLQFMSENERTKNIKLQQQINEVKNENAKLKQQVARSEEQNYVPKFETAQLKDQLEEVLKSDITKDTKTTHSNLLPDCSPCEERLNPADIKRASQLASKMHSLLALMVGLLTCQDIINSDAEHFKESEKLLKHKDRITTFRELIAKEKAFQDHAIKVIDCDSDEAKSIRDVPTLLGAKLDKYHSLNEELDFLITKLGHLLESKENHCNRLIEENDKYQRHLGNLIKKVTSYEEIIECADQRLAISHSQIAHLEERNKHLEDLIRKPREKARKPRSKSLENHPKSMTMMPALFKENRNDLD

SEQ ID NO: 10543 - protein, 524 aa, Homo sapiens
MFVNSNGYNLGVREDEVVVNDVDLPPWAKKPEDFVRINRMALESEFVSCQLHQWIDLIFGYKQRGPEAVRALNVFHYLTYEGSVNLDSITDPVLREIPEAYFIRDPHTFLLTKDFIKAMEAQIQNFGQTPSQLLIEPHPPRSSAMHLCFLPQSPLMFKDQMQQDVIMVLKFPSNSPVTHVAANTLPHLTIPAVVTVTCSRLFAVNRWHNTVGLRGAPGYSLDQAHHLPIEMDPLIANNSGVNKRQITDLVDQSIQINAHCFVVTADNRYILICGFWDKSFRVYSTETGKLTQIVFGHWDVVTCLARSESYIGGDCYIVSGSRDATLLLWYWSGRHHIIGDNPNSSDYPAPRAVLTGHDHEVVCVSVCAELGLVISGAKEGPCLVHTITGDLLRALEGPENCLFPRLISVSSEGHCIIYYERGRFSNFSINGKLLAQMEINDSTRAILLSSDGQNLVTGGDNGVVEVWQACDFKQLYIYPGCDAGIRAMDLSHDQRTLITGMASGSIVAFNIDFNRWHYEHQNRY

SEQ ID NO: 10544 - protein, 575 aa, Homo sapiens
MSQDTKVKTTESSPPAPSKARKLLPVLDPSGDYYYWWLNTMVFPVMYNLIILVCRACFPDLQHGYLVAWLVLDYTSDLLYLLDMVVRFHTGFLEQGILVVDKGRISSRYVRTWSFFLDLASLMPTDVVYVRLGPHTPTLRLNRFLRAPRLFEAFDRTETRTAYPNAFRIAKLMLYIFVVIHWNSCLYFALSRYLGFGRDAWVYPDPAQPGFERLRRQYLYSFYFSTLILTTVGDTPPPAREEEYLFMVGDFLLAVMGFATIMGSMSSVIYNMNTADAAFYPDHALVKKYMKLQHVNRKLERRVIDWYQHLQINKKMTNEVAILQHLPERLRAEVAVSVHLSTLSRVQIFQNCEASLLEELVLKLQPQTYSPGEYVCRKGDIGQEMYIIREGQLAVVADDGITQYAVLGAGLYFGEISIINIKGNMSGNRRTANIKSLGYSDLFCLSKEDLREVLSEYPQAQTIMEEKGREILLKMNKLDVNAEAAEIALQEATESRLRGLDQQLDDLQTKFARLLAELESSALKIAYRIERLEWQTREWPMPEDLAEADDEGEPEEGTSKDEEGRASQEGPPGPE

SEQ ID NO: 10545 - protein, 1742 aa, Homo sapiens
MTSSSPAGLEGSDLSSINTMMSAVMSVGKVTENGGSPQGIKSPSKPPGPNRIGRRNQETKEEKSSYNCPLCEKICTTQHQLTMHIRQHNTDTGGADHSCSICGKSLSSASSLDRHMLVHSGERPYKCTVCGQSFTTNGNMHRHMKIHEKDPNSATATAPPSPLKRRRLSSKRKLSHDAESEREDPAPAKKMVEDGQSGDLEKKADEVFHCPVCFKEFVCKYGLETHMETHSDNPLRCDICCVTFRTHRGLLRHNALVHKQLPRDAMGRPFIQNNPSIPAGFHDLGFTDFSCRKFPRISQAWCETNLRRCISEQHRFVCDTCDKAFPMLCSLALHKQTHVAADQGQEKPQATPLPGDALDQKGFLALLGLQHTKDVRPAPAEEPLPDDNQAIQLQTLKCQLPQDPGCTNLLSLSPFEAASLGGSLTVLPATKDSIKHLSLQPFQKGFIIQPDSSIVVKPISGESAIELADIQQILKMAASAPPQISLPPFSKAPAAPLQAIFKHMPPLKPKPLVTPRTVVATSTPPPLINAQQASPGCISPSLPPPPLKLLKGSVEAASNAHLLQSKSGTQPHAATRLSLQQPRAELPGQPEMKTQLEQDSIIEALLPLSMEAKIKQEITEGELKAFMTAPGGKKTPAMRKVLYPCRFCNQVFAFSGVLRAHVRSHLGISPYQCNICDYIAADKAALIRHLRTHSGERPYICKICHYPFTVKANCERHLRKKHLKATRKDIEKNIEYVSSSAAELVDAFCAPDTVCRLCGEDLKHYRALRIHMRTHCGRGLGGGHKGRKPFECKECSAAFAAKRNCIHHILKQHLHVPEQDIESYVLAADGLGPAEAPAAEASGRGEDSGCAALGDCKPLTAFLEPQNGFLHRGPTQPPPPHVSIKLEPASSFAVDFNEPLDFSQKGLALVQVKQENISFLSPSSLVPYDCSMEPIDLSIPKNFRKGDKDLATPSEAKKPEEEAGSSEQPSPCPAPGPSLPVTLGPSGILESPMAPAPAATPEPPAQPLQGPVQLAVPIYSSALVSSPPLVGSSALLSGTALLRPLRPKPPLLLPKPPVTEELPPLASIAQIISSVSSAPTLLKTKVADPGPASTGSNTTASDSLGGSVPKAATTATPAATTSPKESSEPPAPASSPEAASPTEQGPAGTSKKRGRKRGMRSRPRANSGGVDLDSSGEFASIEKMLATTDTNKFSPFLQTAEDNTQDEVAGAPADHHGPSDEEQGSPPEDKLLRAKRNSYTNCLQKITCPHCPRVFPWASSLQRHMLTHTGQKPFPCQKCDAFFSTKSNCERHQLRKHGVTTCSLRRNGLIPQSKESDVGSHDSTDSQSDAETAAAAGEVLDLTSRDREQPSEGATELRQVAGDAPVEQATAETASPVHREEHGRGESHEPEEEHGTEESTGDADGAEEDASSNQSLDLDFATKLMDFKLAEGDGEAGAGGAASQEQKLACDTCGKSFKFLGTLSRHRKAHGRQEPKDEKGDGASTAEEGPQPAPEQEEKPPETPAEVVESAPGAGEAPAEKLAEETEGPSDGESAAEKRSSEKSDDDKKPKTDSPKSVASKADKRKKVCSVCNKRFWSLQDLTRHMRSHTGERPYKCQTCERTFTLKHSLVRHQRIHQKARHAKHHGKDSDKEERGEEDSENESTHSGNNAVSENEAELAPNASNHMAVTRSRKEGLASATKDCSHREEKVTAGWPSEPGQGDLNPESPAALGQDLLEPRSKRPAHPILATADGASQLVGME

SEQ ID NO: 10546 - protein, 2943 aa, Homo sapiens
MASEKPGPGPGLEPQPVGLIAVGAAGGGGGGSGGGGTGGSGMGELRGASGSGSVMLPAGMINPSVPIRNIRMKFAVLIGLIQVGEVSNRDIVETVLNLLVGGEFDLEMNFIIQDAESITCMTELLEHCDVTCQAEIWSMFTAILRKSVRNLQTSTEVGLIEQVLLKMSAVDDMIADLLVDMLGVLASYSITVKELKLLFSMLRGESGIWPRHAVKLLSVLNQMPQRHGPDTFFNFPGCSAAAIALPPIAKWPYQNGFTLNTWFRMDPLNNINVDKDKPYLYCFRTSKGVGYSAHFVGNCLIVTSLKSKGKGFQHCVKYDFQPRKWYMISIVHIYNRWRNSEIRCYVNGQLVSYGDMAWHVNTNDSYDKCFLGSSETADANRVFCGQLGAVYVFSEALNPAQIFAIHQLGPGYKSTFKFKSESDIHLAEHHKQVLYDGKLASSIAFTYNAKATDAQLCLESSPKENASIFVHSPHALMLQDVKAIVTHSIHSAIHSIGGIQVLFPLFAQLDNRQLNDSQVETTVCATLLAFLVELLKSSVAMQEQMLGGKGFLVIGYLLEKSSRVHITRAVLEQFLSFAKYLDGLSHGAPLLKQLCDHILFNPAIWIHTPAKVQLSLYTYLSAEFIGTATIYTTIRRVGTVLQLMHTLKYYYWVINPADSSGITPKGLDGPRPSQKEIISLRAFMLLFLKQLILKDRGVKEDELQSILNYLLTMHEDENIHDVLQLLVALMSEHPASMIPAFDQRNGIRVIYKLLASKSESIWVQALKVLGYFLKHLGHKRKVEIMHTHSLFTLLGERLMLHTNTVTVTTYNTLYEILTEQVCTQVVHKPHPEPDSTVKIQNPMILKVVATLLKNSTPSAELMEVRRLFLSDMIKLFSNSRENRRCLLQCSVWQDWMFSLGYINPKNSEEQKITEMVYNIFRILLYHAIKYEWGGWRVWVDTLSIAHSKVTYEAHKEYLAKMYEEYQRQEEENIKKGKKGNVSTISGLSSQTTGAKGGMEIREIEDLSQSQSPESETDYPVSTDTRDLLMSTKVSDDILGNSDRPGSGVHVEVHDLLVDIKAEKVEATEVKLDDMDLSPETLVGGENGALVEVESLLDNVYSAAVEKLQNNVHGSVGIIKKNEEKDNGPLITLADEKEDLPNSSTSFLFDKIPKQEEKLLPELSSNHIIPNIQDTQVHLGVSDDLGLLAHMTGSVDLTCTSSIIEEKEFKIHTTSDGMSSISERDLASSTKGLEYAEMTATTLETESSSSKIVPNIDAGSIISDTERSDDGKESGKEIRKIQTTTTTQAVQGRSITQQDRDLRVDLGFRGMPMTEEQRRQFSPGPRTTMFRIPEFKWSPMHQRLLTDLLFALETDVHVWRSHSTKSVMDFVNSNENIIFVHNTIHLISQMVDNIIIACGGILPLLSAATSPTTELENIEVTQGMSAETAVTFLSRLMAMVDVLVFASSLNFSEIEAEKNMSSGGLMRQCLRLVCCVAVRNCLECRQRQRDRGNKSSHGSSKPQEVPQSVTATAASKTPLENVPGNLSPIKDPDRLLQDVDINRLRAVVFRDVDDSKQAQFLALAVVYFISVLMVSKYRDILEPQRETTRTGSQPGRNIRQEINSPTSTVVVIPSIPHPSLNHGFLAKLIPEQSFGHSFYKETPAAFPDTIKEKETPTPGEDIQVESSIPHTDSGIGEEQVASILNGAELETSTGPDAMSELLSTLSSEVKKSQESLTENPSETLKPATSISSISQTKGINVKEILKSLVAAPVEIAECGPEPIPYPDPALKRETQAILPMQFHSFDRSVVVPVKKPPPGSLAVTTVGATTAGSGLPTGSTSNIFAATGATPKSMINTTGAVDSGSSSSSSSSSFVNGATSKNLPAVQTVAPMPEDSAENMSITAKLERALEKVAPLLREIFVDFAPFLSRTLLGSHGQELLIEGLVCMKSSTSVVELVMLLCSQEWQNSIQKNAGLAFIELINEGRLLCHAMKDHIVRVANEAEFILNRQRAEDVHKHAEFESQCAQYAADRREEEKMCDHLISAAKHRDHVTANQLKQKILNILTNKHGAWGAVSHSQLHDFWRLDYWEDDLRRRRRFVRNAFGSTHAEALLKAAIEYGTEEDVVKSKKTFRSQAIVNQNAETELMLEGDDDAVSLLQEKEIDNLAGPVVLSTPAQLIAPVVVAKGTLSITTTEIYFEVDEDDSAFKKIDTKVLAYTEGLHGKWMFSEIRAVFSRRYLLQNTALEVFMANRTSVMFNFPDQATVKKVVYSLPRVGVGTSYGLPQARRISLATPRQLYKSSNMTQRWQRREISNFEYLMFLNTIAGRTYNDLNQYPVFPWVLTNYESEELDLTLPGNFRDLSKPIGALNPKRAVFYAERYETWEDDQSPPYHYNTHYSTATSTLSWLVRIEPFTTFFLNANDGKFDHPDRTFSSVARSWRTSQRDTSDVKELIPEFYYLPEMFVNSNGYNLGVREDEVVVNDVDLPPWAKKPEDFVRINRMALESEFVSCQLHQWIDLIFGYKQRGPEAVRALNVFHYLTYEGSVNLDSITDPVLREAMEAQIQNFGQTPSQLLIEPHPPRSSAMHLCFLPQSPLMFKDQMQQDVIMVLKFPSNSPVTHVAANTLPHLTIPAVVTVTCSRLFAVNRWHNTVGLRGAPGYSLDQAHHLPIEMDPLIANNSGVNKRQITDLVDQSIQINAHCFVVTADNRYILICGFWDKSFRVYSTETGKLTQIVFGHWDVVTCLARSESYIGGDCYIVSGSRDATLLLWYWSGRHHIIGDNPNSSDYPAPRAVLTGHDHEVVCVSVCAELGLVISGAKEGPCLVHTITGDLLRALEGPENCLFPRLISVSSEGHCIIYYERGRFSNFSINGKLLAQMEINDSTRAILLSSDGQNLVTGGDNGVVEVWQACDFKQLYIYPGCDAGIRAMDLSHDQRTLITGMASGSIVAFNIDFNRWHYEHQNRY

SEQ ID NO: 10547 - protein, 1235 aa, Homo sapiens
MRSRSNSGVRLDGYARLVQQTILCYQNPVTGLLSASHEQKDAWVRDNIYSILAVWGLGMAYRKNADRDEDKAKAYELEQNVVKLMRGLLQCMMRQVAKVEKFKHTQSTKDSLHAKYNTATCGTVVGDDQWGHLQVDATSLFLLFLAQMTASGLRIIFTLDEVAFIQNLVFYIEAAYKVADYGMWERGDKTNQGIPELNASSVGMAKAALEAIDELDLFGAHGGRKSVIHVLPDEVEHCQSILFSMLPRASTSKEIDAGLLSIISFPAFAVEDVNLVNVTKNEIISKLQGRYGCCRFLRDGYKTPREDPNRLHYDPAELKLFENIECEWPVFWTYFIIDGVFSGDAVQVQEYREALEGILIRGKNGIRLVPELYAVPPNKVDEEYKNPHTVDRVPMGKVPHLWGQSLYILSSLLAEGFLAAGEIDPLNRRFSTSVKPDVVVQVTVLAENNHIKDLLRKHGVNVQSIADIHPIQVQPGRILSHIYAKLGRNKNMNLSGRPYRHIGVLGTSKLYVIRNQIFTFTPQFTDQHHFYLALDNEMIVEMLRIELAYLCTCWRMTGRPTLTFPISRTMLTNDGSDIHSAVLSTIRKLEDGYFGGARVKLGNLSEFLTTSFYTYLTFLDPDCDEKLFDNASEGTFSPDSDSDLVGYLEDTCNQESQDELDHYINHLLQSTSLRSYLPPLCKNTEDRHVFSAIHSTRDILSVMAKAKGLEVPFVPMTLPTKVLSAHRKSLNLVDSPQPLLEKVPESDFQWPRDDHGDVDCEKLVEQLKDCSNLQDQADILYILYVIKGPSWDTNLSGQHGVTVQNLLGELYGKAGLNQEWGLIRYISGLLRKKVEVLAEACTDLLSHQKQLTVGLPPEPREKIISAPLPPEELTKLIYEASGQDISIAVLTQEIVVYLAMYVRAQPSLFVEMLRLRIGLIIQVMATELARSLNCSGEEASESLMNLSPFDMKNLLHHILSGKEFGVERSVRPIHSSTSSPTISIHEVGHTGVTKTERSGINRLRSEMKQMTRRFSADEQFFSVGQAASSSAHSSKSARSSTPSSPTGTSSSDSGGHHIGWGERQGQWLRRRRLDGAINRVPVGFYQRVWKILQKCHGLSIDGYVLPSSTTREMTPHEIKFAVHVESVLNRVPQPEYRQLLVEAIMVLTLLSDTEMTSIGGIIHVDQIVQMASQLFLQDQVSIGAMDTLEKDQATGICHFFYDSAPSGAYGTMTYLTRAVASYLQELLPNSGCQMQ

SEQ ID NO: 10548 - protein, 317 aa, Homo sapiens
MEKRMPIANDTQFHTSSFLLLGIPGLEDVHIWIGFPFFSVYLIALLGNAAIFFVIQTEQSLHEPMYYCLAMLDSIDLSLSTATIPKMLGIFWFNIKEISFGGYLSQMFFIHFFTVMESIVLVAMAFDRYIAICKPLWYTMILTSKIISLIAGIAVLRSLYMVIPLVFLLLRLPFCGHRIIPHTYCEHMGIARLACASIKVNIMFGLGSISLLLLDVLLIILSHIRILYAVFCLPSWEARLKALNTCGSHIGVILAFSTPAFFSFFTHCFGHDIPQYIHIFLANLYVVVPPTLNPVIYGVRTKHIRETVLRIFFKTDH

SEQ ID NO: 10549 - protein, 386 aa, Homo sapiens
MPQLSGGGGGGGGDPELCATDEMIPFKDEGDPQKEKIFAEISHPEEEGDLADIKSSLVNESEIIPASNGHEVARQAQTSQEPYHDKAREHPDDGKHPDGGLYNKGPSYSSYSGYIMMPNMNNDPYMSNGSLSPPIPRTSNKVPVVQPSHAVHPLTPLITYSDEHFSPGSHPSHIPSDVNSKQGMSRHPPAPDIPTFYPLSPGGVGQITPPLGWFSHHMIPGPPGPHTTGIPHPAIVTPQVKQEHPHTDSDLMHVKPQHEQRKEQEPKRPHIKKPLNAFMLYMKEMRANVVAECTLKESAAINQILGRRWHALSREEQAKYYELARKERQLHMQLYPGWSARDNYGKKKKRKREKLQESASGGKRSSFPTCKAKAATPGPLLEMEAC

SEQ ID NO: 10550 - protein, 1589 aa, Homo sapiens
MAKQLNLPENTDDWTKEDVNQWLESHKIDQKHREILTEQDVNGAVLKWLKKEHLVDMGITHGPAIQIEELFKELRKTAIEDSIQTSKMGKPSKNAPKDQTVSQKERRETSKQKQKGKENPDMANPSAMSTTAKGSKSLKVELIEDKIDYTKERQPSIDLTCVSYPFDEFSNPYRYKLDFSLQPETGPGNLIDPIHEFKAFTNTATATEEDVKMKFSNEVFRFASACMNSRTNGTIHFGVKDKPHGKIVGIKVTNDTKEALINHFNLMINKYFEDHQVQQAKKCIREPRFVEVLLPNSTLSDRFVIEVDIIPQFSECQYDYFQIKMQNYNNKIWEQSKKFSLFVRDGTSSKDITKNKVDFRAFKADFKTLAESRKAAEEKFRAKTNKKEREGPKLVKLLTGNQDLLDNSYYEQYILVTNKCHPDQTKHLDFLKEIKWFAVLEFDPESNINGVVKAYKESRVANLHFPSVYVEQKTTPNETISTLNLYHQPSWIFCNGRLDLDSEKYKPFDPSSWQRERASDVRKLISFLTHEDIMPRGKFLVVFLLLSSVDDPRDPLIETFCAFYQDLKGMENILCICVHPHIFQGWKDLLEARLIKHQDEISSQCISALSLEEINGTILKLKSVTQSSKRLLPSIGLSTVLLKKEEDIMTALEIICENECEGTLLEKDKNKFLEFKASKEEDFYRGGKVSWWNFYFSSESYSSPFVKRDKYERLEAMIQNCADSSKPTSTKIIHLYHHPGCGGTTLAMHILWELRKKFRCAVLKNKTVDFSEIGEQVTSLITYGAMNRQEYVPVLLLVDDFEEQDNVYLLQYSIQTAIAKKYIRYEKPLVIILNCMRSQNPEKSARIPDSIAVIQQLSPKEQRAFELKLKEIKEQHKNFEDFYSFMIMKTNFNKEYIENVVRNILKGQNIFTKEAKLFSFLALLNSYVPDTTISLSQCEKFLGIGNKKAFWGTEKFEDKMGTYSTILIKTEVIECGNYCGVRIIHSLIAEFSLEELKKSYHLNKSQIMLDMLTENLFFDTGMGKSKFLQDMHTLLLTRHRDEHEGETGNWFSPFIEALHKDEGNEAVEAVLLESIHRFNPNAFICQALARHFYIKKKDFGNALNWAKQAKIIEPDNSYISDTLGQVYKSKIRWWIEENGGNGNISVDDLIALLDLAEHASSAFKESQQQSEDREYEVKERLYPKSKRRYDTYNIAGYQGEIEVGLYTIQILQLIPFFDNKNELSKRYMVNFVSGSSDIPGDPNNEYKLALKNYIPYLTKLKFSLKKSFDFFDEYFVLLKPRNNIKQNEEAKTRRKVAGYFKKYVDIFCLLEESQNNTGLGSKFSEPLQVERCRRNLVALKADKFSGLLEYLIKSQEDAISTMKCIVNEYTFLLEQCTVKIQSKEKLNFILANIILSCIQPTSRLVKPVEKLKDQLREVLQPIGLTYQFSEPYFLASLLFWPENQQLDQHSEQMKEYAQALKNSFKGQYKHMHRTKQPIAYFFLGKGKRLERLVHKGKIDQCFKKTPDINSLWQSGDVWKEEKVQELLLRLQGRAENNCLYIEYGINEKITIPITPAFLGQLRSGRSIEKVSFYLGFSIGGPLAYDIEIV

SEQ ID NO: 10551 - protein, 154 aa, Homo sapiens
MAPRRARGCRTLGLPALLLLLLLRPPATREPAASSPSSNNTAATTAAIVPGSQLMPSKSPSTGTTEISSHESSHGTPSQTTAKNWELTASASHQPPGVYPQGHSDTTVAISTSTVLLCGLSAVSLLACYLKSRASVCSCHPRSAGHTCSVGSVC

SEQ ID NO: 10552 - protein, 267 aa, Homo sapiens
MAPRRARGCRTLGLPALLLLLLLRPPATRGITCPPPMSVEHADIWVKSYSLYSRERYICNSGFKRKAGTSSLTECVLNKATNVAHWTTPSLKCIRDPALVHQRPAPPSTVTTAGVTPQPESLSPSGKEPAASSPSSNNTAATTAAIVPGSQLMPSKSPSTGTTEISSHESSHGTPSQTTAKNWELTASASHQPPGVYPQGHSDTTVAISTSTVLLCGLSAVSLLACYLKSRQTPPLASVEMEAMEALPVTWGTSSRDEDLENCSHHL

SEQ ID NO: 10553 - protein, 1985 aa, Homo sapiens
MAQRTGLEDPERYLFVDRAVIYNPATQADWTAKKLVWIPSERHGFEAASIKEERGDEVMVELAENGKKAMVNKDDIQKMNPPKFSKVEDMAELTCLNEASVLHNLKDRYYSGLIYTYSGLFCVVINPYKNLPIYSENIIEMYRGKKRHEMPPHIYAISESAYRCMLQDREDQSILCTGESGAGKTENTKKVIQYLAHVASSHKGRKDHNIPESPKPVKHQGELERQLLQANPILESFGNAKTVKNDNSSRFGKFIRINFDVTGYIVGANIETYLLEKSRAVRQAKDERTFHIFYQLLSGAGEHLKSDLLLEGFNNYRFLSNGYIPIPGQQDKDNFQETMEAMHIMGFSHEEILSMLKVVSSVLQFGNISFKKERNTDQASMPENTVAQKLCHLLGMNVMEFTRAILTPRIKVGRDYVQKAQTKEQADFAVEALAKATYERLFRWLVHRINKALDRTKRQGASFIGILDIAGFEIFELNSFEQLCINYTNEKLQQLFNHTMFILEQEEYQREGIEWNFIDFGLDLQPCIDLIERPANPPGVLALLDEECWFPKATDKTFVEKLVQEQGSHSKFQKPRQLKDKADFCIIHYAGKVDYKADEWLMKNMDPLNDNVATLLHQSSDRFVAELWKDVDRIVGLDQVTGMTETAFGSAYKTKKGMFRTVGQLYKESLTKLMATLRNTNPNFVRCIIPNHEKRAGKLDPHLVLDQLRCNGVLEGIRICRQGFPNRIVFQEFRQRYEILTPNAIPKGFMDGKQACERMIRALELDPNLYRIGQSKIFFRAGVLAHLEEERDLKITDIIIFFQAVCRGYLARKAFAKKQQQLSALKVLQRNCAAYLKLRHWQWWRVFTKVKPLLQVTRQEEELQAKDEELLKVKEKQTKVEGELEEMERKHQQLLEEKNILAEQLQAETELFAEAEEMRARLAAKKQELEEILHDLESRVEEEEERNQILQNEKKKMQAHIQDLEEQLDEEEGARQKLQLEKVTAEAKIKKMEEEILLLEDQNSKFIKEKKLMEDRIAECSSQLAEEEEKAKNLAKIRNKQEVMISDLEERLKKEEKTRQELEKAKRKLDGETTDLQDQIAELQAQIDELKLQLAKKEEELQGALARGDDETLHKNNALKVVRELQAQIAELQEDFESEKASRNKAEKQKRDLSEELEALKTELEDTLDTTAAQQELRTKREQEVAELKKALEEETKNHEAQIQDMRQRHATALEELSEQLEQAKRFKANLEKNKQGLETDNKELACEVKVLQQVKAESEHKRKKLDAQVQELHAKVSEGDRLRVELAEKASKLQNELDNVSTLLEEAEKKGIKFAKDAASLESQLQDTQELLQEETRQKLNLSSRIRQLEEEKNSLQEQQEEEEEARKNLEKQVLALQSQLADTKKKVDDDLGTIESLEEAKKKLLKDAEALSQRLEEKALAYDKLEKTKNRLQQELDDLTVDLDHQRQVASNLEKKQKKFDQLLAEEKSISARYAEERDRAEAEAREKETKALSLARALEEALEAKEEFERQNKQLRADMEDLMSSKDDVGKNVHELEKSKRALEQQVEEMRTQLEELEDELQATEDAKLRLEVNMQAMKAQFERDLQTRDEQNEEKKRLLIKQVRELEAELEDERKQRALAVASKKKMEIDLKDLEAQIEAANKARDEVIKQLRKLQAQMKDYQRELEEARASRDEIFAQSKESEKKLKSLEAEILQLQEELASSERARRHAEQERDELADEITNSASGKSALLDEKRRLEARIAQLEEELEEEQSNMELLNDRFRKTTLQVDTLNAELAAERSAAQKSDNARQQLERQNKELKAKLQELEGAVKSKFKATISALEAKIGQLEEQLEQEAKERAAANKLVRRTEKKLKEIFMQVEDERRHADQYKEQMEKANARMKQLKRQLEEAEEEATRANASRRKLQRELDDATEANEGLSREVSTLKNRLRRGGPISFSSSRSGRRQLHLEGASLELSDDDTESKTSDVNETQPPQSE

SEQ ID NO: 10554 - protein, 564 aa, Homo sapiens
MASTSTTIRSHSSSRRGFSANSARLPGVSRSGFSSVSVSRSRGSGGLGGACGGAGFGSRSLYGLGGSKRISIGGGSCAISGGYGSRAGGSYGFGGAGSGFGFGGGAGIGFGLGGGAGLAGGFGGPGFPVCPPGGIQEVTVNQSLLTPLNLQIDPTIQRVRAEEREQIKTLNNKFASFIDKVRFLEQQNKVLETKWTLLQEQGTKTVRQNLEPLFEQYINNLRRQLDSIVGERGRLDSELRGMQDLVEDFKNKYEDEINKRTAAENEFVTLKKDVDAAYMNKVELQAKADTLTDEINFLRALYDAELSQMQTHISDTSVVLSMDNNRNLDLDSIIAEVKAQYEEIAQRSRAEAESWYQTKYEELQVTAGRHGDDLRNTKQEIAEINRMIQRLRSEIDHVKKQCANLQAAIADAEQRGEMALKDAKNKLEGLEDALQKAKQDLARLLKEYQELMNVKLALDVEIATYRKLLEGEECRLNGEGVGQVNISVVQSTVSSGYGGASGVGSGLGLGGGSSYSYGSGLGVGGGFSSSSGRAIGGGLSSVGGGSSTIKYTTTSSSSRKSYKH

SEQ ID NO: 10555 - protein, 1403 aa, Homo sapiens
MMNCWFSCTPKNRHAADWNKYDDRLMKAAERGDVEKVTSILAKKGVNPGKLDVEGRSVFHVVTSKGNLECLNAILIHGVDITTSDTAGRNALHLAAKYGHALCLQKLLQYNCPTEHADLQGRTALHDAAMADCPSSIQLLCDHGASVNAKDVDGRTPLVLATQMSRPTICQLLIDRGADVNSRDKQNRTALMLGCEYGCRDAVEVLIKNGADISLLDALGHDSSYYARIGDNLDILTLLKTASENTNKGRELWKKGPSLQQRNLTHMQDEVNVKSHQREHQNIQDLEIENEDLKERLRKIQQEQRILLDKVNGLQLQLNEEVMVADDLESEREKLKSLLAAKEKQHEESLRTIEALKNRFKYFESDHLGSGSHFSNRKEDMLLKQGQMYMADSQCTSPGIPAHMQSRSMLRPLELSLPSQTSYSENEILKKELEAMRTFCESAKQDRLKLQNELAHKVAECKALALECERVKEDSDEQIKQLEDALKDVQKRMYESEGKVKQMQTHFLALKEHLTSEAASGNHRLTEELKDQLKDLKVKYEGASAEVGKLRNQIKQNEMIVEEFKRDEGKLIEENKRLQKELSMCEMEREKKGRKVTEMEGQAKELSAKLALSIPAEKFENMKSSLSNEVNEKAKKLVEMEREHEKSLSEIRQLKRELENVKAKLAQHVKPEEHEQVKSRLEQKSGELGKKITELTLKNQTLQKEIEKVYLDNKLLKEQAHNLTIEMKNHYVPLKVSEDMKKSHDAIIDDLNRKLLDVTQKYTEKKLEMEKLLLENDSLSKDVSRLETVFVPPEKHEKEIIALKSNIVELKKQLSELKKKCGEDQEKIHALTSENTNLKKMMSNQYVPVKTHEEVKMTLNDTLAKTNRELLDVKKKFEDINQEFVKIKDKNEILKRNLENTQNQIKAEYISLAEHEAKMSSLSQSMRKVQDSNAEILANYRKGQEEIVTLHAEIKAQKKELDTIQECIKVKYAPIVSFEECERKFKATEKELKDQLSEQTQKYSVSEEEVKKNKQENDKLKKEIFTLQKDLRDKTVLIEKSHEMERALSRKTDELNKQLKDLSQKYTEVKNVKEKLVEENAKQTSEILAVQNLLQKQHVPLEQVEALKKSLNGTIENLKEELKSMQRCYEKEQQTVTKLHQLLENQKNSSVPLAEHLQIKEAFEKEVGIIKASLREKEEESQNKMEEVSKLQSEVQNTKQALKKLETREVVDLSKYKATKSDLETQISSLNEKLANLNRKYEEVCEEVLHAKKKEISAKDEKELLHFSIEQEIKDQKERCDKSLTTITELQRRIQESAKQIEAKDNKITELLNDVERLKQALNGLSQLTYTSGNPTKRQSQLIDTLQHQVKSLEQQLADADRQHQEVIAIYRTHLLSAAQGHMDEDVQEALLQIIQMRQGLVC

SEQ ID NO: 10556 - protein, 565 aa, Homo sapiens
MDFLLALVLVSSLYLQAAAEFDGRWPRQIVSSIGLCRYGGRIDCCWGWARQSWGQCQPVCQPRCKHGECIGPNKCKCHPGYAGKTCNQDLNECGLKPRPCKHRCMNTYGSYKCYCLNGYMLMPDGSCSSALTCSMANCQYGCDVVKGQIRCQCPSPGLQLAPDGRTCVDVDECATGRASCPRFRQCVNTFGSYICKCHKGFDLMYIGGKYQCHDIDECSLGQYQCSSFARCYNIRGSYKCKCKEGYQGDGLTCVYIPKVMIEPSGPIHVPKGNGTILKGDTGNNNWIPDVGSTWWPPKTPYIPPIITNRPTSKPTTRPTPKPTPIPTPPPPPPLPTELRTPLPPTTPERPTTGLTTIAPAASTPPGGITVDNRVQTDPQKPRGDVFIPRQPSNDLFEIFEIERGVSADDEAKDDPGVLVHSCNFDHGLCGWIREKDNDLHWEPIRDPAGGQYLTVSAAKAPGGKAARLVLPLGRLMHSGDLCLSFRHKVTGLHSGTLQVFVRKHGAHGAALWGRNGGHGWRQTQITLRGADIKSVVFKGEKRRGHTGEIGLDDVSLKKGHCSEER

SEQ ID NO: 10557 - protein, 1030 aa, Homo sapiens
MKIPNIGNVMNKFEILGVVGEGAYGVVLKCRHKETHEIVAIKKFKDSEENEEVKETTLRELKMLRTLKQENIVELKEAFRRRGKLYLVFEYVEKNMLELLEEMPNGVPPEKVKSYIYQLIKAIHWCHKNDIVHRDIKPENLLISHNDVLKLCDFGFARNLSEGNNANYTEYVATRWYRSPELLLGAPYGKSVDMWSVGCILGELSDGQPLFPGESEIDQLFTIQKVLGPLPSEQMKLFYSNPRFHGLRFPAVNHPQSLERRYLGILNSVLLDLMKNLLKLDPADRYLTEQCLNHPTFQTQRLLDRSPSRSAKRKPYHVESSTLSNRNQAGKSTALQSHHRSNSKDIQNLSVGLPRADEGLPANESFLNGNLAGASLSPLHTKTYQASSQPGSTSKDLTNNNIPHLLSPKEAKSKTEFDFNIDPKPSEGPGTKYLKSNSRSQQNRHSFMESSQSKAGTLQPNEKQSRHSYIDTIPQSSRSPSYRTKAKSHGALSDSKSVSNLSEARAQIAEPSTSRYFPSSCLDLNSPTSPTPTRHSDTRTLLSPSGRNNRNEGTLDSRRTTTRHSKTMEELKLPEHMDSSHSHSLSAPHESFSYGLGYTSPFSSQQRPHRHSMYVTRDKVRAKGLDGSLSIGQGMAARANSLQLLSPQPGEQLPPEMTVARSSVKETSREGTSSFHTRQKSEGGVYHDPHSDDGTAPKENRHLYNDPVPRRVGSFYRVPSPRPDNSFHENNVSTRVSSLPSESSSGTNHSKRQPAFDPWKSPENISHSEQLKEKEKQGFFRSMKKKKKKSQTVPNSDSPDLLTLQKSIHSASTPSSRPKEWRPEKISDLQTQSQPLKSLRKLLHLSSASNHPASSDPRFQPLTAQQTKNSFSEIRIHPLSQASGGSSNIRQEPAPKGRPALQLPDGGCDGRRQRHHSGPQDRRFMLRTTEQQGEYFCCGDPKKPHTPCVPNRALHRPISSPAPYPVLQVRGTSMCPTLQVRGTDAFSCPTQQSGFSFFVRHVMREALIHRAQVNQAALLTYHENAALTGK

SEQ ID NO: 10558 - protein, 1094 aa, Homo sapiens
MSYEVTSGCHWTCQVPESCDNGLHCAGPLGHLHRRCQRTSAHLLVFTEHAEMRRFKRKHLTAIDCQHLARSHLAVTQPFGQRWTNRDPNHGLYPKPRTKRGSRGQGSQRCIPEFFLAGKQPCTNDMAKSNSVGQDSCQDSEGDMIFPAESSCALPQEGSAGPGSPGSAPPSRKRSWSSEEESNQATGTSRWDGVSKKAPRHHLSVPCTRPREARQEAEDSTSRLSAESGETDQDAGDVGPDPIPDSYYGLLGTLPCQEALSHICSLPSEVLRHVFAFLPVEDLYWNLSLVCHLWREIISDPLFIPWKKLYHRYLMNEEQAVSKVDGILSNCGIEKESDLCVLNLIRYTATTKCSPSVDPERVLWSLRDHPLLPEAEACVRQHLPDLYAAAGGVNIWALVAAVVLLSSSVNDIQRLLFCLRRPSSTVTMPDVTETLYCIAVLLYAMREKGINISNRIHYNIFYCLYLQENSCTQATKVKEEPSVWPGKKTIQLTHEQQLILNHKMEPLQVVKIMAFAGTGKTSTLVKYAEKWSQSRFLYVTFNKSIAKQAERVFPSNVICKTFHSMAYGHIGRKYQSKKKLNLFKLTPFMVNSVLAEGKGGFIRAKLVCKTLENFFASADEELTIDHVPIWCKNSQGQRVMVEQSEKLNGVLEASRLWDNMRKLGECTEEAHQMTHDGYLKLWQLSKPSLASFDAIFVDEAQDCTPAIMNIVLSQPCGKIFVGDPHQQIYTFRGAVNALFTVPHTHVFYLTQSFRFGVEIAYVGATILDVCKRVRKKTLVGGNHQSGIRGDAKGQVALLSRTNANVFDEAVRVTEGEFPSRIHLIGGIKSFGLDRIIDIWILLQPEEERRKQNLVIKDKFIRRWVHKEGFSGFKRYVTAAEDKELEAKIAVVEKYNIRIPELVQRIEKCHIEDLDFAEYILGTVHKAKGLEFDTVHVLDDFVKVPCARHNLPQLPHFRVESFSEDEWNLLYVAVTRAKKRLIMTKSLENILTLAGEYFLQAELTSNVLKTGVVRCCVGQCNNAIPVDTVLTMKKLPITYSNRKENKGGYLCHSCAEQRIGPLAFLTASPEQVRAMERTVENIVLPRHEALLFLVF

SEQ ID NO: 10559 - protein, 434 aa, Homo sapiens
MEDLFSPSILPPAPNISVPILLGWGLNLTLGQGAPASGPPSRRVRLVFLGVILVVAVAGNTTVLCRLCGGGGPWAGPKRRKMDFLLVQLALADLYACGGTALSQLAWELLGEPRAATGDLACRFLQLLQASGRGASAHLVVLIALERRRAVRLPHGRPLPARALAALGWLLALLLALPPAFVVRGDSPSPLPPPPPPTSLQPGAPPAARAWPGERRCHGIFAPLPRWHLQVYAFYEAVAGFVAPVTVLGVACGHLLSVWWRHRPQAPAAAAPWSASPGRAPAPSALPRAKVQSLKMSLLLALLFVGCELPYFAARLAAAWSSGPAGDWEGEGLSAALRVVAMANSALNPFVYLFFQAGDCRLRRQLRKRLGSLCCAPQGGAEDEEGPRGHQALYRQRWPHPHYHHARREPLDEGGLRPPPPRPRPLPCSCESAF

SEQ ID NO: 10560 - protein, 2002 aa, Homo sapiens
MEQDRTNHVEGNRLSPFLIPSPPICQTEPLATKLQNGSPLPERAHPEVNGDTKWHSFKSYYGIPCMKGSQNSRVSPDFTQESRGYSKCLQNGGIKRTVSEPSLSGLLQIKKLKQDQKANGERRNFGVSQERNPGESSQPNVSDLSDKKESVSSVAQENAVKDFTSFSTHNCSGPENPELQILNEQEGKSANYHDKNIVLLKNKAVLMPNGATVSASSVEHTHGELLEKTLSQYYPDCVSIAVQKTTSHINAINSQATNELSCEITHPSHTSGQINSAQTSNSELPPKPAAVVSEACDADDADNASKLAAMLNTCSFQKPEQLQQQKSVFEICPSPAENNIQGTTKLASGEEFCSGSSSNLQAPGGSSERYLKQNEMNGAYFKQSSVFTKDSFSATTTPPPPSQLLLSPPPPLPQVPQLPSEGKSTLNGGVLEEHHHYPNQSNTTLLREVKIEGKPEAPPSQSPNPSTHVCSPSPMLSERPQNNCVNRNDIQTAGTMTVPLCSEKTRPMSEHLKHNPPIFGSSGELQDNCQQLMRNKEQEILKGRDKEQTRDLVPPTQHYLKPGWIELKAPRFHQAESHLKRNEASLPSILQYQPNLSNQMTSKQYTGNSNMPGGLPRQAYTQKTTQLEHKSQMYQVEMNQGQSQGTVDQHLQFQKPSHQVHFSKTDHLPKAHVQSLCGTRFHFQQRADSQTEKLMSPVLKQHLNQQASETEPFSNSHLLQHKPHKQAAQTQPSQSSHLPQNQQQQQKLQIKNKEEILQTFPHPQSNNDQQREGSFFGQTKVEECFHGENQYSKSSEFETHNVQMGLEEVQNINRRNSPYSQTMKSSACKIQVSCSNNTHLVSENKEQTTHPELFAGNKTQNLHHMQYFPNNVIPKQDLLHRCFQEQEQKSQQASVLQGYKNRNQDMSGQQAAQLAQQRYLIHNHANVFPVPDQGGSHTQTPPQKDTQKHAALRWHLLQKQEQQQTQQPQTESCHSQMHRPIKVEPGCKPHACMHTAPPENKTWKKVTKQENPPASCDNVQQKSIIETMEQHLKQFHAKSLFDHKALTLKSQKQVKVEMSGPVTVLTRQTTAAELDSHTPALEQQTTSSEKTPTKRTAASVLNNFIESPSKLLDTPIKNLLDTPVKTQYDFPSCRCVEQIIEKDEGPFYTHLGAGPNVAAIREIMEERFGQKGKAIRIERVIYTGKEGKSSQGCPIAKWVVRRSSSEEKLLCLVRERAGHTCEAAVIVILILVWEGIPLSLADKLYSELTETLRKYGTLTNRRCALNEERTCACQGLDPETCGASFSFGCSWSMYYNGCKFARSKIPRKFKLLGDDPKEEEKLESHLQNLSTLMAPTYKKLAPDAYNNQIEYEHRAPECRLGLKEGRPFSGVTACLDFCAHAHRDLHNMQNGSTLVCTLTREDNREFGGKPEDEQLHVLPLYKVSDVDEFGSVEAQEEKKRSGAIQVLSSFRRKVRMLAEPVKTCRQRKLEAKKAAAEKLSSLENSSNKNEKEKSAPSRTKQTENASQAKQLAELLRLSGPVMQQSQQPQPLQKQPPQPQQQQRPQQQQPHHPQTESVNSYSASGSTNPYMRRPNPVSPYPNSSHTSDIYGSTSPMNFYSTSSQAAGSYLNSSNPMNPYPGLLNQNTQYPSYQCNGNLSVDNCSPYLGSYSPQSQPMDLYRYPSQDPLSKLSLPPIHTLYQPRFGNSQSFTSKYLGYGNQNMQGDGFSSCTIRPNVHHVGKLPPYPTHEMDGHFMGATSRLPPNLSNPNMDYKNGEHHSPSHIIHNYSAAPGMFNSSLHALHLQNKENDMLSHTANGLSKMLPALNHDRTACVQGGLHKLSDANGQEKQPLALVQGVASGAEDNDEVWSDSEQSFLDPDIGGVAVAPTHGSILIECAKRELHATTPLKNPNRNHPTRISLVFYQHKSMNEPKHGLALWEAKMAEKAREKEEECEKYGPDYVPQKSHGKKVKREPAEPHETSEPTYLRFIKSLAERTMSVTTDSTVTTSPYAFTRVTGPYNRYI

SEQ ID NO: 10561 - protein, 2580 aa, Homo sapiens
MAEEGAVAVCVRVRPLNSREESLGETAQVYWKTDNNVIYQVDGSKSFNFDRVFHGNETTKNVYEEIAAPIIDSAIQGYNGTIFAYGQTASGKTYTMMGSEDHLGVIPRAIHDIFQKIKKFPDREFLLRVSYMEIYNETITDLLCGTQKMKPLIIREDVNRNVYVADLTEEVVYTSEMALKWITKGEKSRHYGETKMNQRSSRSHTIFRMILESREKGEPSNCEGSVKVSHLNLVDLAGSERAAQTGAAGVRLKEGCNINRSLFILGQVIKKLSDGQVGGFINYRDSKLTRILQNSLGGNAKTRIICTITPVSFDETLTALQFASTAKYMKNTPYVNEVSTDEALLKRYRKEIMDLKKQLEEVSLETRAQAMEKDQLAQLLEEKDLLQKVQNEKIENLTRMLVTSSSLTLQQELKAKRKRRVTWCLGKINKMKNSNYADQFNIPTNITTKTHKLSINLLREIDESVCSESDVFSNTLDTLSEIEWNPATKLLNQENIESELNSLRADYDNLVLDYEQLRTEKEEMELKLKEKNDLDEFEALERKTKKDQENELSSKVELLREKEDQIKKLQEYIDSQKLENIKMDLSYSLESIEDPKQMKQTLFDAETVALDAKRESAFLRSENLELKEKMKELATTYKQMENDIQLYQSQLEAKKKMQVDLEKELQSAFNEITKLTSLIDGKVPKDLLCNLELEGKITDLQKELNKEVEENEALREEVILLSELKSLPSEVERLRKEIQDKSEELHIITSEKDKLFSEVVHKESRVQGLLEEIGKTKDDLATTQSNYKSTDQEFQNFKTLHMDFEQKYKMVLEENERMNQEIVNLSKEAQKFDSSLGALKTELSYKTQELQEKTREVQERLNEMEQLKEQLENRDSTLQTVEREKTLITEKLQQTLEEVKTLTQEKDDLKQLQESLQIERDQLKSDIHDTVNMNIDTQEQLRNALESLKQHQETINTLKSKISEEVSRNLHMEENTGETKDEFQQKMVGIDKKQDLEAKNTQTLTADVKDNEIIEQQRKIFSLIQEKNELQQMLESVIAEKEQLKTDLKENIEMTIENQEELRLLGDELKKQQEIVAQEKNHAIKKEGELSRTCDRLAEVEEKLKEKSQQLQEKQQQLLNVQEEMSEMQKKINEIENLKNELKNKELTLEHMETERLELAQKLNENYEEVKSITKERKVLKELQKSFETERDHLRGYIREIEATGLQTKEELKIAHIHLKEHQETIDELRRSVSEKTAQIINTQDLEKSHTKLQEEIPVLHEEQELLPNVKEVSETQETMNELELLTEQSTTKDSTTLARIEMERLRLNEKFQESQEEIKSLTKERDNLKTIKEALEVKHDQLKEHIRETLAKIQESQSKQEQSLNMKEKDNETTKIVSEMEQFKPKDSALLRIEIEMLGLSKRLQESHDEMKSVAKEKDDLQRLQEVLQSESDQLKENIKEIVAKHLETEEELKVAHCCLKEQEETINELRVNLSEKETEISTIQKQLEAINDKLQNKIQEIYEKEEQFNIKQISEVQEKVNELKQFKEHRKAKDSALQSIESKMLELTNRLQESQEEIQIMIKEKEEMKRVQEALQIERDQLKENTKEIVAKMKESQEKEYQFLKMTAVNETQEKMCEIEHLKEQFETQKLNLENIETENIRLTQILHENLEEMRSVTKERDDLRSVEETLKVERDQLKENLRETITRDLEKQEELKIVHMHLKEHQETIDKLRGIVSEKTNEISNMQKDLEHSNDALKAQDLKIQEELRIAHMHLKEQQETIDKLRGIVSEKTDKLSNMQKDLENSNAKLQEKIQELKANEHQLITLKKDVNETQKKVSEMEQLKKQIKDQSLTLSKLEIENLNLAQKLHENLEEMKSVMKERDNLRRVEETLKLERDQLKESLQETKARDLEIQQELKTARMLSKEHKETVDKLREKISEKTIQISDIQKDLDKSKDELQKKQDRQNHQVKPEKRLLSDGQQHLTESLREKCSRIKELLKRYSEMDDHYECLNRLSLDLEKEIEFQKELSMRVKANLSLPYLQTKHIEKLFTANQRCSMEFHRIMKKLKYVLSYVTKIKEEQHESINKFEMDFIDEVEKQKELLIKIQHLQQDCDVPSRELRDLKLNQNMDLHIEEILKDFSESEFPSIKTEFQQVLSNRKEMTQFLEEWLNTRFDIEKLKNGIQKENDRICQVNNFFNNRIIAIMNESTEFEERSATISKEWEQDLKSLKEKNEKLFKNYQTLKTSLASGAQVNPTTQDNKNPHVTSRATQLTTEKIRELENSLHEAKESAMHKESKIIKMQKELEVTNDIIAKLQAKVHESNKCLEKTKETIQVLQDKVALGAKPYKEEIEDLKMKLVKIDLEKMKNAKEFEKEISATKATVEYQKEVIRLLRENLRRSQQAQDTSVISEHTDPQPSNKPLTCGGGSGIVQNTKALILKSEHIRLEKEISKLKQQNEQLIKQKNELLSNNQHLSNEVKTWKERTLKREAHKQVTCENSPKSPKVTGTASKKKQITPSQCKERNLQDPVPKESPKSCFFDSRSKSLPSPHPVRYFDNSSLGLCPEVQNAGAESVDSQPGPWHASSGKDVPECKTQ

SEQ ID NO: 10562 - protein, 326 aa, Homo sapiens
MASGILVNVKEEVTCPICLELLTQPLSLDCGHSFCQACLTANHKKSMLDKGESSCPVCRISYQPENIRPNRHVANIVEKLREVKLSPEGQKVDHCARHGEKLLLFCQEDGKVICWLCERSQEHRGHHTFLTEEVAREYQVKLQAALEMLRQKQQEAEELEADIREEKASWKTQIQYDKTNVLADFEQLRDILDWEESNELQNLEKEEEDILKSLTNSETEMVQQTQSLRELISDLEHRLQGSVMELLQGVDGVIKRTENVTLKKPETFPKNQRRVFRAPDLKGMLEVFRELTDVRRYWGWSAMARSRFTATSTSQIQAILLPQPPK

SEQ ID NO: 10563 - protein, 645 aa, Homo sapiens
MSERTQEQDFVIITVDDSDDNNDCSIEMVEVSETADNSTNDIADDSTYVTADNPTDDTATQPNFPGGNDGHHRPLQMSYGSGSVTQAGVQWHDHSSLQPQPLGLKQFFHLSLPSSWDDRRTPPCPVAHGDQIVSQINHPVHLRRYSYNSEEVDFPKRGRFYTPEVQSSISPPAERQETHAWASPAVTSLESAACHELQEADLSESLSYPRIVSSSSLQQYVAQGGSFPCFGMPWNFISGGAESTNAVISFANATTAVPMAVLSRRESSLANNPGVVNYSALPENENVGPGRALSSFCFHPNLESGPQMSYGTMSYSTEMKNNCDQDDASASACLTPDFALLPLNILVKVDTNTENSVNTMNRSTLLDSDSGQDSSSSSVCIPPKYGYLGDPKRNVRVLKIHLLAVQNMAKPKQAACYLVRILFSKEILISSSVDIHLKDSQSLDPNKMAALREYLATTFPTCDLHEHGKDWQDCISGINSMIYCLCSEGKSTPKTVRKNKKRTNRVASASADRNDQRGRDGGEGCSWMFQPMNNSKMREKRNLQPNSNAIPEGMREPSTDNPEEPGEAWSYFGRPWRNIRMPCSVLTLAKTKSCASLSARYLIQKLFTKDVLVQSNVYGNLKHGLCALDPNKISALRGLLHIEYV

SEQ ID NO: 10564 - protein, 799 aa, Homo sapiens
MSERTQEQDFVIITVDDSDDNNDCSIEMVEVSETADNSTNDIADDSTYVTADNPTDDTATQPNFPGGNDGHHRPLQMSYGSGSVTQAGVQWHDHSSLQPQPLGLKQFFHLSLPSSWDDRRTPPCPVAHGDQIVSQINHPVHLRRYSYNSEEVDFPKRGRFYTPEVQSSISPPAERQETHAWASPAVTSLESAACHELQEADLSESLSYPRIVSSSSLQQYVAQGGSFPCFGMPWNFISGGAESTNAVISFANATTAVPMAVLSRRESSLANNPGVVNYSALPENENVGPGRALSSFCFHPNLEMPERPANSSKNSTETANYPTLMGNYNGQNTASLSVFIPPYFAEKIILTEMPGTTETNVENNSQTVYYPALSGNTSAPYPASSYLPITSNFESGPQMSYGTMSYSTEMKNNCDQDDASASACLTPDFALLPLNILVKVDTNTENSVNTMNRSTLLDSDSGQDSSSSSVCIPPKYGYLGDPKRNVRVLKIHLLAVQNMAKPKQAACYLVRILFSKEILISSSVDIHLKDSQSLDPNKMAALREYLATTFPTCDLHEHGKDWQDCISGINSMIYCLCSEGKSTPKTVRKNKKRTNRVASASADRNDQRGRDGGEGCSWMFQPMNNSKMREKRNLQPNSNAIPEGMREPSTDNPEEPGEAWSYFGRPWRNIRMPCSVLTLAKTKSCASLSARYLIQKLFTKDVLVQSNVYGNLKHGLCALDPNKISALREFLQENYPICDLSENGRDWKSCVTSINSGIRSLRHDVRRAEARSQSLPAVTPPELEQESKPGDPDATDPST

SEQ ID NO: 10565 - protein, 493 aa, Homo sapiens
MASGILVNVKEEVTCPICLELLTQPLSLDCGHSFCQACLTANHKKSMLDKGESSCPVCRISYQPENIRPNRHVANIVEKLREVKLSPEGQKVDHCARHGEKLLLFCQEDGKVICWLCERSQEHRGHHTFLTEEVAREYQVKLQAALEMLRQKQQEAEELEADIREEKASWKTQIQYDKTNVLADFEQLRDILDWEESNELQNLEKEEEDILKSLTNSETEMVQQTQSLRELISDLEHRLQGSVMELLQGVDGVIKRTENVTLKKPETFPKNQRRVFRAPDLKGMLEVFRELTDVRRYWVDVTVAPNNISCAVISEDKRQVSSPKPQIIYGARGTRYQTFVNFNYCTGILGSQSITSGKHYWEVDVSKKTAWILGVCAGFQPDAMCNIEKNENYQPKYGYWVIGLEEGVKCSAFQDSSFHTPSVPFIVPLSVIICPDRVGVFLDYEACTVSFFNITNHGFLIYKFSHCSFSQPVFPYLNPRKCGVPMTLCSPSS

SEQ ID NO: 10566 - protein, 965 aa, Homo sapiens
MALLCGLGQVTLRIWVSLPSQSENGIGFLAARAFLRSGGMEALTTQLGPGREGSSSPNSKQELQPYSGSSALKPNQVGETSLYGVPIVSLVIDGQERLCLAQISNTLLKNYSYNEIHNRRVALGITCVQCTPVQLEILRRAGAMPISSRRCGMITKREAERLCKSFLGEHKPPKLPENFAFDVVHECAWGSRGSFIPARYNSSRAKCIKCGYCSMYFSPNKFIFHSHRTPDAKYTQPDAANFNSWRRHLKLSDKSATDELSHAWEDVKAMFNGGTRKRTFSLQGGGGGGANGGSGGQGKGGAGGGGGGGPGCGAEMAPGPPPHKSLRCGEDEAAGPPGPPPPHPQRGLGLATGASGPAGPGGPGGGAGVRSYPVIPVPSKGFGLLQKLPPPLFPHPYGFPTAFGLCPKKDDPVLGAGEPKGGPGTGSGGGGAGTGGGAGGPGASHLPPGAGAGPGGGAMFWGHQPSGAAKDAAAVAAAAAAATVYPTFPMFWPAAGSLPVPSYPAAQSQAKAVAAAVAAAAAAAAAAAGSGAPEPLDGAEPAKESGLGAEERCPSALSRGPLDEDGTDEALPPPLAPLPPPPPPPARKGSYVSAFRPVVKDTESIAKLYGSAREAYGAGPARGPGPGAGSGGYVSPDFLSEGSSSYNSASPDVDTADEPEVDVESNRFPDDEDAQEETEPSAPSAGGGPDGEQPTGPPSATSSGADGPANSPDGGSPRPRRRLGPPPAGRPAFGDLAAEDLVRRPERSPPSGGGGYELREPCGPLGGPAPAKVFAPERDEHVKSAAVALGPAASYVCTPEAHEPDKEDNHSPADDLETRKSYPDQRSISQPSPANTDRGEDGLTLDVTGTHLVEKDIENLAREELQKLLLEQMELRKKLEREFQSLKDNFQDQMKRELAYREEMVQQLQIVRDTLCNELDQERKARYAIQQKLKEAHDALHHFSCKMLTPRHCTGNCSFKPPLLP

SEQ ID NO: 10567 - protein, 1124 aa, Homo sapiens
MDSLASLVLCGVSLLLSGTVEGAMDLILINSLPLVSDAETSLTCIASGWRPHEPITIGRDFEALMNQHQDPLEVTQDVTREWAKKVVWKREKASKINGAYFCEGRVRGEAIRIRTMKMRQQASFLPATLTMTVDKGDNVNISFKKVLIKEEDAVIYKNGSFIHSVPRHEVPDILEVHLPHAQPQDAGVYSARYIGGNLFTSAFTRLIVRRCEAQKWGPECNHLCTACMNNGVCHEDTGECICPPGFMGRTCEKACELHTFGRTCKERCSGQEGCKSYVFCLPDPYGCSCATGWKGLQCNEACHPGFYGPDCKLRCSCNNGEMCDRFQGCLCSPGWQGLQCEREGIQRMTPKIVDLPDHIEVNSGKFNPICKASGWPLPTNEEMTLVKPDGTVLHPKDFNHTDHFSVAIFTIHRILPPDSGVWVCSVNTVAGMVEKPFNISVKVLPKPLNAPNVIDTGHNFAVINISSEPYFGDGPIKSKKLLYKPVNHYEAWQHIQVTNEIVTLNYLEPRTEYELCVQLVRRGEGGEGHPGPVRRFTTASIGLPPPRGLNLLPKSQTTLNLTWQPIFPSSEDDFYVEVERRSVQKSDQQNIKVPGNLTSVLLNNLHPREQYVVRARVNTKAQGEWSEDLTAWTLSDILPPQPENIKISNITHSSAVISWTILDGYSISSITIRYKVQGKNEDQHVDVKIKNATITQYQLKGLEPETAYQVDIFAENNIGSSNPAFSHELVTLPESQAPADLGGGKMLLIAILGSAGMTCLTVLLAFLIILQLKRANVQRRMAQAFQNVREEPAVQFNSGTLALNRKVKNNPDPTIYPVLDWNDIKFQDVIGEGNFGQVLKARIKKDGLRMDAAIKRMKEYASKDDHRDFAGELEVLCKLGHHPNIINLLGACEHRGYLYLAIEYAPHGNLLDFLRKSRVLETDPAFAIANSTASTLSSQQLLHFAADVARGMDYLSQKQFIHRDLAARNILVGENYVAKIADFGLSRGQEVYVKKTMGRLPVRWMAIESLNYSVYTTNSDVWSYGVLLWEIVSLGGTPYCGMTCAELYEKLPQGYRLEKPLNCDDEVYDLMRQCWREKPYERPSFAQILVSLNRMLEERKTYVNTTLYEKFTYAGIDCSAEEAA

SEQ ID NO: 10568 - protein, 469 aa, Homo sapiens
MCDLIEPQPAEKIGKMKKLRRTLSESFSRIALKKDDTTFDEICVTKMSTRNCQGMDSVIKPLDTIPEDKKVRVQRTQSTFDPFEKPANQVKRVHSENNACINFKTSSTGKESPKVRRHSSPSSPTSPKFGKADSYEKLEKLGEGSYATVYKGKSKVNGKLVALKVIRLQEEEGTPFTAIREASLLKGLKHANIVLLHDIIHTKETLTLVFEYVHTDLCQYMDKHPGGLHPDNVKLFLFQLLRGLSYIHQRYILHRDLKPQNLLISDTGELKLADFGLARAKSVPSHTYSNEVVTLWYRPPDVLLGSTEYSTCLDMWGVGCIFVEMIQGVAAFPGMKDIQDQLERIFLVLGTPNEDTWPGVHSLPHFKPERFTLYSSKNLRQAWNKLSYVNHAEDLASKLLQCSPKNRLSAQAALSHEYFSDLPPRLWELTDMSSIFTVPNVRLQPEAGESMRAFGKNNSYGKSLSNSKH

SEQ ID NO: 10569 - protein, 891 aa, Homo sapiens
MSQVGGRGDRCTQEVQGLVHGAGDLSASLAENSPTMSQNGYFEDSSYYKCDTDDTFEAREEILGDEAFDTANSSIVSGESIRFFVNVNLEMQATNTENEATSGGCVLLHTSRKYLKLKNFKEEIRAHRDLDGFLAQASIVLNETATSLDNVLRTMLRRFARDPDNNEPNCNLDLLMAMLFTDAGAPMRGKVHLLSDTIQGVTATVTGVRYQQSWLCIICTMKALQKRHVCISRLVRPQNWGENSCEVRFVILVLAPPKMKSTKTAMEVARTFATMFSDIAFRQKLLETRTEEEFKEALVHQRQLLTMVSHGPVAPRTKERSTVSLPAHRHPEPPKCKDFVPFGKGIREDIARRFPLYPLDFTDGIIGKNKAVGKYITTTLFLYFACLLPTIAFGSLNDENTDGAIDVQKTIAGQSIGGLLYALFSGQPLVILLTTAPLALYIQVIRVICDDYDLDFNSFYAWTGLWNSFFLALYAFFNLSLVMSLFKRSTEEIIALFISITFVLDAVKGTVKIFWKYYYGHYLDDYHTKRTSSLVSLSGLGASLNASLHTALNASFLASPTELPSATHSGQATAVLSLLIMLGTLWLGYTLYQFKKSPYLHPCVREILSDCALPIAVLAFSLISSHGFREIEMSKFRYNPSESPFAMAQIQSLSLRAVSGAMGLGFLLSMLFFIEQNLVAALVNAPENRLVKGTAYHWDLLLLAIINTGLSLFGLPWIHAAYPHSPLHVRALALVEERVENGHIYDTIVNVKETRLTSLGASVLVGLSLLLLPVPLQWIPKPVLYGLFLYIALTSLDGNQLVQRVALLLKEQTAYPPTHYIRRVPQRKIHYFTGLQVLQLLLLCAFGMSSLPYMKMIFPLIMIAMIPIRYILLPRIIEAKYLDVMDAEHRP

SEQ ID NO: 10570 - protein, 918 aa, Homo sapiens
MGVYGPQDRSESEKRDVQRDPPPWHPRREGERPARARSLPLAAAGQGFLRKTWISEHENSPTMSQNGYFEDSSYYKCDTDDTFEAREEILGDEAFDTANSSIVSGESIRFFVNVNLEMQATNTENEATSGGCVLLHTSRKYLKLKNFKEEIRAHRDLDGFLAQASIVLNETATSLDNVLRTMLRRFARDPDNNEPNCNLDLLMAMLFTDAGAPMRGKVHLLSDTIQGVTATVTGVRYQQSWLCIICTMKALQKRHVCISRLVRPQNWGENSCEVRFVILVLAPPKMKSTKTAMEVARTFATMFSDIAFRQKLLETRTEEEFKEALVHQRQLLTMVSHGPVAPRTKERSTVSLPAHRHPEPPKCKDFVPFGKGIREDIARRFPLYPLDFTDGIIGKNKAVGKYITTTLFLYFACLLPTIAFGSLNDENTDGAIDVQKTIAGQSIGGLLYALFSGQPLVILLTTAPLALYIQVIRVICDDYDLDFNSFYAWTGLWNSFFLALYAFFNLSLVMSLFKRSTEEIIALFISITFVLDAVKGTVKIFWKYYYGHYLDDYHTKRTSSLVSLSGLGASLNASLHTALNASFLASPTELPSATHSGQATAVLSLLIMLGTLWLGYTLYQFKKSPYLHPCVREILSDCALPIAVLAFSLISSHGFREIEMSKFRYNPSESPFAMAQIQSLSLRAVSGAMGLGFLLSMLFFIEQNLVAALVNAPENRLVKGTAYHWDLLLLAIINTGLSLFGLPWIHAAYPHSPLHVRALALVEERVENGHIYDTIVNVKETRLTSLGASVLVGLSLLLLPVPLQWIPKPVLYGLFLYIALTSLDGNQLVQRVALLLKEQTAYPPTHYIRRVPQRKIHYFTGLQVLQLLLLCAFGMSSLPYMKMIFPLIMIAMIPIRYILLPRIIEAKYLDVMDAEHRP

SEQ ID NO: 10571 - protein, 1630 aa, Homo sapiens
MPFAKRIVEPQWLCRQRRPAPGPAVDASGGSAEPPPPLQPPGRRDLDEVEAPGPEEPARAVPAPSGLPPPPPPLPAPADQTQPPHGEASVAGEESTAGIPEAAPAAGEASSAAAAAAVLLMLDLCAVSNAALARVLRQLSDVARHACSLFQELESDIQLTHRRVWALQGKLGGVQRVLSTLDPKQEAVPVSNLDIESKLSVYYRAPWHQQRNIFLPATRPPCVEELHRHARQSLQALRREHRSRSDRREQRAAAPLSIAAPPLPAYPPAHSQRRREFKDRHFLTSHPPEDEDTDVMLGQRPKNPIHNIPSTLDKQTNWSKALPLPTPEEKMKQDAQVISSCIIPINVTGVGFDREASIRCSLVHSQSVLQRRRKLRRRKTISGIPRRVQQEIDSDESPVARERNVIVHTNPDPSNTVNRISGTRDSECQTEDILIAAPSRRRIRAQRGQSIAASLSHSAGNISALADKGDTMFTPAVSSRTRSRSLPREGNRGGDAEPKVGAKPSAYEEGESFVGDHERTPNDFSEAPSSPSAQDHQPTLGLACSQHLHSPQHKLSERGRSRLSRMAADSGSCDISSNSDTFGSPIHCISTAGVLLSSHMDQKDDHQSSSGNWSGSSSTCPSQTSETIPPAASPPLTGSSHCDSELSLNTAPHANEDASVFVTEQYNDHLDKVRGHRANSFTSTVADLLDDPNNSNTSDSEWNYLHHHHDASCRQDFSPERPKADSLGCPSFTSMATYDSFLEKSPSDKADTSSHFSVDTEGYYTSMHFDCGLKGNKSYVCHYAALGPENGQGVGASPGLPDCAWQDYLDHKRQGRPSISFRKPKAKPTPPKRSSSLRKSDGNADISEKKEPKISSGQHLPHSSREMKLPLDFANTPSRMENANLPTKQEPSWINQSEQGIKEPQLDASDIPPFKDEVAESTHYADLWLLNDLKTNDPYRSLSNSSTATGTTVIECIKSPESSESQTSQSESRATTPSLPSVDNEFKLASPEKLAGLASPSSGYSSQSETPTSSFPTAFFSGPLSPGGSKRKPKVPERKSSLQQPSLKDGTISLSKDLELPIIPPTHLDLSALHNVLNKPFHHRHPLHVFTHNKQNTVGETLRSNPPPSLAITPTILKSVNLRSINKSEEVKQKEENNTDLPYLEESTLTTAALSPSKIRPHTANKSVSRQYSTEDTILSFLDSSAVEMGPDKLHLEKNSTFDVKNRCDPETITSAGSSLLDSNVTKDQVRTETEPIPENTPTKNCAFPTEGFQRVSAARPNDLDGKIIQYGPGPDETLEQVQKAPSAGLEEVAQPESVDVITSQSDSPTRATDVSNQFKHQFVMSRHHDKVPGTISYESEITSVNSFPEKCSKQENIASGISAKSASDNSKAEETQGNVDEASLKESSPSDDSIISPLSEDSQAEAEGVFVSPNKPRTTEDLFAVIHRSKRKVLGRKDSGDMSVRSKSRAPLSSSSSSASSITSPSSNVTTPNSQRSPGLIYRNAKKSNTSNEEFKLLLLKKGSRSDSSYRMSATEILKSPILPKPPGELTAESPQSTDDAHQGSQGAEALSPLSPCSPRVNAEGFSSKSFATSASARVGRSRAPPAASSSRYSVRCRLYNTPMQAISEGETENSDGSPHDDRSSQSST

SEQ ID NO: 10572 - protein, 722 aa, Homo sapiens
MPSPQTDTPGPELQSPKEAEEPQTPAQGSRRTSSRKEPNAHRKDGTRLGLGSLRQAFSRASQRALTQVSKEDTGLFRRSSCSLFRSFRQALNDGPATGHSQATPEVPSGVMNGVSQQASTGAASEELKPEAEGKSVADLITERQLLAAFEQLLRLETLLVAEKASRTFEQDPTAFARRAMDVCLLYDGLAAEIGAIVRETLDSDGVDAAALAELARVVSAEEEAHPSPPDDGDFLRTPRRWRQHWEEAVRRSAQERVRRPGAGWAFGEAEGASGLAQLLAELGGLVRRDLQKVRQEVQPAYAAAGFPAWEVYLRAFHSAVAQRLQELARDARGCEQLYILLDWAANVYGSPDFLGAPGLALPAEPLPPLLAPDVWARLESDYTSFLEAKIASCFDSILQLEQSHWAAAEVPEVLQGLYQAPLSMDVHMLVAEHVKAAGAISAELEATTLRICTRALGLFVPRFEKAFLASEAVSEPHLGAYINACEELRTSLLSRFPGTQEELEKPLVTATCSFQKHLLQGLQRELQPLFRVVCTRDWLTQDWLHPLMDKVVTFAGHLQRVARPRAQETLQEVHRFVVREYLARALRPRERFRGMERMHGSQKMSLDAQAISDTFQGLGSEATWLDQAIQCVAEILGETYKDDIQRHLETLIRSYPDIRRDHILAILALRRLGRQRNQHLLQHTQDLLRAAAGAAGAEAPRGRVLFEEIKVPSAMAVLITCV

SEQ ID NO: 10573 - protein, 459 aa, Homo sapiens
MEKTCIDALPLTMNSSEKQETVCIFGTGDFGRSLGLKMLQCGYSVVFGSRNPQKTTLLPSGAEVLSYSEAAKKSGIIIIAIHREHYDFLTELTEVLNGKILVDISNNLKINQYPESNAEYLAHLVPGAHVVKAFNTISAWALQSGALDASRQVFVCGNDSKAKQRVMDIVRNLGLTPMDQGSLMAAKEIEKYPLQLFPMWRFPFYLSAVLCVFLFFYCVIRDVIYPYVYEKKDNTFRMAISIPNRIFPITALTLLALVYLPGVIAAILQLYRGTKYRRFPDWLDHWMLCRKQLGLVALGFAFLHVLYTLVIPIRYYVRWRLGNLTVTQAILKKENPFSTSSAWLSDSYVALGILGFFLFVLLGITSLPSVSNAVNWREFRFVQSKLGYLTLILCTAHTLVYGGKRFLSPSNLRWYLPAAYVLGLIIPCTVLVIKFVLIMPCVDNTLTRIRQGWERNSKH

SEQ ID NO: 10574 - protein, 390 aa, Homo sapiens
MELGSRRRSVGCRCRGLCLAVRREQVTFEDVVVGFSQEEWGQLKPAQRTLYRDVMLDTFRLLVSVGHWLPKPNVISLLEQEAELWAVESRLPQGVYPDLETRPKVKLSVLKQGISEEISNSVILVERFLWDGLWYCRGEDTEGHWEWSCESLESLAVPVAFTPVKTPVLEQWQRNGFGENISLNPDLPHQPMTPERQSPHTWGTRGKREKPDLNVLQKTCVKEKPYKCQECGKAFSHSSALIEHHRTHTGERPYECHECLKGFRNSSALTKHQRIHTGEKPYKCTQCGRTFNQIAPLIQHQRTHTGEKPYECSECGKSFSFRSSFSQHERTHTGEKPYECSECGKAFRQSIHLTQHLRIHTGEKPYQCGECGKAFTHSSSLTKHQRTHTG

SEQ ID NO: 10575 - protein, 516 aa, Homo sapiens
MCGSERILQAGNILEIRVGQAGARRVATMTSPVLVDIREEVTCPICLELLTEPLSIDCGHSFCQACITPNGRESVIGQEGERSCPVCQTSYQPGNLRPNRHLANIVRRLREVVLGPGKQLKAVLCADHGEKLQLFCQEDGKVICWLCERSQEHRGHHTFLVEEVAQEYQEKFQESLKKLKNEEQEAEKLTAFIREKKTSWKNQMEPERCRIQTEFNQLRNILDRVEQRELKKLEQEEKKGLRIIEEAENDLVHQTQSLRELISDLERRCQGSTMELLQDVSDVTERSEFWTLRKPEALPTKLRSMFRAPDLKRMLRVCRELTDVQSYWVDVTLNPHTANLNLVLAKNRRQVRFVGAKVSGPSCLEKHYDCSVLGSQHFSSGKHYWEVDVAKKTAWILGVCSNSLGPTFSFNHFAQNHSAYSRYQPQSGYWVIGLQHNHEYRAYEDSSPSLLLSMTVPPRRVGVFLDYEAGTVSFYNVTNHGFPIYTFSKYYFPTTLCPYFNPCNCVIPMTLRRPSS

SEQ ID NO: 10576 - protein, 1012 aa, Homo sapiens
MPASAPPRRPRPPPPSLSLLLVLLGLGGRRLRAEPGDGAQTWARFSRPPAPEAAGLFQGTFPDGFLWAVGSAAYQTEGGWQQHGKGASIWDTFTHHPLAPPGDSRNASLPLGAPSPLQPATGDVASDSYNNVFRDTEALRELGVTHYRFSISWARVLPNGSAGVPNREGLRYYRRLLERLRELGVQPVVTLYHWDLPQRLQDAYGGWANRALADHFRDYAELCFRHFGGQVKYWITIDNPYVVAWHGYATGRLAPGIRGSPRLGYLVAHNLLLAHAKVWHLYNTSFRPTQGGQVSIALSSHWINPRRMTDHSIKECQKSLDFVLGWFAKPVFIDGDYPESMKNNLSSILPDFTESEKKFIKGTADFFALCFGPTLSFQLLDPHMKFRQLESPNLRQLLSWIDLEFNHPQIFIVENGWFVSGTTKRDDAKYMYYLKKFIMETLKAIKLDGVDVIGYTAWSLMDGFEWHRGYSIRRGLFYVDFLSQDKMLLPKSSALFYQKLIEKNGFPPLPENQPLEGTFPCDFAWGVVDNYIQVDTTLSQFTDLNVYLWDVHHSKRLIKVDGVVTKKRKSYCVDFAAIQPQIALLQEMHVTHFRFSLDWALILPLGNQSQVNHTILQYYRCMASELVRVNITPVVALWQPMAPNQGLPRLLARQGAWENPYTALAFAEYARLCFQELGHHVKLWITMNEPYTRNMTYSAGHNLLKAHALAWHVYNEKFRHAQNGKISIALQADWIEPACPFSQKDKEVAERVLEFDIGWLAEPIFGSGDYPWVMRDWLNQRNNFLLPYFTEDEKKLIQGTFDFLALSHYTTILVDSEKEDPIKYNDYLEVQEMTDITWLNSPSQVAVVPWGLRKVLNWLKFKYGDLPMYIISNGIDDGLHAEDDQLRVYYMQNYINEALKAHILDGINLCGYFAYSFNDRTAPRFGLYRYAADQFEPKASMKHYRKIIDSNGFPGPETLERFCPEEFTVCTECSFFHTRKSLLAFIAFLFFASIISLSLIFYYSKKGRRSYK

SEQ ID NO: 10577 - protein, 462 aa, Homo sapiens
MTSPVLVDIREEVTCPICLELLTEPLSIDCGHSFCQACITPNGRESVIGQEGERSCPVCQTSYQPGNLRPNRHLANIVRRLREEDGKVICWLCERSQEHRGHHTFLVEEVAQEYQEKFQESLKKLKNEEQEAEKLTAFIREKKTSWKNQMEPERCRIQTEFNQLRNILDRVEQRELKKLEQEEKKGLRIIEEAENDLVHQTQSLRELISDLERRCQGSTMELLQDVSDVTERSEFWTLRKPEALPTKLRSMFRAPDLKRMLRVCRELTDVQSYWVDVTLNPHTANLNLVLAKNRRQVRFVGAKVSGPSCLEKHYDCSVLGSQHFSSGKHYWEVDVAKKTAWILGVCSNSLGPTFSFNHFAQNHSAYSRYQPQSGYWVIGLQHNHEYRAYEDSSPSLLLSMTVPPRRVGVFLDYEAGTVSFYNVTNHGFPIYTFSKYYFPTTLCPYFNPCNCVIPMTLRRPSS

SEQ ID NO: 10578 - protein, 389 aa, Homo sapiens
MAVRLCDVASLLRSGSWAAEPWTGQVIAAMETQLSNGPTCNNTANGPTTINNNCSSPVDSGNTEDSKTNLIVNYLPQNMTQEELKSLFGSIGEIESCKLVRDKITGQSLGYGFVNYIDPKDAEKAINTLNGLRLQTKTIKVSYARPSSASIRDANLYVSGLPKTMTQKELEQLFSQYGRIITSRILVDQVTGISRGVGFIRFDKRIEAEEAIKGLNGQKPPGATEPITVKFANNPSQKTNQAILSQLYQSPNRRYPGPLAQQAQRFRLDNLLNMAYGVKSRFSPMTIDGMTSLAGINIPGHPGTGWCIFVYNLAPDADESILWQMFGPFGAVTNVKVIRDFNTNKCKGFGFVTMTNYDEAAMAIASLNGYRLGDRVLQVSFKTNKTHKA

SEQ ID NO: 10579 - protein, 194 aa, Homo sapiens
MAASLVGKKIVFVTGNAKKLEEVVQILGDKFPCTLVAQKIDLPEYQGEPDEISIQKCQEAVRQVQGPVLVEDTCLCFNALGGLPGPYIKWFLEKLKPEGLHQLLAGFEDKSAYALCTFALSTGDPSQPVRLFRGRTSGRIVAPRGCQDFGWDPCFQPDGYEQTYAEMPKAEKNAVSHRFRALLELQEYFGSLAA

SEQ ID NO: 10580 - protein, 359 aa, Homo sapiens
METQLSNGPTCNNTANGPTTINNNCSSPVDSGNTEDSKTNLIVNYLPQNMTQEELKSLFGSIGEIESCKLVRDKITGQSLGYGFVNYIDPKDAEKAINTLNGLRLQTKTIKVSYARPSSASIRDANLYVSGLPKTMTQKELEQLFSQYGRIITSRILVDQVTGISRGVGFIRFDKRIEAEEAIKGLNGQKPPGATEPITVKFANNPSQKTNQAILSQLYQSPNRRYPGPLAQQAQRFRLDNLLNMAYGVKRFSPMTIDGMTSLAGINIPGHPGTGWCIFVYNLAPDADESILWQMFGPFGAVTNVKVIRDFNTNKCKGFGFVTMTNYDEAAMAIASLNGYRLGDRVLQVSFKTNKTHKA

SEQ ID NO: 10581 - protein, 528 aa, Homo sapiens
MATRVEEAARGRGGGAEEATEAGRGGRRRSPRQKFEIGTMEEAGICGLGVKADMLCNSQSNDILQHQGSNCGGTSNKHSLEEDEGSDFITENRNLVSPAYCTQESREEIPGGEARTDPPDGQQDSECNRNKEKTLGKEVLLLMQALNTLSTPEEKLAALCKKYADLLEESRSVQKQMKILQKKQAQIVKEKVHLQSEHSKAILARSKLESLCRELQRHNKTLKEENMQQAREEEERRKEATAHFQITLNEIQAQLEQHDIHNAKLRQENIELGEKLKKLIEQYALREEHIDKVFKHKELQQQLVDAKLQQTTQLIKEADEKHQREREFLLKEATESRHKYEQMKQQEVQLKQQLSLYMDKFEEFQTTMAKSNELFTTFRQEMEKMTKKIKKLEKETIIWRTKWENNNKALLQMAEEKTVRDKEYKALQIKLERLEKLCRALQTERNELNEKVEVLKEQVSIKAAIKAANRDLATPVMQPCTALDSHKELNTSSKRALGAHLEAEPKSQRSAVQKPPSTGSAPAIESVD

SEQ ID NO: 10582 - protein, 148 aa, Homo sapiens
MSLGKRKPSNFYLANFLGKECILSGIMSVNGKKVLHMDRNPYYGGESASITPLEDLYKRFKIPGSPPESMGRGRDWNVDLIPKFLMANGQLVKMLLYTEVTRYLDFKVTEGSFVYKGGKIYKVPSTEAEALASSLMGLFEKRRFRKFL

SEQ ID NO: 10583 - protein, 243 aa, Homo sapiens
MEDSFLQSFGRLSLQPQQQQQRQRPPRPPPRGTPPRRHSFRKHLYLLRGLPGSGKTTLARQLQHDFPRALIFSTDDFFFREDGAYEFNPDFLEEAHEWNQKRARKAMRNGISPIIIDNTNLHAWEMKPYAVMALENNYEVIFREPDTRWKFNVQELARRNIHGVSREKIHRMKERYEHDVTFHSVLHAEKPSRMNRNQDRNNALPSNNARYWNSYTEFPNRRAHGGFTNESSYHRRGGCHHGY

SEQ ID NO: 10584 - protein, 173 aa, Homo sapiens
MEDSFLQSFGRLSLQPQQQQQRQRPPRPPPRGTPPRRHSFRKHLYLLRGLPGSGKTTLARQLQHDFPRALIFSTDDFFFREDGAYEFNPDFLEEAHEWNQKRARKAMRNGISPIIIDNTNLHAWEMKPYAVMVFQTEQKNLFRLEMDMVVFRPEMKKHSWCLKRKNPPNERTV

SEQ ID NO: 10585 - protein, 867 aa, Homo sapiens
MGRNRSWGTLGSGRTSTPGHQSGPLTRRRAVSQLYRRYLLFSISASDPSLRSGTQAPDIHLGEPARGTGCVRGKQTSIRVQDCGRREEARAASRELRREKAQEHPRESWAHPQPYPAPQPLALRPETQPCPACRSSPPGRLLLRPALPGHPFLLPIMAVYRLCVTTGPYLRAGTLDNISVTLVGTCGESPKQRLDRMGRDFAPGSVQKYKVRCTAELGELLLLRVHKERYAFFRKDSWYCSRICVTEPDGSVSHFPCYQWIEGYCTVELRPGTARTICQDSLPLLLDHRTRELRARQECYRWKIYAPGFPCMVDVNSFQEMESDKKFALTKTTTCVDQGDSSGNRYLPGFPMKIDIPSLMYMEPNVRYSATKTISLLFNAIPASLGMKLRGLLDRKGSWKKLDDMQNIFWCHKTFTTKYVTEHWCEDHFFGYQYLNGVNPVMLHCISSLPSKLPVTNDMVAPLLGQDTCLQTELERGNIFLADYWILAEAPTHCLNGRQQYVAAPLCLLWLSPQGALVPLAIQLSQTPGPDSPIFLPTDSEWDWLLAKTWVRNSEFLVHENNTHFLCTHLLCEAFAMATLRQLPLCHPIYKLLLPHTRYTLQVNTIARATLLNPEGLVDQVTSIGRQGLIYLMSTGLAHFTYTNFCLPDSLRARGVLAIPNYHYRDDGLKIWAAIESFVSEIVGYYYPSDASVQQDSELQAWTGEIFAQAFLGRESSGFPSRLCTPGEMVKFLTAIIFNCSAQHAAVNSGQHDFGAWMPNAPSSMRQPPPQTKGTTTLKTYLDTLPEVNISCNNLLLFWLVSQEPKDQRPLGTYPDEHFTEEAPRRSIAAFQSRLAQISRDIQERNQGLALPYTYLDPPLIENSVSI

SEQ ID NO: 10586 - protein, 116 aa, Homo sapiens
MEPAAGSSMEPSADWLATAAARGRVEEVRALLEAGALPNAPNSYGRRPIQVGRGSAAGAGDGGRLWRTKFAGELESGSASILRKKGRLPGEFSEGVCNHRPPPGDALGAWEAKEEE

SEQ ID NO: 10587 - protein, 3418 aa, Homo sapiens [sequence omitted]

SEQ ID NO: 10588 - protein, 647 aa, Homo sapiens
MAEFRVRVSTGEAFGAGTWDKVSVSIVGTRGESPPLPLDNLGKEFTAGAEEDFQVTLPEDVGRVLLLRVHKAPPVLPLLGPLAPDAWFCRWFQLTPPRGGHLLFPCYQWLEGAGTLVLQEGTAKVSWADHHPVLQQQRQEELQARQEMYQWKAYNPGWPHCLDEKTVEDLELNIKYSTAKNANFYLQAGSAFAEMKIKGLLDRKGLWRSLNEMKRIFNFRRTPAAEHAFEHWQEDAFFASQFLNGLNPVLIRRCHYLPKNFPVTDAMVASVLGPGTSLQAELEKGSLFLVDHGILSGIQTNVINGKPQFSAAPMTLLYQSPGCGPLLPLAIQLSQTPGPNSPIFLPTDDKWDWLLAKTWVRNAEFSFHEALTHLLHSHLLPEVFTLATLRQLPHCHPLFKSTGIGIEGFSELIQRNMKQLNYSLLCLPEDIRTRGVEDIPGYYYRDDGMQIWGAVERFVSEIIGIYYPSDESVQDDRELQAWVREIFSKGFLNQESSGIPSSLETREALVQYVTMVIFTCSAKHAAVSAGQFDSCAWMPNLPPSMQLPPPTSKGLATCEGFIATLPPVNATCDVILALWLLSKEPGDQRPLGTYPDEHFTEEAPRRSIATFQSRLAQISRGIQERNQGLVLPYTYLDPPLIENSVSI

SEQ ID NO: 10589 - protein, 234 aa, Homo sapiens
MSNYSVSLVGPAPWGFRLQGGKDFNMPLTISSLKDGGKAAQANVRIGDVVLSIDGINAQGMTHLEAQNKIKGCTGSLNMTLQRASAAPKPEPVPVQKPTVTSVCSETSQELAEGQRRGSQGDSKQQNGKIPPKRPPRKHIVERYTEFYHVPTHSDASKKRLIEDTEDWRPRTGTTQSRSFRILAQITGTEHLKESEADNTKKAKEKIPLHVFSPKYTKLRDWHHEVSARALNVQ

SEQ ID NO: 10590 - protein, 676 aa, Homo sapiens
MAEFRVRVSTGEAFGAGTWDKVSVSIVGTRGESPPLPLDNLGKEFTAGAEEDFQVTLPEDVGRVLLLRVHKAPPVLPLLGPLAPDAWFCRWFQLTPPRGGHLLFPCYQWLEGAGTLVLQEGTAKVSWADHHPVLQQQRQEELQARQEMYQWKAYNPGWPHCLDEKTVEDLELNIKYSTAKNANFYLQAGSAFAEMKIKGLLDRKGLWRSLNEMKRIFNFRRTPAAEHAFEHWQEDAFFASQFLNGLNPVLIRRCHYLPKNFPVTDAMVASVLGPGTSLQAELEKGSLFLVDHGILSGIQTNVINGKPQFSAAPMTLLYQSPGCGPLLPLAIQLSQTPGPNSPIFLPTDDKWDWLLAKTWVRNAEFSFHEALTHLLHSHLLPEVFTLATLRQLPHCHPLFKLLIPHTRYTLHINTLARELLIVPGQVVDRSTGIGIEGFSELIQRNMKQLNYSLLCLPEDIRTRGVEDIPGYYYRDDGMQIWGAVERFVSEIIGIYYPSDESVQDDRELQAWVREIFSKGFLNQESSGIPSSLETREALVQYVTMVIFTCSAKHAAVSAGQFDSCAWMPNLPPSMQLPPPTSKGLATCEGFIATLPPVNATCDVILALWLLSKEPGDQRPLGTYPDEHFTEEAPRRSIATFQSRLAQISRGIQERNQGLVLPYTYLDPPLIENSVSI

SEQ ID NO: 10591 - protein, 475 aa, Homo sapiens
MWHAISRTSRMSQSGCPSGLLADKNISSSATRVIVKTAGNQKDFMVADDISVRQFKEMLLAHFQCQMDQLVLVFMGCLLKDHDTLSQRGIMDGHTIYLVIKSKQGSRSLAHSFRDLPTNDPCHRDRNTKGNSSRVHQPTGMNQAPVELAHFVGSDAPKVHTQNLEVSHPECKAQMLENPSIQRLLSNMEFMWQFISEHLDTQQLMQQNPEVSRLLLDNSEILLQTLELARNLAMIQEIMQIQQPSQNLEYPLNPQPYLGLETMPGGNNALGQNYADINDQMLNSMQDPFGGNPFTALLAGQVLEQVQSSPPPPPPSQEQQDQLTQHPATRVIYNSSGGFSSNTSANDTLNKVNHTSKANTAMISTKGQSHICATRQPAWIPALPSIELTQQLQEEYKDATVSLSSSRQTLKGDLQLSDEQSSSQITGGMMQLLMNNPYLAAQIMLFTSMPQLSEQWRQQLPTFLQQTQISDLLSA

SEQ ID NO: 10592 - protein, 195 aa, Homo sapiens
MATAAQGPLSLLWGWLWSERFWLPENVSWADLEGPADGYGYPRGRHILSVFPLAAGIFFVRLLFERFIAKPCALCIGIEDSGPYQAQPNAILEKVFISITKYPDKKRLEGLSKQLDWNVRKIQCWFRHRRNQDKPPTLTKFCESIHLGSGTSDSAGITIHFSLFQVGFITIISWNWPSIGPLCFLSLQTLKERTS

SEQ ID NO: 10593 - protein, 298 aa, Homo sapiens
MVAPVWYLVAAALLVGFILFLTRSRGRAASAGQEPLHNEELAGAGRVAQPGPLEPEEPRAGGRPRRRRDLGSRLQAQRRAQRVAWAEADENEEEAVILAQEEEGVEKPAETHLSGKIGAKKLRKLEEKQARKAQREAEEAEREERKRLESQREAEWKKEEERLRLEEEQKEEEERKAREEQAQREHEEYLKLKEAFVVEEEGVGETMTEEQSQSFLTEFINYIKQSKVVLLEDLASQVGLRTQVSPGTWPAVCSVARGLWLAERTCPKDRVLMHRLPCPQPRVSSAQKSPGTLGILHF

SEQ ID NO: 10594 - protein, 314 aa, Homo sapiens
MLGLNGTPFQPATLQLTGIPGIQTGLTWVALIFCILYMISIVGNLSILTLVFWEPALHQPMYYFLSMLALNDLGVSFSTLPTVISTFCFNYNHVAFNACLVQMFFIHTFSFMESGILLAMSLDRFVAICYPLRYVTVLTHNRILAMGLGILTKSFTTLFPFPFVVKRLPFCKGNVLHHSYCLHPDLMKVACGDIHVNNIYGLLVIIFTYGMDSTFILLSYALILRAMLVIISQEQRLKALNTCMSHICAVLAFYVPIIAVSMIHRFWKSAPPVVHVMMSNVYLFVPPMLNPIIYSVKTKEIRKGILKFFHKSQA

SEQ ID NO: 10595 - protein, 189 aa, Homo sapiens
MALSFSLLMAVLVLSYKSICSLGCDLPQTHSLGNRRALILLAQMGRISHFSCLKDRYDFGFPQEVFDGNQFQKAQAISAFHEMIQQTFNLFSTKDSSAAWDETLLDKFYIELFQQLNDLEACVTQEVGVEEIALMNEDSILAVRKYFQRITLYLMGKKYSPCAWEVVRAEIMRSFSFSTNLQKGLRRKD

SEQ ID NO: 10596 - protein, 312 aa, Homo sapiens
MGLNKSASTFQLTGFPGMEKAHHWIFIPLLAAYISILLGNGTLLFLIRNDHNLHEPMYYFLAMLAATDLGVTLTTMPTVLGVLWLDHREIGHGACFSQAYFIHTLSVMESGVLLAMAYDCFITIRSPLRYTSILTNTQVMKIGVRVLTRAGLSIMPIVVRLHWFPYCRSHVLSHAFCLHQDVIKLACADITFNRLYPVVVLFAMVLLDFLIIFFSYILILKTVMGIGSGGERAKALNTCVSHICCILVFYVTVVCLTFIHRFGKHVPHVVHITMSYIHFLFPPFMNPFIYSIKTKQIQSGILRLFSLPHSRA

SEQ ID NO: 10597 - protein, 189 aa, Homo sapiens
MALPFALMMALVVLSCKSSCSLGCNLSQTHSLNNRRTLMLMAQMRRISPFSCLKDRHDFEFPQEEFDGNQFQKAQAISVLHEMMQQTFNLFSTKNSSAAWDETLLEKFYIELFQQMNDLEACVIQEVGVEETPLMNEDSILAVKKYFQRITLYLMEKKYSPCAWEVVRAEIMRSLSFSTNLQKRLRRKD

SEQ ID NO: 10598 - protein, 3012 aa, Homo sapiens
MASQQDSGFFEISIKYLLKSWSNTSPVGNGYIKPPVPPASGTHREKGPPTMLPINVDPDSKPGEYVLKSLFVNFTTQAERKIRIIMAEPLEKPLTKSLQRGEDPQFDQVISSMSSLSEYCLPSILRTLFDWYKRQNGIEDESHEYRPRTSNKSKSDEQQRDYLMERRDLAIDFIFSLVLIEVLKQIPLHPVIDSLIHDVINLAFKHFKYKEGYLGPNTGNMHIVADLYAEVIGVLAQAKFPAVKKKFMAELKELRHKEQNPYVVQSIISLIMGMKFFRIKMYPVEDFEASLQFMQECAHYFLEVKDKDIKHALAGLFVEILVPVAAAVKNEVNVPCLRNFVESLYDTTLELSSRKKHSLALYPLVTCLLCVSQKQLFLNRWHIFLNNCLSNLKNKDPKMARVALESLYRLLWVYMIRIKCESNTATQSRLITIITTLFPKGSRGVVPRDMPLNIFVKIIQFIAQERLDFAMKEIIFDFLCVGKPAKAFSLNPERMNIGLRAFLVIADSLQQKDGEPPMPVTGAVLPSGNTLRVKKTYLSKTLTEEEAKMIGMSLYYSQVRKAVDNILRHLDKEVGRCMMLTNVQMLNKEPEDMITGERKPKIDLFRTCVAAIPRLLPDGMSKLELIDLLARLSIHMDDELRHIAQNSLQGLLVDFSDWREDVLFGFTNFLLREVNDMHHTLLDSSLKLLLQLLTQWKLVIQTQGKVYEQANKIRNSELIANGSSHRIQSERGPHCSVLHAVEGFALVLLCSFQVATRKLSVLILKEIRALFIALGQPEDDDRPMIDVMDQLSSSILESFIHVAVSDSATLPLTHNVDLQWLVEWNAVLVNSHYDVKSPSHVWIFAQSVKDPWVLCLFSFLRQENLPKHCPTALSYAWPYAFTRLQSVMPLVDPNSPINAKKTSTAGSGDNYVTLWRNYLILCFGVAKPSIMSPGHLRASTPEIMATTPDGTVSYDNKAIGTPSVGVLLKQLVPLMRLESIEITESLVLGFGRTNSLVFRELVEELHPLMKEALERRPENKKRRERRDLLRLQLLRIFELLADAGVISDSTNGALERDTLALGALFLEYVDLTRMLLEAENDKEVEILKDIRAHFSAMVANLIQCVPVHHRRFLFPQQSLRHHLFILFSQWAGPFSIMFTPLDRYSDRNHQITRYQYCALKAMSAVLCCGPVFDNVGLSPDGYLYKWLDNILACQDLRVHQLGCEVVVLLLELNPDQINLFNWAIDRCYTGSYQLASGCFKAIATVCGSRNYPFDIVTLLNLVLFKASDTNREIYEISMQLMQILEAKLFVYSKKVAEQRPGSILYGTHGPLPPLYSVSLALLSCELARMYPELTLPLFSGKPAIPHNTPQRAPDHAYLPAALAAQHRAGGQQAPPPGSSPSSPEDEVKDREGDVTASHGLRGNGWGSPEATSLVLNNLMYMTAKYGDEVPGPEMENAWNALANNEKWSNNLRITLQFLISLCGVSSDTVLLPYIKKVAIYLCRNNTIQTMEELLFELQQTEPVNPIVQHCDNPPFYRFTASSKASAAASGTTSSSNTVVAGQENFPDAEENKILKESDERFSNVIRAHTRLESRYSNSSGGSYDEDKNDPISPYTGWLLTITETKQPQPLPMPCTGGCWAPLVDYLPETITPRGPLHRCNIAVIFMTEMVVDHSVREDWALHLPLLLHAVFLGLDHYRPEVFEHSKKLLLHLLIALSCNSNFHSIASVLLQTREMGEAKTLTVQPAYQPEYLYTGGFDFLREDQSSPVPDSGLSSSSTSSSISLGGSSGNLPQMTQEVEDVDTAAETDEKANKLIEFLTTRAFGPLWCHEDITPKNQNSKSAEQLTNFLRHVVSVFKDSKSGFHLEHQLSEVALQTALASSSRHYAGRSFQIFRALKQPLSAHALSDLLSRLVEVIGEHGDEIQGYVMEALLTLEAAVDNLSDCLKNSDLLTVLSRSSSPDLSSSSKLTASRKSTGQLNMNPGTTSGNTATAERSRHQRSFSVPKKFGVIDRSSDPPRSATLDRIQACTQQGLSSKTRSSSSLKDSLTDPSHINHPTNLLATIFWVTVALMESDFEFEYLMALRLLSRLLAHMPLDKAENREKLEKLQAQLKWADFSGLQQLLLKGFTSLTTTDLTLQLFSLLTPVSKISMVDASHAIGFPLNVLCLLPQLIQHFENPNQFCKDIAERIAQVCLEEKNPKLSNLAHVMTLYKTHSYTRDCATWVNVVCRYLHEAYADITLNMVTYLAELLEKGLPSVQQPLLQVIYSLLSYMDLSVVPVKQFNVEVLKTIEKYVQSVHWREALNILKLVVSRSASLVLPSYQHSDLSKIEIHRVWTSASKELPGKTLDFHFDISETPIIGRRYDELQNSSGRDGKPRAMAVTRSTSSTSSGSNSNVLVPVSWKRPQYSQKRTKEKLVHVLSLCGQEVGLSKNPSVIFSSCGDLDLLEHQTSLVSSEDGAREQENMDDTNSEQQFRVFRDFDFLDVELEDGEGESMDNFNWGVRRRSLDSLDKCDMQILEERQLSGSTPSLNKMHHEDSDESSEEEDLTASQILEHSDLIMTLSPSEETNPMELLTTACDSTPAEPHSFNTRMSSFDASLPDMNNLQISEGSKAEAVREEEDTTVHEDDLSSSINELPAAFECSDSFSLDMTEGEEKGNRALDQFTLASFGEGDRGVSPPPSPFFSAILAAFQPAACDDAEEAWRSHINQLMCDSDGSCAVYTFHVFSSLFKNIQKRFCFLTCDAASYLGDNLRGIGSKFVSSSQMLTSCSECPTLFVDAETLLSCGLLDKLKFSVLELQEYLDTYNNRKEATLSWLANCKATFAGGSRDGVITCQPGDSEEKQLELCQRLYKLHFQLLLLFQSYCKLIGQVHEVSSMPELLNMSRELSDLKKHLKEASAVIAADPLYSDGAWSEPTFTSTEAAIQSMLECLKNNELGKALRQIRECRSLWPNDIFGSSSDDEVQTLLNIYFRHQTLGQTGTYALVGSNQSLTEICTKLMELNMEIRDMIRRAQSYRVLTTFLPDSSVSGTSL

SEQ ID NO: 10599 - protein, 430 aa, Homo sapiens
MASSAKSAEMPTISKTVNPTPDPHQEYLDPRITIALFEIGSHSPSSWGSLPFLKNSSHQVTEQQTAQKFNNLLKEIKDILKNMAGFEEKITEAKELFEETNITEDVSAHKENIRGLDKINEMLSTNLPVSLAPEKEDNEKKQEMILETNITEDVSAHKENIRGLDKINEMLSTNLPVSLAPEKEDNEKKQQMIMENQNSENTAQVFARDLVNRLEEKKVLNETQQSQEKAKNRLNVQEETMKIRNNMEQLLQEAEHWSKQHTELSKLIKSYQKSQKDISETLGNNGVGFQTQPNNEVSAKHELEEQVKKLSHDTYSLQLMAALLENECQILQQRVEILKELHHQKQGTLQEKPIQINYKQDKKNQKPSEAKKVEMYKQNKQAMKGTFWKKDRSCRSLDVCLNKKACNTQFNIHVARKALRGKMRSASSLR

SEQ ID NO: 10600 - protein, 986 aa, Homo sapiens
MYFCWGADSRELQRRRTAGSPGAELLQAASGERHSLLLLTNHRVLSCGDNSRGQLGRRGAQRGELPEPIQALETLIVDLVSCGKEHSLAVCHKGRVFAWGAGSEGQLGIGEFKEISFTPKKIMTLNDIKIIQVSCGHYHSLALSKDSQVFSWGKNSHGQLGLGKEFPSQASPQRVRSLEGIPLAQVAAGGAHSFALSLCGTSFGWGSNSAGQLALSGRNVPVQSNKPLSVGALKNLGVVYISCGDAHTAVLTQDGKVFTFGDNRSGQLGYSPTPEKRGPQLVERIDGLVSQIDCGSYHTLAYVHTTGQVVSFGHGPSDTSKPTHPEALTENFDISCLISAEDFVDVQVKHIFAGTYANFVTTHQDTSSTRAPGKTLPEISRISQSMAEKWIAVKRRSTEHEMAKSEIRMIFSSPACLTASFLKKRGTGETTSIDVDLEMARDTFKKLTKKEWISSMITTCLEDDLLRALPCHSPHQEALSVFLLLPECPVMHDSKNWKNLVVPFAKAVCEMSKQSLQVLKKCWAFLQESSLNPLIQMLKAAIISQLLHQTKTEQDHCNVKALLGMMKELHKVNKANCRLPENTFNINELSNLLNFYIDRGRQLFRDNHLMSEKKAYMLMHETILQKKDEFPPSPRFILRVRRSRLVKDALRQLSQAEATDFCKVLVVEFINEICPESGGVSSEFFHCMFEEMTKPEYGMFMYPEMGSCMWFPAKPKPEKKRYFLFGMLCGLSLFNLNVANLPFPLALYKKLLDQKPSLEDLKELSPRLGKSLQEVLDDAADDIGDALCIRFSIHWDQNDVDLIPNGISIPVDQTNKRDYVSKYIDYIFNVSVKAVYEEFQRGFYRVCEKEILRHFYPEELMTAIIGNTDYDWKQFEQNSKYEQGYQKSHPTIQLFWKAFHKLTLDEKKKFLFFLTGRDRLHARGIQKMEIVFRCPETFSERDHPTSITCHNILSLPKYSTMERMEEALQVAINNNRGFVSPMLTQS

SEQ ID NO: 10601 - protein, 764 aa, Homo sapiens
MAATLKSLKLVRYRAFCSPSAFGAVRSVSYWNVSSTQHGGQDPPEHISLCHSAKKVKNICSTFSSRRILTTSSAHPGLEFSKTSSSKASTLQLGSPRATGVDEEDVEVFDSFENMRVFLQLRPEYRVHSYNASETSQLLSVSEGELILHKVRVNQNNLQAQVIVDYLCKLSSLPAEQHPVLLGSTSFALLCQLSVKKIQLFDTQDLINVLKAFVILGIPHSHSMLDVYETKCCHQVWEMNMDQLLLVADLWRYLGRKVPRFLNIFSSYLNLHWKDLSLSQLVHLIYVIGENRQVSQDLMQKLESLILKYIDLINLEEVGTICLGFFKSSTNLSEFVMRKIGDLACANIQHLSSRSLVNIVKMFRFTHVDHINFMKQIGEIAPQRIPSLGVQGVMHLTLYCSALRFLNEGVMNAVAASLPPRVAHCRSKDVAKILWSFGTLNYKPPNAEEFYSSLISEIHRKMPEFNQYPEHLPTCLLGLAFLEYFPVELIDFALSPGFVRLAQERTKFDLLKELYTLDGTVGIECPDYRGNRLSTHLQQEGSELLWYLAEKDMNSKPEFLETVFLLETMLGGPQYVKHHMILPHTRSSDLEVQLDVNLKPLPFNREATPAENVAKLRLEHVGVSLTDDLMNKLLKGKARGHFQGKTESEPGQQPMELENKAAVPLGGFLCNVADKSGAMEMAGLCPAACMQTPRMKLAVQFTNRNQYCYGSRDLLGLHNMKRRQLARLGYRVVELSYWEWLPLLKRTRLEKLAFLHEKVFTSAL

SEQ ID NO: 10602 - protein, 240 aa, Homo sapiens
MAEYLASIFGTEKDKVNCSFYFKIGACRHGDRCSRLHNKPTFSQTILIQNIYRNPQNSAQTADGSHCAVSDVEMQEHYDEFFEEVFTEMEEKYGEVEEMNVCDNLGDHLVGNVYVKFRREEDAEKAVIDLNNRWFNGQPIHAELSPVTDFREACCRQYEMGECTRGGFCNFMHLKPISRELRRELYGRRRKKHRSRSRSRERRSRSRDRGRGGGGGGGGGGGGRERDRRRSRDRERSGRF

SEQ ID NO: 10603 - protein, 871 aa, Homo sapiens
MMPPPFMPPPGIPPPFPPMGLPPMSQRPPAIPPMPPGILPPMLPPMGAPPPLTQIPGMVPPMMPGMLMPAVPVTAATAPGADTASSAVAGTGPPRALWSEHVAPDGRIYYYNADDKQSVWEKPSVLKSKAELLLSQCPWKEYKSDTGKPYYYNNQSKESRWTRPKDLDDLEVLVKQEAAGKQQQQLPQTLQPQPPQPQPDPPPVPPGPTPVPTGLLEPEPGGSEDCDVLEATQPLEQGFLQQLEEGPSSSGQHQPQQEEEESKPEPERSGLSWSNREKAKQAFKELLRDKAVPSNASWEQAMKMVVTDPRYSALPKLSEKKQAFNAYKAQREKEEKEEARLRAKEAKQTLQHFLEQHERMTSTTRYRRAEQTFGELEVWAVVPERDRKEVYDDVLFFLAKKEKEQAKQLRRRNIQALKSILDGMSSVNFQTTWSQAQQYLMDNPSFAQDHQLQNMDKEDALICFEEHIRALEREEEEERERARLRERRQQRKNREAFQTFLDELHETGQLHSMSTWMELYPAVSTDVRFANMLGQPGSTPLDLFKFYVEELKARFHDEKKIIKDILKDRGFCVEVNTAFEDFAHVISFDKRAAALDAGNIKLTFNSLLEKAEAREREREKEEARRMRRREAAFRSMLRQAVPALELGTAWEEVRERFVCDSAFEQITLESERIRLFREFLQVLEQTECQHLHTKGRKHGRKGKKHHHKRSHSPSGSESEEEELPPPSLRPPKRRRRNPSESGSEPSSSLDSVESGGAALGGRGSPSSHLLGADHGLRKAKKPKKKTKKRRHKSNSPESETDPEEKAGKESDEKEQEQDKDRELQQAELPNRSPGFGIKKEKTGWDTSESELSEGELERRRRTLLQQLDDHQ

SEQ ID NO: 10604 - protein, 730 aa, Homo sapiens
MIVFLVFKHLFSLRLITMFFLLHFIVLINVKDFALTQGSMITPSCQKGYFPCGNLTKCLPRAFHCDGKDDCGNGADEENCGDTSGWATIFGTVHGNANSVALTQECFLKQYPQCCDCKETELECVNGDLKSVPMISNNVTLLSLKKNKIHSLPDKVFIKYTKLKKIFLQHNCIRHISRKAFFGLCNLQILYLNHNCITTLRPGIFKDLHQLTWLILDDNPITRISQRLFTGLNSLFFLSMVNNYLEALPKQMCAQMPQLNWVDLEGNRIKYLTNSTFLSCDSLTVLDLSSNTITELSPHLFKDLKLLQKLNLSSNPLMYLHKNQFESLKQLQSLDLERIEIPNINTRMFQPMKNLSHIYFKNFRYCSYAPHVRICMPLTDGISSFEDLLANNILRIFVWVIAFITCFGNLFVIGMRSFIKAENTTHAMSIKILCCADCLMGVYLFFVGIFDIKYRGQYQKYALLWMESVQCRLMGFLAMLSTEVSVLLLTYLTLEKFLVIVFPFSNIRPGKRQTSVILICIWMAGFLIAVIPFWNKDYFGNFYGKNGVCFPLYYDQTEDIGSKGYSLGIFLGVNLLAFLIIVFSYITMFCSIQKTALQTTEVRNCFGREVAVANRFFFIVFSDAICWIPVFVVKILSLFRVEIPDTMTSWIVIFFLPVNSALNPILYTLTTNFFKDKLKQLLHKHQRKSIFKIKKKSLSTSIVWIEDSSSLKLGVLNKITLGDSIMKPVS

SEQ ID NO: 10605 - protein, 90 aa, Homo sapiens
MVHLTPEEKSAVTALWGKVNVDEVGGEALGRLLVVYPWTQRFFESFGDLSTPDAVMGNPKVKAHGKKVLGAFSDGLAHLDNLKGTFATLS

SEQ ID NO: 10606 - protein, 242 aa, Homo sapiens
MAGRTVRAETRSRAKDDIKKVMATIEKVRRWEKRWVTVGDTSLRIFKWVPVVDPQEEERRRAGGGAERSRGRERRGRGASPRGGGPLILLDLNDENSNQSFHSEGSLQKGTEPSPGGTPQPSRPVSPAGPPEGVPEEAQPPRLGQERDPGGITAGSTDEPPMLTKEEPVPELLEAEDSGVRMTRRALHEKGLKTEPLRRLLPRRGLRTNVRPSSMAVPDTRAPGGGSKAPRAPRTIPQGKGR

SEQ ID NO: 10607 - protein, 1016 aa, Homo sapiens
MAPRTLWSCYLCCLLTAAAGAASYPPRGFSLYTGSSGALSPGGPQAQIAPRPASRHRNWCAYVVTRTVSCVLEDGVETYVKYQPCAWGQPQCPQSIMYRRFLRPRYRVAYKTVTDMEWRCCQGYGGDDCAESPAPALGPASSTPRPLARPARPNLSGSSAGSPLSGLGGEGPGESEKVQQLEEQVQSLTKELQGLRGVLQGLSGRLAEDVQRAVETAFNGRQQPADAAARPGVHETLNEIQHQLQLLDTRVSTHDQELGHLNNHHGGSSSSGGSRAPAPASAPPGPSEELLRQLEQRLQESCSVCLAGLDGFRRQQQEDRERLRAMEKLLASVEERQRHLAGLAVGRRPPQECCSPELGRRLAELERRLDVVAGSVTVLSGRRGTELGGAAGQGGHPPGYTSLASRLSRLEDRFNSTLGPSEEQEESWPGAPGGLSHWLPAARGRLEQLGGLLANVSGELGGRLDLLEEQVAGAMQACGQLCSGAPGEQDSQVSEILSALERRVLDSEGQLRLVGSGLHTVEAAGEARQATLEGLQEVVGRLQDRVDAQDETAAEFTLRLNLTAARLGQLEGLLQAHGDEGCGACGGVQEELGRLRDGVERCSCPLLPPRGPGAGPGVGGPSRGPLDGFSVFGGSSGSALQALQGELSEVILSFSSLNDSLNELQTTVEGQGADLADLGATKDRIISEINRLQQEATEHATESEERFRGLEEGQAQAGQCPSLEGRLGRLEGVCERLDTVAGGLQGLREGLSRHVAGLWAGLRETNTTSQMQAALLEKLVGGQAGLGRRLGALNSSLQLLEDRLHQLSLKDLTGPAGEAGPPGPPGLQGPPGPAGPPGSPGKDGQEGPIGPPGPQGEQGVEGAPAAPVPQVAFSAALSLPRSEPGTVPFDRVLLNDGGYYDPETGVFTAPLAGRYLLSAVLTGHRHEKVEAVLSRSNQGVARVDSGGYEPEGLENKPVAESQPSPGTLGVFSLILPLQAGDTVCVDLVMGQLAHSEEPLTIFSGALLYGDPELEHA

SEQ ID NO: 10608 - protein, 540 aa, Homo sapiens
MGSGSSSYRPKAIYLDIDGRIQKVIFSKYCNSSDIMDLFCIATGLPRNTTISLLTTDDAMVSIDPTMPANSERNELILYTSLRNLLFLPSKESWASHQHSVQSETCGHQATLRAFKINELKAEVANHLAVLEKRVELEGLKVVEIEKCKSDIKKMREELAARSSRTNCPCKYSFLDNHKKLTPRRDVPTYPKYLLSPETIEALRKPTFDVWLWEPNEMLSCLEHMYHDLGLVRDFSINPVTLRRWLFCVHDNYRNNPFHNFRHCFCVAQMMYSMVWLCSLQEKFSQTDILILMTAAICHDLDHPGYNNTYQINARTELAVRYNDISPLENHHCAVAFQILAEPECNIFSNIPPDGFKQIRQGMITLILATDMARHAEIMDSFKEKMENFDYSNEEHMTLLKMILIKCCDISNEVRPMEVAEPWVDCLLEEYFMQSDREKSEGLPVAPFMDRDKVTKATAQIGFIKFVLIPMFETVTKLFPMVEEIMLQPLWESRDRYEELKRIDDAMKELQKKTDSLTSGATEKSRERSRDVKNSEGDCA

SEQ ID NO: 10609 - protein, 146 aa, Homo sapiens
MAGELTPEEEAQYKKAFSAVDTDGNGTINAQELGAALKATGKNLSEAQLRKLISEVDSDGDGEISFQEFLTAAKKARAGLEDLQVAFRAFDQDGDGHITVDELRRAMAGLGQPLPQEELDAMIREADVDQDGRVNYEEFARMLAQE

SEQ ID NO: 10610 - protein, 81 aa, Homo sapiens
MTAAVFFGCAFIAFGPALALYVFTIATEPLRIIFLIAGRRVETCKNTEAPDCASPSGSLSFLLVGVSTDFVPCLVHGKSHY

SEQ ID NO: 10611 - protein, 216 aa, Homo sapiens
MTAAVFFGCAFIAFGPALALYVFTIATEPLRIIFLIAGAFFWLVSLLISSLVWFMARVIIDNKDGPTQKYLLIFGAFVSVYIQEMFRFAYYKLLKKASEGLKSINPGETAPSMRLLAYAFMTLVIILLHVFWGIVFFDGCEKKKWGILLIVLLTHLLVSAQTFISSYYGINLASAFIILVLMGTWAFLAAGGSCRSLKLCLLCQDKNFLLYNQRSR

SEQ ID NO: 10612 - protein, 2059 aa, Homo sapiens
MASPLRDEEEEEEEMVVSEEEEEEEEEGDEEEEEEVEAADEDDEEDDDEGVLGRGPGHDRGRDRHSPPGCHLFPPPPPPPPPLPPPPPPPPPDKDDIRLLPSALGVKKRKRGPKKQKENKPGKPRKRKKRDSEEEFGSERDEYREKSESGGSEYGTGPGRKRRRKHREKKEKKTKRRKKGEGDGGQKQVEQKSSATLLLTWGLEDVEHVFSEEDYHTLTNYKAFSQFMRPLIAKKNPKIPMSKMMTILGAKWREFSANNPFKGSAAAVAAAAAAAAAAVAEQVSAAVSSATPIAPSGPPALPPPPAADIQPPPIRRAKTKEGKGPGHKRRSKSPRVPDGRKKLRGKKMAPLKIKLGLLGGKRKKGGSYVFQSDEGPEPEAEESDLDSGSVHSASGRPDGPVRTKKLKRGRPGRKKKKVLGCPAVAGEEEVDGYETDHQDYCEVCQQGGEIILCDTCPRAYHLVCLDPELDRAPEGKWSCPHCEKEGVQWEAKEEEEEYEEEGEEEGEKEEEDDHMEYCRVCKDGGELLCCDACISSYHIHCLNPPLPDIPNGEWLCPRCTCPVLKGRVQKILHWRWGEPPVAVPAPQQADGNPDVPPPRPLQGRSEREFFVKWVGLSYWHCSWAKELQLEIFHLVMYRNYQRKNDMDEPPPLDYGSGEDDGKSDKRKVKDPHYAEMEEKYYRFGIKPEWMTVHRIINHSVDKKGNYHYLVKWRDLPYDQSTWEEDEMNIPEYEEHKQSYWRHRELIMGEDPAQPRKYKKKKKELQGDGPPSSPTNDPTVKYETQPRFITATGGTLHMYQLEGLNWLRFSWAQGTDTILADEMGLGKTIQTIVFLYSLYKEGHTKGPFLVSAPLSTIINWEREFQMWAPKFYVVTYTGDKDSRAIIRENEFSFEDNAIKGGKKAFKMKREAQVKFHVLLTSYELITIDQAALGSIRWACLVVDEAHRLKNNQSKFFRVLNGYKIDHKLLLTGTPLQNNLEELFHLLNFLTPERFNNLEGFLEEFADISKEDQIKKLHDLLGPHMLRRLKADVFKNMPAKTELIVRVELSPMQKKYYKYILTRNFEALNSRGGGNQVSLLNIMMDLKKCCNHPYLFPVAAMESPKLPSGAYEGGALIKSSGKLMLLQKMLRKLKEQGHRVLIFSQMTKMLDLLEDFLDYEGYKYERIDGGITGALRQEAIDRFNAPGAQQFCFLLSTRAGGLGINLATADTVIIFDSDWNPHNDIQAFSRAHRIGQANKVMIYRFVTRASVEERITQVAKRKMMLTHLVVRPGLGSKAGSMSKQELDDILKFGTEELFKDENEGENKEEDSSVIHYDNEAIARLLDRNQDATEDTDVQNMNEYLSSFKVAQYVVREEDKIEEIEREIIKQEENVDPDYWEKLLRHHYEQQQEDLARNLGKGKRVRKQVNYNDAAQEDQDNQSEYSVGSEEEDEDFDERPEGRRQSKRQLRNEKDKPLPPLLARVGGNIEVLGFNTRQRKAFLNAVMRWGMPPQDAFTTQWLVRDLRGKTEKEFKAYVSLFMRHLCEPGADGSETFADGVPREGLSRQQVLTRIGVMSLVKKKVQEFEHINGRWSMPELMPDPSADSKRSSRASSPTKTSPTTPEASATNSPCTSKPATPAPSEKGEGIRTPLEKEEAENQEEKPEKNSRIGEKMETEADAPSPAPSLGERLEPRKIPLEDEVPGVPGEMEPEPGYRGDREKSATESTPGERGEEKPLDGQEHRERPEGETGDLGKREDVKGDRELRPGPRDEPRSNGRREEKTEKPRFMFNIADGGFTELHTLWQNEERAAISSGKLNEIWHRRHDYWLLAGIVLHGYARWQDIQNDAQFAIINEPFKTEANKGNFLEMKNKFLARRFKLLEQALVIEEQLRRAAYLNLSQEPAHPAMALHARFAEAECLAESHQHLSKESLAGNKPANAVLHKVLNQLEELLSDMKADVTRLPATLSRIPPIAARLQMSERSILSRLASKGTEPHPTPAYPPGPYATPPGYGAAFSAAPVGALAAAGANYSQMPAGSFITAATNGPPVLVKKEKEMVGALVSDGLDRKEPRAGEVICIDD

SEQ ID NO: 10613 - protein, 3053 aa, Homo sapiens
VSDGMTGSNPVSPASSSSPASSGAGGISPQHIAQDSSLDGPPGPPDGATVPLEGFSLSQAADLANKGPKWEKSHAEIAEQAKHEAEIETRIAELRKEGFWSLKRLPKVPEPPRPKGHWDYLCEEMQWLSADFAQERRWKRGVARKVVRMVIRHHEEQRQKEERARREEQAKLRRIASTMAKDVRQFWSNVEKVVQFKQQSRLEEKRKKALDLHLDFIVGQTEKYSDLLSQSLNQPLTSSKAGSSPCLGSSSAASSPPPPASRLDDEDGDFQPQEDEEEDDEETIEVEEQQEGNDAEAQRREIELLRREGELPLEELLRSLPPQLLEGPSSPSQTPSSHDSDTRDGPEEGAEEEPPQVLEIKPPPSAVTQRNKQPWHPDEDDEEFTANEEEAEDEEDTIAAEEQLEGEVDHAMELSELAREGELSMEELLQQYAGAYAPGSGSSEDEDEDEVDANSSDCEPEGPVEAEEPPQEDSSSQSDSVEDRSEDEEDEHSEEEETSGSSASEESESEESEDAQSQSQADEEEEDDDFGVEYLLARDEEQSEADAGSGPPTPGPTTLGPKKEITDIAAAAESLQPKGYTLATTQVKTPIPLLLRGQLREYQHIGLDWLVTMYEKKLNGILADEMGLGKTIQTISLLAHLACEKGNWGPHLIIVPTSVMLNWEMELKRWCPSFKILTYYGAQKERKLKRQGWTKPNAFHVCITSYKLVLQDHQAFRRKNWRYLILDEAQNIKNFKSQRWQSLLNFNSQRRLLLTGTPLQNSLMELWSLMHFLMPHVFQSHREFKEWFSNPLTGMIEGSQEYNEGLVKRLHKVLRPFLLRRVKVDVEKQMPKKYEHVIRCRLSKRQRCLYDDFMAQTTTKETLATGHFMSVINILMQLRKVCNHPNLFDPRPVTSPFITPGICFSTASLVLRATDVHPLQRIDMGRFDLIGLEGRVSRYEADTFLPRHRLSRRVLLEVATAPDPPPRPKPVKMKVNRMLQPVPKQEGRTVVVVNNPRAPLGPVPVRPPPGPELSAQPTPGPVPQVLPASLMVSASPAGPPLIPASRPPGPVLLPPLQPNSGSLPQAGEVVSIGQLASLAQRPVANAGGSKPLTFQIQGNKLTLTGAQVRQLAVGQPRPLQMPPTMVNNTGVVKIVVRQAPRDGLTPVPPLAPAPRPPSSGLPAVLNPRPTLTPGRLPTPTLGTARAPMPTPTLVRPLLKLVHSPSPEVSASAPGAAPLTISSPLHVPSSLPGPASSPMPIPNSSPLASPVSSTVSVPLSSSLPISVPTTLPAPASAPLTIPISAPLTVSASGPALLTSVTPPLAPVVPAAPGPPSLAPSGASPSASALTLGLATAPSLSSSQTPGHPLLLAPTSSHVPGLNSTVAPACSPVLVPASALASPFPSAPNPAPAQASLLAPASSASQALATPLAPMAAPQTAILAPSPAPPLAPLPVLAPSPGAAPVLASSQTPVPVMAPSSTPGTSLASASPVPAPTPVLAPSSTQTMLPAPVPSPLPSPASTQTLALAPALAPTLGGSSPSQTLSLGTGNPQGPFPTQTLSLTPASSLVPTPAQTLSLAPGPPLGPTQTLSLAPAPPLAPASPVGPAPAHTLTLAPASSSASLLAPASVQTLTLSPAPVPTLGPAAAQTLALAPASTQSPASQASSLVVSASGAAPLPVTMVSRLPVSKDEPDTLTLRSGPPSPPSTATSFGGPRPRRQPPPPPRSPFYLDSLEEKRKRQRSERLERIFQLSEAHGALAPVYGTEVLDFCTLPQPVASPIGPRSPGPSHPTFWTYTEAAHRAVLFPQQRLDQLSEIIERFIFVMPPVEAPPPSLHACHPPPWLAPRQAAFQEQLASELWPRARPLHRIVCNMRTQFPDLRLIQYDCGKLQTLAVLLRQLKAEGHRVLIFTQMTRMLDVLEQFLTYHGHLYLRLDGSTRVEQRQALMERFNADKRIFCFILSTRSGGVGVNLTGADTVVFYDSDWNPTMDAQAQDRCHRIGQTRDVHIYRLISERTVEENILKKANQKRMLGDMAIEGGNFTTAYFKQQTIRELFDMPLEEPSSSSVPSAPEEEEETVASKQTHILEQALCRAEDEEDIRAATQAKAEQVAELAEFNENDGFPAGEGEEAGRPGAEDEEMSRAEQEIAALVEQLTPIERYAMKFLEASLEEVSREELKQAEEQVEAARKDLDQAKEEVFRLPQEEEEGPGAGDESSCGTGGGTHRRSKKAKAPERPGTRVSERLRGARAETQGANHTPVISAHQTRSTTTPPRCSPARERVPRPAPRPRPTPASAPAAIPALVPVPVSAPVPISAPNPITILPVHILPSPPPPSQIPPCSSPACTPPPACTPPPAHTPPPAQTCLVTPSSPLLLGPPSVPISASVTNLPLGLRPEAELCAQALASPESLELASVASSETSSLSLVPPKDLLPVAVEILPVSEKNLSLTPSAPSLTLEAGSIPNGQEQEAPDSAEGTTLTVLPEGEELPLCVSESNGLELPPSAASDEPLQEPLEADRTSEELTEAKTPTSSPEKPQELVTAEVAAPSTSSSATSSPEGPSPARPPRRRTSADVEIRGQGTGRPGQPPGPKVLRKLPGRLVTVVEEKELVRRRRQQRGAASTLVPGVSETSASPGSPSVRSMSGPESSPPIGGPCEAAPSSSLPTPPQQPFIARRHIELGVTGGGSPENGDGALLAITPPAVKRRRGRPPKKNRSPADAGRGVDEAPSSTLKGKTNGADPVPGPETLIVADPVLEPQLIPGPQPLGPQPVHRPNPLLSPVEKRRRGRPPKARDLPIPGTISSAGDGNSESRTQPPPHPSPLTPLPPLLVCPTATVANTVTTVTISTSPPKRKRGRPPKNPPSPRPSQLPVLDRDSTSVLESCGLGRRRQPQGQGESEGSSSDEDGSRPLTRLARLRLEAEGMRGRKSGGSMVVAVIQDDLDLADSGPGGLELTPPVVSLTPKLRSTRLRPGSLVPPLETEKLPRKRAGAPVGGSPGLAKRGRLQPPSPLGPEGSVEESEAEASGEEEEGDGTPRRRPGPRRLVGTTNQGDQRILRSSAPPSLAGPAVSHRGRKAKT

SEQ ID NO: 10614 - protein, 417 aa, Homo sapiens
MASYLYGVLFAVGLCAPIYCVSPANAPSAYPRPSSTKSTPASQVYSLNTDFAFRLYRRLVLETPSQNIFFSPVSVSTSLAMLSLGAHSVTKTQILQGLGFNLTHTPESAIHQGFQHLVHSLTVPSKDLTLKMGSALFVKKELQLQANFLGNVKRLYEAEVFSTDFSNPSIAQARINSHVKKKTQGKVVDIIQGLDLLTAMVLVNHIFFKAKWEKPFHPEYTRKNFPFLVGEQVTVHVPMMHQKEQFAFGVDTELNCFVLQMDYKGDAVAFFVLPSKGKMRQLEQALSARTLRKWSHSLQKRWIEVFIPRFSISASYNLETILPKMGIQNVFDKNADFSGIAKRDSLQVSKATHKAVLDVSEEGTEATAATTTKFIVRSKDGPSYFTVSFNRTFLMMITNKATDGILFLGKVENPTKS

SEQ ID NO: 10615 - protein, 311 aa, Homo sapiens
MFYHNKSIFHPVTFFLIGIPGLEDFHMWISGPFCSVYLVALLGNATILLVIKVEQTLREPMFYFLAILSTIDLALSTTSVPRMLGIFWFDAHEINYGACVAQMFLIHAFTGMEAEVLLAMAFDRYVAVCAPLHYATILTSQVLVGISMCIVIRPVLLTLPMVYLIYRLPFCQAHIIAHSYCEHMGIAKLSCGNIRINGIYGLFVVSFFVLNLVLIGISYVYILRAVFRLPSHDAQLKALSTCGAHVGVICVFYIPSVFSFLTHRFGHQIPGYIHILVANLYLIIPPSLNPIIYGVRTKQIRERVLYVFTKK

SEQ ID NO: 10616 - protein, 354 aa, Homo sapiens
MTNKMYAIYIKNLNYFSFLIVQCLQPTMAIFNNTTSSSSNFLLTAFPGLECAHVWISIPVCCLYTIALLGNSMIFLVIITKRRLHKPMYYFLSMLAAVDLCLTITTLPTVLGVLWFHAREISFKACFIQMFFVHAFSLLESSVLVAMAFDRFVAICNPLNYATILTDRMVLVIGLVICIRPAVFLLPLLVAINTVSFHGGHELSHPFCYHPEVIKYTYSKPWISSFWGLFLQLYLNGTDVLFILFSYVLILRTVLGIVARKKQQKALSTCVCHICAVTIFYVPLISLSLAHRLFHSTPRVLCSTLANIYLLLPPVLNPIIYSLKTKTIRQAMFQLLQSKGSWGFNVRGLRGRWD

SEQ ID NO: 10617 - protein, 218 aa, Homo sapiens
MATEVAADALGEEWKGYVVRISGGNDKQGFPMKQGVLTHGRVRLLLSKGHSCYRPRRTGERKRKSVRGCIVDANLSVLNLVIVKKGEKDIPGLTDTTVPRRLGPKRASRIRKLFNLSKEDDVRQYVVRKPLNKEGKKPRTKAPKIQRLVTPRVLQHKRRRIALKKQRTKKNKEEAAEYAKLLAKRMKEAKEKRQEQIAKRRRLSSLRASTSKSESSQK

SEQ ID NO: 10618 - protein, 319 aa, Homo sapiens
MLQNQDTMEILSNSTSKFPTFLLTGIPGLESAHVWISIPFCCFYAIALSGNSVILFVIITQQSLHEPMYYFLFRLSATDLGLTVSSLSTTLGILWFEAREISLYSCIVQMFFLHGFTFMESGVLVATAFDRYVAICDPLRYTTILTNSRIIQMGLLMITRAIVLILPLLLLLKPLYFCRMNALSHSYCYHPDVIQLACSDIRANSICGLIDLILTTGIDTPCIVLSYILIIHSVLRIASPEEWHKVFSTCVSHVGAVAFFYIHMLSLSLVYRYGRSAPRVVHSVMANVYLLLPPVLNPIIDSVKTKQIRKAMLSLLLTK

SEQ ID NO: 10619 - protein, 270 aa, Homo sapiens
MENKAMYLHTVSDCDTSSICEDSFDGRSLSKLNLCEDGPCHKRRASICCTQLGSLSALKHAVLGLYLLVFLILVGIFILAGPPGPKGDQGDEGKEGRPGIPGLPGLRGLPGERGTPGLPGPKGDDGKLGATGPMGMRGFKGDRGPKGEKGEKGDRAGDASGVEAPMMIRLVNGSGPHEGRVEVYHDRRWGTVCDDGWDKKDGDVVCRMLGFRGVEEVYRTARFGQGTGRIWMDDVACKGTEETIFRCSFSKWGVTNCGHAEDASVTCNRH

SEQ ID NO: 10620 - protein, 802 aa, Homo sapiens
MDSWFILVLLGSGLICVSANNATTVAPSVGITRLINSSTAEPVKEEAKTSNPTSSLTSLSVAPTFSPNITLGPTYLTTVNSSDSDNGTTRTASTNSIGITISPNGTWLPDNQFTDARTEPWEGNSSTAATTPETFPPSGNSDSKDRRDETPIIAVMVALSSLLVIVFIIIVLYMLRFKKYKQAGSHSNSFRLSNGRTEDVEPQSVPLLARSPSTNRKYPPLPVDKLEEEINRRMADDNKLFREEFNALPACPIQATCEAASKEENKEKNRYVNILPYDHSRVHLTPVEGVPDSDYINASFINGYQEKNKFIAAQGPKEETVNDFWRMIWEQNTATIVMVTNLKERKECKCAQYWPDQGCWTYGNIRVSVEDVTVLVDYTVRKFCIQQVGDMTNRKPQRLITQFHFTSWPDFGVPFTPIGMLKFLKKVKACNPQYAGAIVVHCSAGVGRTGTFVVIDAMLDMMHTERKVDVYGFVSRIRAQRCQMVQTDMQYVFIYQALLEHYLYGDTELEVTSLETHLQKIYNKIPGTSNNGLEEEFKKLTSIKIQNDKMRTGNLPANMKKNRVLQIIPYEFNRVIIPVKRGEENTDYVNASFIDGYRQKDSYIASQGPLLHTIEDFWRMIWEWKSCSIVMLTELEERGQEKCAQYWPSDGLVSYGDITVELKKEEECESYTVRDLLVTNTRENKSRQIRQFHFHGWPEVGIPSDGKGMISIIAAVQKQQQQSGNHPITVHCSAGAGRTGTFCALSTVLERVKAEGILDVFQTVKSLRLQRPHMVQTLEQYEFCYKVVQEYIDAFSDYANFK

SEQ ID NO: 10621 - protein, 249 aa, Homo sapiens
MKLNISFPATGCQKLIEVDDERKLRTFYEKRMATEVAADALGEEWKGYVVRISGGNDKQGFPMKQGVLTHGRVRLLLSKGHSCYRPRRTGERKRKSVRGCIVDANLSVLNLVIVKKGEKDIPGLTDTTVPRRLGPKRASRIRKLFNLSKEDDVRQYVVRKPLNKEGKKPRTKAPKIQRLVTPRVLQHKRRRIALKKQRTKKNKEEAAEYAKLLAKRMKEAKEKRQEQIAKRRRLSSLRASTSKSESSQK

SEQ ID NO: 10622 - protein, 814 aa, Homo sapiens
MSVVGLDVGSQSCYIAVARAGGIETIANEFSDRCTPSVISFGSKNRTIGVAAKNQQITHANNTVSNFKRFHGRAFNDPFIQKEKENLSYDLVPLKNGGVGIKVMYMGEEHLFSVEQITAMLLTKLKETAENSLKKPVTDCVISVPSFFTDAERRSVLDAAQIVGLNCLRLMNDMTAVALNYGIYKQDLPSLDEKPRIVVFVDMGHSAFQVSACAFNKGKLKVLGTAFDPFLGGKNFDEKLVEHFCAEFKTKYKLDAKSKIRALLRLYQECEKLKKLMSSNSTDLPLNIECFMNDKDVSGKMNRSQFEELCAELLQKIEVPLYSLLEQTHLKVEDVSAVEIVGGATRIPAVKERIAKFFGKDISTTLNADEAVARGCALQCAILSPAFKVREFSVTDAVPFPISLIWNHDSEDTEGVHEVFSRNHAAPFSKVLTFLRRGPFELEAFYSDPQGVPYPEAKIGRFVVQNVSAQKDGEKSRVKVKVRVNTHGIFTISTASMVEKVPTEENEMSSEADMECLNQRPPENPDTDANEKKVDQPPEAKKPKIKVVNVELPIEANLVWQLGKDLLNMYIETEGKMIMQDKLEKERNDAKNAVEEYVYEFRDKLCGPYEKFICEQDHQNFLRLLTETEDWLYEEGEDQAKQAYVDKLEELMKIGTPVKVRFQEAEERPKMFEELGQRLQHYAKIAADFRNKDEKYNHIDESEMKKVEKSVNEVMEWMNNVMNAQAKKSLDQDPVVRAQEIKTKIKELNNTCEPVVTQPKPKIESPKLERTPNGPNIDKKEEDLEDKNNFGAEPPHQNGECYPNEKNSVNMDLD

SEQ ID NO: 10623 - protein, 397 aa, Homo sapiens
MMFQDPVACEDVAVNFTQEEWALLDISQRKLYREVMLETFRNLTSIGKKWKDQNIEYEYQNPRRNFRSLIEGNVNEIKEDSHCGETFTQVPDDRLNFQEKKASPEAKSCDNFVCGEVGIGNSSFNMNIRGDIGHKAYEYQDYAPKPYKCQQPKKAFRYHPSFRTQERNHTGEKPYACKECGKTFISHSGIRRRMVMHSGDGPYKCKFCGKAVHCLRLYLIHERTHTGEKPYECKQCVKSFSYSATHRIHERTHTGEKPYECQQCGKAFHSSSSFQAHKRTHTGGKPYECKQCGKSFSWCHSFQIHERTHTGEKPCECSKCNKAFRSYRSYLRHKRSHTGEKPYQCKECRKAFTYPSSLRRHERTHSAKKPYECKQCGKALSYKFSNTPKNALWRKTL

SEQ ID NO: 10624 - protein, 540 aa, Homo sapiens
MEREALPWGLEPQDVQSSDEMRSPEGYLRGNMSENEEEEISQQEGSGDYEVEEIPFGLEPQSPGFEPQSPEFEPQSPRFEPESPGFESRSPGLVPPSPEFAPRSPESDSQSPEFESQSPRYEPQSPGYEPRSPGYEPRSPGYESESSRYESQNTELKTQSPEFEAQSSKFQEGAEMLLNPEEKSPLNISVGVHPLDSFTQGFGEQPTGDLPIGPPFEMPTGALLSTPQFEMLQNPLGLTGALRGPGRRGGRARGGQGPRPNICGICGKSFGRGSTLIQHQRIHTGEKPYKCEVCSKAFSQSSDLIKHQRTHTGERPYKCPRCGKAFADSSYLLRHQRTHSGQKPYKCPHCGKAFGDSSYLLRHQRTHSHERPYSCTECGKCYSQNSSLRSHQRVHTGQRPFSCGICGKSFSQRSALIPHARSHAREKPFKCPECGKRFGQSSVLAIHARTHLPGRTYSCPDCGKTFNRSSTLIQHQRSHTGERPYRCAVCGKGFCRSSTLLQHHRVHSGERPYKCDDCGKAFSQSSDLIRHQRTHAAGRR

SEQ ID NO: 10625 - protein, 352 aa, Homo sapiens
ALERRSSLPLDHGSPAQENPESEKSSPAVSRSKTFTGRFKQQTPSRTHKERSTSLSALVRSSPHGSLGSVVNSLSGLKLDNILSGPKIDVLKSGMKQAATVASKMWVAVASAYSYSDDEEETNRDYSFPAGLEDHILGENISPNTSISGLVPSELTQSNTSLGSSSSSGDVGKLHYPTGEVPFPRGMKGQDFEKSDHGSSQNTSMSSIYQNCAMEVLMSSCSQCRACGALVYDEEIMAGWTADDSNLNTACPFCKSNFLPLLNIEFKDLRGSASFFLKPSTSGDSLQSGSIPLANESLEHKPVSSLAEPDLINFMDFPKHNQIITEETGSAVEPRYQRVQRPLYVVINGVPL

SEQ ID NO: 10626 - protein, 880 aa, Homo sapiens
QPSPEPHSPTEPPAWGSSIVKVPSGIFDVNSRKSSTGSISNVLFSTQDPVEDAVFGEATNLKKNGDRGEKRQKHFPERSCSFSSESRAGMLLKKSSLDSNSSEMAIMMGADAKILTAALTCPKTSLLHIARTHSFENVSCHLPDSRTCMSESTWNPEHRSSPVPEMLEESQELLEPVVDDVPKTTATVDTYESLLSDSNSNQSRDLKTVSKDLRNKRSSLYGIAKVVQREDVETGLDPLSLLATECTGGKTPDSEDKLFSPVIARNLADEIESYMNLKSPLGSKSSSMELHREENRESGMTTAFIHALERRSSLPLDHGSPAQENPESEKSSPAVSRSKTFTGRFKQQTPSRTHKERSTSLSALVRSSPHGSLGSVVNSLSGLKLDNILSGPKIDVLKSGMKQAATVASKMWVAVASAYSYSDDEEETNRDYSFPAGLEDHILGENISPNTSISGLVPSELTQSNTSLGSSSSSGDVGKLHYPTGEVPFPRGMKGQDFEKSDHGSSQNTSMSSIYQNCAMEVLMSSCSQCRACGALVYDEEIMAGWTADDSNLNTACPFCKSNFLPLLNIEFKDLRGSASFFLKPSTSGDSLQSGSIPLANESLEHKPVSSLAEPDLINFMDFPKHNQIITEETGSAVEPSDEIKRASGDVQTMKISSVPNSLSKRNVSLTRSHSVGGPLQNIDFTQRPFHGISTVSLPNSLQEVVDPLGKRPNPPPVSVPYLSPLVLRKELESLLENEGDQVIHTSSFINQHPIIFWNLVWYFRRLDLPSNLPGLILTSEHCNEGVQLPLSSLSQDSKLVYIQLLWDNINLHQEPREPLYVSWRNFNSEKKSSLLSEEQQETSTLVETIRQSIQHNNVLKPINLLSQQMKPGMKRQRGI

SEQ ID NO: 10627 - protein, 839 aa, Homo sapiens
MDCYTANWNPLGDSAFYRKYELYSMDWDLKEELRDCLVAAAPYGGPIALLRNPWRKEKAASVRPVLDIYSASGMPLASLLWKSGPVVSLGWSAEEELLCVQEDGAVLVYGLHGDFRRHFSMGNEVLQNRVLDARIFHTEFGSGVAILTGAHRFTLSANVGDLKLRRMPEVPGLQSAPSCWTVLCQDRVAHILLAVGPDLYLLDHAACSAVTPPGLAPGVSSFLQMAVSFTYRHLALFTDTGYIWMGTASLKEKLCEFNCNIRAPPKQMVWCSRPRSKERAVVVAWERRLMVVGDAPESIQFVLDEDSYLVPELDGVRIFSRSTHEFLHEVPAASEEIFKIASMAPGALLLEAQKEYEKESQKADEYLREIQELGQLTQAVQQCIEAAGHEHQPDMQKSLLRAASFGKCFLDRFPPDSFVHMCQDLRVLNAVRDYHIGIPLTYSQYKQLTIQVLLDRLVLRRLYPLAIQICEYLRLPEVQGVSRILAHWACYKVQQKDVSDEDVARAINQKLGDTPGVSYSDIAARAYGCGRTELAIKLLEYEPRSGEQVPLLLKMKRSKLALSKAIESGDTDLVFTVLLHLKNELNRGDFFMTLRNQPMALSLYRQFCKHQELETLKDLYNQDDNHQELGSFHIRASYAAEERIEGRVAALQTAADAFYKAKNEFAAKATEDQMRLLRLQRRLEDELGGQFLDLSLHDTVTTLILGGHNKRAEQLARDFRIPDKRLWWLKLTALADLEDWEELEKFSKSKKSPIGYLPFVEICMKQHNKYEAKKYASRVGPEQKVKALLLVGDVAQAADVAIEHRNEAELSLVLSHCTGATDGATADKIQRARAQAQKK

SEQ ID NO: 10628 - protein, 710 aa, Homo sapiens
MERTAGKELALAPLQDWGEETEDGAVYSVSLRRQRSQRRSPAEGPGGSQAPSPIANTFLHYRTSKVRVLRAARLERLVGELVFGDREQDPSFMPAFLATYRTFVPTACLLGFLLPPMPPPPPPGVEIKKTAVQDLSFNKNLRAVVSVLGSWLQDHPQDFRDHPAHSDLGSVRTFLGWAAPGSAEAQKAEKLLEDFLEEAEREQEEEPPQVWTGPPRVAQTSDPDSSEACAEEEEGLMPQGPQLLDFSVDEVAEQLTLIDLELFSKVRLYECLGSVWSQRDRPGAAGASPTVRATVAQFNTVTGCVLGSVLGAPGLAAPQRAQRLEKWIRIAQRCRELRNFSSLRAILSALQSNPIYRLKRSWGAVSREPLSTFRKLSQIFSDENNHLSSREILFQEEATEGSQEEDNTPGSLPSKPPPGPVPYLGTFLTDLVMLDTALPDMLEGDLINFEKRRKEWEILARIQQLQRRCQSYTLSPHPPILAALHAQNQLTEEQSYRLSRVIEPPAASCPSSPRIRRRISLTKRLSAKLAREKSSSPSGSPGDPSSPTSSVSPGSPPSSPRSRDAPAGSPPASPGPQGPSTKLPLSLDLPSPRPFALPLGSPRIPLPAQQSSEARVIRVSIDNDHGNLYRSILLTSQDKAPSVVRRALQKHNVPQPWACDYQLFQVLPGDRVLLIPDNANVFYAMSPVAPRDFMLRRKEGTRNTLSVSPS

SEQ ID NO: 10629 - protein, 695 aa, Homo sapiens
MDCYTANWNPLGDSAFYRKYELYSMDWDLKEELRDCLVAAAPYGGPIALLRNPWRKEKAASVRPVLDIYSASGMPLASLLWKSGPVVSLGWSAEEELLCVQEDGAVLVYGLHGDFRRHFSMGNEVLQNRVLDARIFHTEFGSGVAILTGAHRFTLSANVGDLKLRRMPEVPGLQSAPSCWTVLCQDRVAHILLAVGPDLYLLDHAACSAVTPPGLAPGVSSFLQMAVSFTYRHLALFTDTGYIWMGTASLKEKLCEFNCNIRAPPKQMVWCSRPRSKERAVVVAWERRLMVVGDAPESIQYKQLTIQVLLDRLVLRRLYPLAIQICEYLRLPEVQGVSRILAHWACYKVQQKDVSDEDVARAINQKLGDTPGVSYSDIAARAYGCGRTELAIKLLEYEPRSGEQVPLLLKMKRSKLALSKAIESGDTDLVFTVLLHLKNELNRGDFFMTLRNQPMALSLYRQFCKHQELETLKDLYNQDDNHQELGSFHIRASYAAEERIEGRVAALQTAADAFYKAKNEFAAKATEDQMRLLRLQRRLEDELGGQFLDLSLHDTVTTLILGGHNKRAEQLARDFRIPDKRLWWLKLTALADLEDWEELEKFSKSKKSPIGYLPFVEICMKQHNKYEAKKYASRVGPEQKVKALLLVGDVAQAADVAIEHRNEAELSLVLSHCTGATDGATADKIQRARAQAQKK

SEQ ID NO: 10630 - protein, 502 aa, Homo sapiens
MKGEITLSQWIPLMEENCRKCSETAKVCLPKNFSIKEIFDKAISARKINRPMLQAALMLRKKGFTTAILTNTWLDDRAERDGLAQLMCELKMHFDFLIESCQVGMVKPEPQIYKFLLDTLKASPSEVVFLDDIGANLKPARDLGMVTILVQDTDTALKELEKVTGIQLLNTPAPLPTSCNPSDMSHGYVTVKPRVRLHFVELGSGPAVCLCHGFPESWYSWRYQIPALAQAGYRVLAMDMKGYGESSAPPEIEEYCMEVLCKEMVTFLDKLGLSQAVFIGHDWGGMLVWYMALFYPERVRAVASLNTPFIPANPNMSPLESIKANPVFDYQLYFQEPGVAEAELEQNLSRTFKSLFRASDESVLSMHKVCEAGGLFVNSPEEPSLSRMVTEEEIQFYVQQFKKSGFRGPLNWYRNMERNWKWACKSLGRKILIPALMVTAEKDFVLVPQMSQHMEDWIPHLKRGHIEDCGHWTQMDKPTEVNQILIKWLDSDARNPPVVSKM

SEQ ID NO: 10631 - protein, 696 aa, Homo sapiens
MAMARLGSWLGEAQWLALVSLFVAALATVGLYLAQWALARARPQPQRRAVEPGEGPRPGSDALLSWILTLGSWRSQWQAAWVTALNEEAERKGGPPFLSFEEDPRQQALELVVQEVSSVLRSAEEKVVVCHVVGQAIQFLVSETPALGAGCRLYDMRLSPFHLQLEFHMKEKREDLQISWSFISVPEMAVNIQPKALGEDQVAETSAMSDVLKDILKHLAGSASPSVVLITKPTTVKEAQNLQCAASTAQESCPPKPPRAHELKLLVRNIHVLLLSEPGASGHINAVCVVQLNDPVQRFSSTLTKNTPDLMWEEEFTFELNAKSKELHLQISEAGRSSEGLLATATVPLDLFKKQPSGPQSFTLTSGSACGSSVLGSVTAEFSYMEPGELKSWPIPPPVPAAKIEKDRTVMPCGTVVTTVTAVKTKPRVDVGRASPLSSDSPVKTPIKVKVIEKDISVQAIACRSAPVSKTLSSSDTELLVLNGSDPVAEVAIRQLSESSKLKLKSPRKKSTIIISGISKTSLSQDHDAALMQGYTASVDSTHQEDAPSHPERAAASAPPEEAESAQASLAPKPQEDELDSWDLEKEPQAAAWSSQVLLDPDGDELSESSMSVLEPGTAKKHKGGILRKGAKLFFRRRHQQKDPGMSQSHNDLVFLEQPEGSRRKGITLTRILNKKLLSRHRNKNTMNGAPVEPCT

SEQ ID NO: 10632 - protein, 409 aa, Homo sapiens
MEGESTSAVLSGFVLGALAFQHLNTDSDTEGFLLGEVKGEAKNSITDSQMDDVEVVYTIDIQKYIPCYQLFSFYNSSGEVNEQALKKILSNVKKNVVGWYKFRRHSDQIMTFRERLLHKNLQEHFSNQDLVFLLLTPSIITESCSTHRLEHSLYKPQKGLFHRVPLVVANLGMSEQLGYKTVSGSCMSTGFSRAVQTHSSKFFEEDGSLKEVHKINEMYASLQEELKSICKKVEDSEQAVDKLVKDVNRLKREIEKRRGAQIQAAREKNIQKDPQENIFLCQALRTFFPNSEFLHSCVMSLKNRHVSKSSCNYNHHLDVVDNLTLMVEHTDIPEASPASTPQIIKHKALDLDDRWQFKRSRLLDTQDKRSKADTGSSNQDKASKMSSPETDEEIEKMKGFGEYSRSPTF

SEQ ID NO: 10633 - protein, 802 aa, Homo sapiens
MKYIKSNSKNSSHHFVETFNIKPQDLHKCIARCHFARSRFLQILQRQDCVTQKYQENAQLSVKQVRNLRSECIGLENQIKKMEPYDDHSNMEEKIQKVRSLWASVNETLMFLEKEREVVSSVLSLVNQYALDGTNVAINIPRLLLDKIEKQMFQLHIGNVYEAGKLNLLTVIQLLNEVLKVMKYERCQADQARLTVDLHYLEKETKFQKERLSDLKHMRYRIKDDLTTIRHSVVEKQGEWHKKWKEFLGLSPFSLIKGWTPSVDLLPPMSPLSFDPASEEVYAKSILCQYPASLPDAHKQHNQENGCRGDSDTLGALHDLANSPASFLSQSVSSSDRNSVTVLEKDTKMGTPKEKNEAISKKIPEFEVENSPLSDVAKNTESSAFGGSLPAKKSDPFQKEQDHLVEEVARAVLSDSPQLSEGKEIKLEELIDSLGSNPFLTRNQIPRTPENLITEIRSSWRKAIEMEENRTKEPIQMDAEHREVLPESLPVLHNQREFSMADFLLETTVSDFGQSHLTEEKVISDCECVPQKHVLTSHIDEPPTQNQSDLLNKKVICKQDLECLAFTKLSETSRMETFSPAVGNRIDVMGGSEEEFMKILDHLEVSCNKPSTNKTMLWNSFQISSGISSKSFKDNDFGILHETLPEEVGHLSFNSSSSSEANFKLEPNSPMHGGTLLEDVVGGRQTTPESDFNLQALRSRYEALKKSLSKKREESYLSNSQTPERHKPELSPTPQNVQTDDTLNFLDTCDLHTEHIKPSLRTSIGERKRSLSPLIKFSPVEQRLRTTIACSLGELPNLKGKV

SEQ ID NO: 10634 - protein, 327 aa, Homo sapiens
MRLAVLFSGALLGLLAESTGTTSHRTTKSHKTTTHRTTTTGTTSHGPTTATHNPTTTSHGNVTVHPTSNSTATSQGPSTATHSPATTSHGNATVHPTSNSTATSPGFTSSAHPEPPPPSPSPSPTSKETIGDYTWTNGSQPCVHLQAQIQIRVMYTTQGGGEAWGISVLNPNKTKVQGSCEGAHPHLLLSFPYGHLSFGFMQDLQQKVVYLSYMAVEYNVSFPHAAQWTFSAQNASLRDLQAPLGQSFSCSNSSIILSPAVHLDLLSLRLQAAQLPHTGVFGQSFSCPSDRSILLPLIIGLILLGLLALVLIAFCIIRRRPSAYQAL

SEQ ID NO: 10635 - protein, 955 aa, Homo sapiens
MSSASVTAFEKEHLWMYLQALGFEPGPATIACGKIVSHTHLGVNMFDKLNRDAFHIISYFLFQVLDQSLTKEVFKFCWPPFDQKSDTEFRKHCCEWIKRISGECGSSFPQVVGSLFLSPGGPKFIHLMYHFARFVAMKYIKSNSKNSSHHFVETFNIKPQDLHKCIARCHFARSRFLQILQRQDCVTQKYQENAQLSVKQVRNLRSECIGLENQIKKMEPYDDHSNMEEKIQKVRSLWASVNETLMFLEKEREVVSSVLSLVNQYALDGTNVAINIPRLLLDKIEKQMFQLHIGNVYEAGKLNLLTVIQLLNEVLKVMKYERCQADQARLTVDLHYLEKETKFQKERLSDLKHMRYRIKDDLTTIRHSVVEKQGEWHKKWKEFLGLSPFSLIKGWTPSVDLLPPMSPLSFDPASEEVYAKSILCQYPASLPDAHKQHNQENGCRGDSDTLGALHDLANSPASFLSQSVSSSDRNSVTVLEKDTKMGTPKEKNEAISKKIPEFEVENSPLSDVAKNTESSAFGGSLPAKKSDPFQKEQDHLVEEVARAVLSDSPQLSEGKEIKLEELIDSLGSNPFLTRNQIPRTPENLITEIRSSWRKAIEMEENRTKEPIQMDAEHREVLPESLPVLHNQREFSMADFLLETTVSDFGQSHLTEEKVISDCECVPQKHVLTSHIDEPPTQNQSDLLNKKVICKQDLECLAFTKLSETSRMETFSPAVGNRIDVMGGSEEEFMKILDHLEVSCNKPSTNKTMLWNSFQISSGISSKSFKDNDFGILHETLPEEVGHLSFNSSSSSEANFKLEPNSPMHGGTLLEDVVGGRQTTPESDFNLQALRSRYEALKKSLSKKREESYLSNSQTPERHKPELSPTPQNVQTDDTLNFLDTCDLHTEHIKPSLRTSIGERKRSLSPLIKFSPVEQRLRTTIACSLGELPNLKEEDILNKSLDAKEPPSDLTR

SEQ ID NO: 10636 - protein, 1034 aa, Homo sapiens
MAAATGAVAASAASGQAEGKKITDLRVIDLKSELKRRNLDITGVKTVLISRLKQAIEEEGGDPDNIELTVSTDTPNKKPTKGKGKKHEADELSGDASVEDDAFIKDCELENQEAHEQDGNDELKDSEEFGENEEENVHSKELLSAEENKRAHELIEAEGIEDIEKEDIESQEIEAQEGEDDTFLTAQDGEEEENEKDIAGSGDGTQEVSKPLPSEGSLAEADHTAHEEMEAHTTVKEAEDDNISVTIQAEDAITLDFDGDDLLETGKNVKITDSEASKPKDGQDAIAQSPEKESKDYEMNANHKDGKKEDCVKGDPVEKEARESSKKAESGDKEKDTLKKGPSSTGASGQAKSSSKESKDSKTSSKDDKGSTSSTSGSSGSSTKNIWVSGLSSNTKAADLKNLFGKYGKVLSAKVVTNARSPGAKCYGIVTMSSSTEVSRCIAHLHRTELHGQLISVEKVKGDPSKKEMKKENDEKSSSRSSGDKKNTSDRSSKTQASVKKEEKRSSEKSEKKESKDTKKIEGKDEKNDNGASGQTSESIKKSEEKKRISSKSPGHMVILDQTKGDHCRPSRRGRYEKIHGRSKEKERASLDKKRDKDYRRKEILPFEKMKEQRLREHLVRFERLRRAMELRRRREIAERERRERERIRIIREREERERLQRERERLEIERQKLERERMERERLERERIRIEQERRKEAERIAREREELRRQQQQLRYEQEKRNSLKRPRDVDHRRDDPYWSENKKLSLDTDARFGHGSDYSRQQNRFNDFDHRERGRFPESSAVQSSSFERRDRFVGQSEGKKARPTARREDPSFERYPKNFSDSRRNEPPPPRNELRESDRREVRGERDERRTVIIHDRPDITHPRHPREAGPNPSRPTSWKSEGSMSTDKRETRVERPERSGREVSGHSVRGAPPGNRSSASGYGSREGDRGVITDRGGGSQHYPEERHVVERHGRDTSGPRKEWHGPPSQGPSYHDTRRMGDGRAGAGMITQHSSNASPINRIVQISGNSMPRGSGSGFKPFKGGPPRRF

SEQ ID NO: 10637 - protein, 1487 aa, Homo sapiens
MIRLGAPQTLVLLTLLVAAVLRCQGQDVQEAGSCVQDGQRYNDKDVWKPEPCRICVCDTGTVLCDDIICEDVKDCLSPEIPFGECCPICPTDLATASGQPGPKGQKGEPGDIKDIVGPKGPPGPQGPAGEQGPRGDRGDKGEKGAPGPRGRDGEPGTPGNPGPPGPPGPPGPPGLGGNFAAQMAGGFDEKAGGAQLGVMQGPMGPMGPRGPPGPAGAPGPQGFQGNPGEPGEPGVSGPMGPRGPPGPPGKPGDDGEAGKPGKAGERGPPGPQGARGFPGTPGLPGVKGHRGYPGLDGAKGEAGAPGVKGESGSPGENGSPGPMGPRGLPGERGRTGPAGAAGARGNDGQPGPAGPPGPVGPAGGPGFPGAPGAKGEAGPTGARGPEGAQGPRGEPGTPGSPGPAGASGNPGTDGIPGAKGSAGAPGIAGAPGFPGPRGPPGPQGATGPLGPKGQTGEPGIAGFKGEQGPKGEPGPAGPQGAPGPAGEEGKRGARGEPGGVGPIGPPGERGAPGNRGFPGQDGLAGPKGAPGERGPSGLAGPKGANGDPGRPGEPGLPGARGLTGRPGDAGPQGKVGPSGAPGEDGRPGPPGPQGARGQPGVMGFPGPKGANGEPGKAGEKGLPGAPGLRGLPGKDGETGAAGPPGPAGPAGERGEQGAPGPSGFQGLPGPPGPPGEGGKPGDQGVPGEAGAPGLVGPRGERGFPGERGSPGAQGLQGPRGLPGTPGTDGPKGASGPAGPPGAQGPPGLQGMPGERGAAGIAGPKGDRGDVGEKGPEGAPGKDGGRGLTGPIGPPGPAGANGEKGEVGPPGPAGSAGARGAPGERGETGPPGPAGFAGPPGADGQPGAKGEQGEAGQKGDAGAPGPQGPSGAPGPQGPTGVTGPKGARGAQGPPGATGFPGAAGRVGPPGSNGNPGPPGPPGPSGKDGPKGARGDSGPPGRAGEPGLQGPAGPPGEKGEPGDDGPSGAEGPPGPQGLAGQRGIVGLPGQRGERGFPGLPGPSGEPGKQGAPGASGDRGPPGPVGPPGLTGPAGEPGREGSPGADGPPGRDGAAGVKGDRGETGAVGAPGAPGPPGSPGPAGPTGKQGDRGEAGAQGPMGPSGPAGARGIQGPQGPRGDKGEAGEPGERGLKGHRGFTGLQGLPGPPGPSGDQGASGPAGPSGPRGPPGPVGPSGKDGANGIPGPIGPPGPRGRSGETGPAGPPGNPGPPGPPGPPGPGIDMSAFAGLGPREKGPDPLQYMRADQAAGGLRQHDAEVDATLKSLNNQIESIRSPEGSRKNPARTCRDLKLCHPEWKSGDYWIDPNQGCTLDAMKVFCNMETGETCVYPNPANVPKKNWWSSKSKEKKHIWFGETINGGFHFSYGDDNLAPNTANVQMTFLRLLSTEGSQNITYHCKNSIAYLDEAAGNLKKALLIQGSNDVEIRAEGNSRFTYTALKDGCTKHTGKWGKTVIEYRSQKTSRLPIIDIAPMDIGGPEQEFGVDIGPVCFL

SEQ ID NO: 10638 - protein, 375 aa, Homo sapiens
MADHSFSDGVPSDSVEAAKNASNTEKLTDQVMQNPRVLAALQERLDNVPHTPSSYIETLPKAVKRRINALKQLQVRCAHIEAKFYEEVHDLERKYAALYQPLFDKRREFITGDVEPTDAESEWHSENEEEEKLAGDMKSKVVVTEKAAATAEEPDPKGIPEFWFTIFRNVDMLSELVQEYDEPILKHLQDIKVKFSDPGQPMSFVLEFHFEPNDYFTNSVLTKTYKMKSEPDKADPFSFEGPEIVDCDGCTIDWKKGKNVTVKTIKKKQKHKGRGTVRTITKQVPNESFFNFFNPLKASGDGESLDEDSEFTLASDFEIGHFFRERIVPRAVLYFTGEAIEDDDNFEEGEEGEEEELEGDEEGEDEDDAEINPKV

SEQ ID NO: 10639 - protein, 463 aa, Homo sapiens
MSGVFCFFFFFLGVPEAEVTWFRNKSKLGSPHHLHEGSLLLTNVSSSDQGLYSCRAANLHGELTESTQLLILDPPQVPTQLEDIRALLAATGPNLPSVLTSPLGTQLVLDPGNSALLGCPIKGHPVPNITWFHGGQPIVTATGLTHHILAAGQILQVANLSGGSQGEFSCLAQNEAGVLMQKASLVIQDYWWSVDRLATCSASCGNRGVQQPRLRCLLNSTEVNPAHCAGKVRPAVQPIACNRRDCPSRWMVTSWSACTRSCGGGVQTRRVTCQKLKASGISTPVSNDMCTQVAKRPVDTQACNQQLCVEWAFSSWGQCNGPCIGPHLAVQHRQVFCQTRDGITLPSEQCSALPRPVSTQNCWSEACSVHWRVSLWTLCTATCGNYGFQSRRVECVHARTNKAVPEHLCSWGPRPANWQRCNITPCENMECRDTTRYCEKVKQLKLCQLSQFKSRCCGTCGKA

SEQ ID NO: 10640 - protein, 1762 aa, Homo sapiens
MECCRRATPGTLLLFLAFLLLSSRTARSEEDRDGLWDAWGPWSECSRTCGGGASYSLRRCLSSKSCEGRNIRYRTCSNVDCPPEAGDFRAQQCSAHNDVKHHGQFYEWLPVSNDPDNPCSLKCQAKGTTLVVELAPKVLDGTRCYTESLDMCISGLCQIVGCDHQLGSTVKEDNCGVCNGDGSTCRLVRGQYKSQLSATKSDDTVVAIPYGSRHIRLVLKGPDHLYLETKTLQGTKGENSLSSTGTFLVDNSSVDFQKFPDKEILRMAGPLTADFIVKIRNSGSADSTVQFIFYQPIIHRWRETDFFPCSATCGGGYQLTSAECYDLRSNRVVADQYCHYYPENIKPKPKLQECNLDPCPASDGYKQIMPYDLYHPLPRWEATPWTACSSSCGGGIQSRAVSCVEEDIQGHVTSVEEWKCMYTPKMPIAQPCNIFDCPKWLAQEWSPCTVTCGQGLRYRVVLCIDHRGMHTGGCSPKTKPHIKEECIVPTPCYKPKEKLPVEAKLPWFKQAQELEEGAAVSEEPSFIPEAWSACTVTCGVGTQVRIVRCQVLLSFSQSVADLPIDECEGPKPASQRACYAGPCSGEIPEFNPDETDGLFGGLQDFDELYDWEYEGFTKCSESCGGGVQEAVVSCLNKQTREPAEENLCVTSRRPPQLLKSCNLDPCPARWEIGKWSPCSLTCGVGLQTRDVFCSHLLSREMNETVILADELCRQPKPSTVQACNRFNCPPAWYPAQWQPCSRTCGGGVQKREVLCKQRMADGSFLELPETFCSASKPACQQACKKDDCPSEWLLSDWTECSTSCGEGTQTRSAICRKMLKTGLSTVVNSTLCPPLPFSSSIRPCMLATCARPGRPSTKHSPHIAAARKVYIQTRRQRKLHFVVGGFAYLLPKTAVVLRCPARRVRKPLITWEKDGQHLISSTHVTVAPFGYLKIHRLKPSDAGVYTCSAGPAREHFVIKLIGGNRKLVARPLSPRSEEEVLAGRKGGPKEALQTHKHQNGIFSNGSKAEKRGLAANPGSRYDDLVSRLLEQGGWPGELLASWEAQDSAERNTTSEEDPGAEQVLLHLPFTMVTEQRRLDDILGNLSQQPEELRDLYSKHLVAQLAQEIFRSHLEHQDTLLKPSERRTSPVTLSPHKHVSGFSSSLRTSSTGDAGGGSRRPHRKPTILRKISAAQQLSASEVVTHLGQTVALASGTLSVLLHCEAIGHPRPTISWARNGEEVQFSDRILLQPDDSLQILAPVEADVGFYTCNATNALGYDSVSIAVTLAGKPLVKTSRMTVINTEKPAVTVDIGSTIKTVQGVNVTINCQVAGVPEAEVTWFRNKSKLGSPHHLHEGSLLLTNVSSSDQGLYSCRAANLHGELTESTQLLILDPPQVPTQLEDIRALLAATGPNLPSVLTSPLGTQLVLDPGNSALLGCPIKGHPVPNITWFHGGQPIVTATGLTHHILAAGQILQVANLSGGSQGEFSCLAQNEAGVLMQKASLVIQDYWWSVDRLATCSASCGNRGVQQPRLRCLLNSTEVNPAHCAGKVRPAVQPIACNRRDCPSRWMVTSWSACTRSCGGGVQTRRVTCQKLKASGISTPVSNDMCTQVAKRPVDTQACNQQLCVEWAFSSWGQCNGPCIGPHLAVQHRQVFCQTRDGITLPSEQCSALPRPVSTQNCWSEACSVHWRVSLWTLCTATCGNYGFQSRRVECVHARTNKAVPEHLCSWGPRPANWQRCNITPCENMECRDTTRYCEKVKQLKLCQLSQFKSRCCGTCGKA

SEQ ID NO: 10641 - protein, 972 aa, Homo sapiens
MMAQSNMFTVADVLSQDELRKKLYQTFKDRGILDTLKTQLRNQLIHELMHPVLSGELQPRSISVEGSSLLIGASNSLVADHLQRCGYEYSLSVFFPESGLAKEKVFTMQDLLQLIKINPTSSLYKSLVSGSDKENQKGFLMHFLKELAEYHQAKESCNMETQTSSTFNRDSLAEKLQLIDDQFADAYPQRIKFESLEIKLNEYKREIEEQLRAEMCQKLKFFKDTEIAKIKMEAKKKYEKELTMFQNDFEKACQAKSEALVLREKSTLERIHKHQEIETKEIYAQRQLLLKDMDLLRGREAELKQRVEAFELYQLELKDDYIIRTNRLIEDERKNKEKAVHLQEELIAINSKKEELNQSVNRVKELELELESVKAQSLAITKQNHMLNEKVKEMSDYSLLKEEKLELLAQNKLLKQQLEESRNENLRLLNRLAQPAPELAVFQKELRKAEKAIVVEHEEFESCRQALHKQLQDEIEHSAQLKAQILGYKASVKSLTTQVADLKLQLKQTQTALENEVYCNPKQSVIDRSVNGLINGNVVPCNGEISGDFLNNPFKQENVLARMVASRITNYPTAWVEGSSPDSDLEFVANTKARVKELQQEAERLEKAFRSYHRRVIKNSAKSPLAAKSPPSLHLLEAFKNITSSSPERHIFGEDRVVSEQPQVGTLEERNDVVEALTGSAASRLRGGTSSRRLSSTPLPKAKRSLESEMYLEGLGRSHIASPSPCPDRMPLPSPTESRHSLSIPPVSSPPEQKVGLYRRQTELQDKSEFSDVDKLAFKDNEEFESSFESAGNMPRQLEMGGLSPAGDMSHVDAAAAAVPLSYQHPSVDQKQIEEQKEEEKIREQQVKERRQREERRQSNLQEVLERERRELEKLYQERKMIEESLKIKIKKELEMENELEMSNQEIKDKSAHSENPLEKYMKIIQQEQDQESADKSSKKMVQEGSLVDTLQSSDKVESLTGFSHEELDDSW

SEQ ID NO: 10642 - protein, 570 aa, Homo sapiens
MAGLTAAAPRPGVLLLLLSILHPSRPGGVPGAIPGGVPGGVFYPGAGLGALGGGALGPGGKPLKPVPGGLAGAGLGAGVGGAFAGIPGVGPFGGPQPGVPLGYPIKAPKLPGYGPGGVAGAAGKAGYPTGTGVGPQAAAAAAAKAAAKFGAGAAGVLPGVGGAGVPGVPGAIPGIGGIAGVGTPAAAAAAAAAAKAAKYGAAAGLVPGGPGFGPGVVGVPGAGVPGVGVPGAGIPVVPGAGIPGAAVPGVVSPEAAAKAAAKAAKYGARPGVGVGGIPTYGVGAGGFPGFGVGVGGIPGVAGVPGVGGVPGVGGVPGVGISPEAQAAAAAKAAKYGLVPGVGVAPGVGVAPGVGVAPGVGLAPGVGVAPGVGVAPGVGVAPGIGPGGVAAAAKSAAKVAAKAQLRAAAGLGAGIPGLGVGVGVPGLGVGAGVPGLGVGAGVPGFGAVPGALAAAKAAKYGAAVPGVLGGLGALGGVGIPGGVVGAGPAAAAAAAKAAAKAAQFGLVGAAGLGGLGVGGLGVPGVGGLGGIPPAAAAKAAKYGVAARPGFGLSPIFPGGACLGKACGRKRK

SEQ ID NO: 10643 - protein, 730 aa, Homo sapiens
MAGLTAAAPRPGVLLLLLSILHPSRPGGVPGAIPGGVPGGVFYPGAGLGALGGGALGPGGKPLKPVPGGLAGAGLGAGLGAFPAVTFPGALVPGGVADAAAAYKAAKAGAGLGGVPGVGGLGVSAGAVVPQPGAGVKPGKVPGVGLPGVYPGGVLPGARFPGVGVLPGVPTGAGVKPKAPGVGGAFAGIPGVGPFGGPQPGVPLGYPIKAPKLPGGYGLPYTTGKLPYGYGPGGVAGAAGKAGYPTGTGVGPQAAAAAAAKAAAKFGAGAAGVLPGVGGAGVPGVPGAIPGIGGIAGVGTPAAAAAAAAAAKAAKYGAAAGLVPGGPGFGPGVVGVPGAGVPGVGVPGAGIPVVPGAGIPGAAVPGVVSPEAAAKAAAKAAKYGARPGVGVGGIPTYGVGAGGFPGFGVGVGGIPGVAGVPGVGGVPGVGGVPGVGISPEAQAAAAAKAAKYGVGTPAAAAAKAAAKAAQFALLNLAGLVPGVGVAPGVGVAPGVGVAPGVGLAPGVGVAPGVGVAPGVGVAPGIGPGGVAAAAKSAAKVAAKAQLRAAAGLGAGIPGLGVGVGVPGLGVGAGVPGLGVGAGVPGFGAVPGALAAAKAAKYGAAVPGVLGGLGALGGVGIPGGVVGAGPAAAAAAAKAAAKAAQFGLVGAAGLGGLGVGGLGVPGVGGLGGIPPAAAAKAAKYGAAGLGGVLGGAGQFPLGGVAARPGFGLSPIFPGGACLGKACGRKRK

SEQ ID NO: 10644 - protein, 438 aa, Homo sapiens
MLRSTSTVTLLSGGAARTPGAPSRRANVCRLRLTVPPESPVPEQCEKKIERKEQLLDLSNGEPTRKLPQGVVYGVVRRSDQNQQKEMVVYGWSTSQLKEEMNYIKDVRATLEKVRKRMYGDYDEMRQKIRQLTQELSVSHAQQEYLENHIQTQSSALDRFNAMNSALASDSIGLQKTLVDVTLENSNIKDQIRNLQQTYEASMDKLREKQRQLEVAQVENQLLKMKVESSQEANAEVMREMTKKLYSQYEEKLQEEQRKHSAEKEALLEETNSFLKAIEEANKKMQAAEISLEEKDQRIGELDRLIERMEKERHQLQLQLLEHETEMSGELTDSDKERYQQLEEASASLRERIRHLDDMVHCQQKKVKQMVEENNELQSRLDYLTETQAKTEVETREIGVGCDLLPSQTGRTREIVMPSRNYTPYTRVLELTMKKTLT

SEQ ID NO: 10645 - protein, 439 aa, Homo sapiens
MECCRRATPGTLLLFLAFLLLSSRTARSEEDRDGLWDAWGPWSECSRTCGGGASYSLRRCLSSKSCEGRNIRYRTCSNVDCPPEAGDFRAQQCSAHNDVKHHGQFYEWLPVSNDPDNPCSLKCQAKGTTLVVELAPKVLDGTRCYTESLDMCISGLCQIVGCDHQLGSTVKEDNCGVCNGDGSTCRLVRGQYKSQLSATKSDDTVVAIPYGSRHIRLVLKGPDHLYLETKTLQGTKGENSLSSTGTFLVDNSSVDFQKFPDKEILRMAGPLTADFIVKIRNSGSADSTVQFIFYQPIIHRWRETDFFPCSATCGGGYQLTSAECYDLRSNRVVADQYCHYYPENIKPKPKLQECNLDPCPARWEATPWTACSSSCGGGIQSRAVSCVEEDIQGHVTSVEEWKCMYTPKMPIAQPCNIFDCPKWLAQEWSPVTVPSFFVH

SEQ ID NO: 10646 - protein, 872 aa, Homo sapiens
MHFLKELAEYHQAKESCNMETQTSSTFNRDSLAEKLQLIDDQFADAYPQRIKFESLEIKLNEYKREIEEQLRAEMCQKLKFFKDTEIAKIKMEAKKKYEKELTMFQNDFEKACQAKSEALVLREKSTLERIHKHQEIETKEIYAQRQLLLKDMDLLRGREAELKQRVEAFELNQKLQEEKHKSITEALRRQEQNIKSFEETYDRKLKNELLKYQLELKDDYIIRTNRLIEDERKNKEKAVHLQEELIAINSKKEELNQSVNRVKELELELESVKAQSLAITKQNHMLNEKVKEMSDYSLLKEEKLELLAQNKLLKQQLEESRNENLRLLNRLAQPAPELAVFQKELRKAEKAIVVEHEEFESCRQALHKQLQDEIEHSAQLKAQILGYKASVKSLTTQVADLKLQLKQTQTALENEVYCNPKQSVIDRSVNGLINGNVVPCNGEISGDFLNNPFKQENVLARMVASRITNYPTAWVEGSSPDSDLEFVANTKARVKELQQEAERLEKAFRSYHRRVIKNSAKSPLAAKSPPSLHLLEAFKNITSSSPERHIFGEDRVVSEQPQVGTLEERNDVVEALTGSAASRLRGGTSSRRLSSTPLPKAKRSLESEMYLEGLGRSHIASPSPCPDRMPLPSPTESRHSLSIPPVSSPPEQKVGLYRRQTELQDKSEFSDVDKLAFKDNEEFESSFESAGNMPRQLEMGGLSPAGDMSHVDAAAAAVPLSYQHPSVDQKQIEEQKEEEKIREQQVKERRQREERRQSNLQEVLERERRELEKLYQERKMIEESLKIKIKKELEMENELEMSNQEIKDKSAHSENPLEKYMKIIQQEQDQESADKSSKKMVQEGSLVDTLQSSDKVESLTGFSHEELDDSW

SEQ ID NO: 10647 - protein, 445 aa, Homo sapiens
MLRSTSTVTLLSGGAARTPGAPSRRANVCRLRLTVPPESPVPEQCEKKIERKEQLLDLSNGEPTRKLPQGVVYGVVRRSDQNQQKEMVVYGWSTSQLKEEMNYIKDVRATLEKVRKRMYGDYDEMRQKIRQLTQELSVSHAQQEYLENHIQTQSSALDRFNAMNSALASDSIGLQKTLVDVTLENSNIKDQIRNLQQTYEASMDKLREKQRQLEVAQVENQLLKMKVESSQEANAEVMREMTKKLYSQYEEKLQEEQRKHSAEKEALLEETNSFLKAIEEANKKMQAAEISLEEKDQRIGELDRLIERMEKERHQLQLQLLEHETEMSGELTDSDKERYQQLEEASASLRERIRHLDDMVHCQQKKVKQMVEEIESLKKKLQQKQLLILQLLEKISFLEGENNELQSRLDYLTETQAKTEVETREIGVGCDLLPRRCKQSSQRKN

SEQ ID NO: 10648 - protein, 550 aa, Homo sapiens
MLRSTSTVTLLSGGAARTPGAPSRRANVCRLRLTVPPESPVPEQCEKKIERKEQLLDLSNGEPTRKLPQGVVYGVVRRSDQNQQKEMVVYGWSTSQLKEEMNYIKDVRATLEKVRKRMYGDYDEMRQKIRQLTQELSVSHAQQEYLENHIQTQSSALDRFNAMNSALASDSIGLQKTLVDVTLENSNIKDQIRNLQQTYEASMDKLREKQRQLEVAQVENQLLKMKVESSQEANAEVMREMTKKLYSQYEEKLQEEQRKHSAEKEALLEETNSFLKAIEEANKKMQAAEISLEEKDQRIGELDRLIERMEKERHQLQLQLLEHETEMSGELTDSDKERYQQLEEASASLRERIRHLDDMVHCQQKKVKQMVEEIESLKKKLQQKQLLILQLLEKISFLEGENNELQSRLDYLTETQAKTEVETREIGVGCDLLPRLPFRQNDSSSHCQKSGSPISSEERRRRDKQHLDDITAARLLPLHHMPTQLLSIEESLALQKQQKQNYEEMQAKLAAQKLAERLNIKMRSYNPEGESSGRYREVRDEDDDWSSDEF

SEQ ID NO: 10649 - protein, 219 aa, Homo sapiens
MECCRRATPGTLLLFLAFLLLSSRTARSEEDRDGLWDAWGPWSECSRTCGGGASYSLRRCLSSKSCEGRNIRYRTCSNVDCPPEAGDFRAQQCSAHNDVKHHGQFYEWLPVSNDPDNPCSLKCQAKGTTLVVELAPKVLDGTRCYTESLDMCISGLCQIVGCDHQLGSTVKEDNCGVCNGDGSTCRLVRGQYKSQLSATKCKTHRDGRPLDLLTYPLLA

SEQ ID NO: 10650 - protein, 342 aa, Homo sapiens
MVFLSGNASDSSNCTQPPAPVNISKAILLGVILGGLILFGVLGNILVILSVACHRHLHSVTHYYIVNLAVADLLLTSTVLPFSAIFEVLGYWAFGRVFCNIWAAVDVLCCTASIMGLCIISIDRYIGVSYPLRYPTIVTQRRGLMALLCVWALSLVISIGPLFGWRQPAPEDETICQINEEPGYVLFSALGSFYLPLAIILVMYCRVYVVAKRESRGLKSGLKTDKSDSEQVTLRIHRKNAPAGGSGMASAKTKTHFSVRLLKFSREKKAAKTLGIVVGCFVLCWLPFFLVMPIDEETEAQEGKNDSPSFKQPVHHAAVLGLEVMEKENLEGVSRKDTCGVW

SEQ ID NO: 10651 - protein, 677 aa, Homo sapiens
MAGLTAAAPRPGVLLLLLSILHPSRPGGVPGAIPGGVPGGVFYPALGPGGKPLKPVPGGLAGAGLGAGLGAFPAVTFPGALVPGGVADAAAAYKAAKAGAGLGGVPGVGGLGVSAGAVVPQPGAGVKPGKVPGVGLPGVYPGGVLPGARFPGVGVLPGVPTGAGVKPKAPGVGGAFAGIPGVGPFGGPQPGVPLGYPIKAPKLPGGYGLPYTTGKLPYGYGPGGVAGAAGKAGYPTGTGVGPQAAAAAAAKAAAKFGAGAAGVLPGVGGAGVPGVPGAIPGIGGIAGVGTPAAAAAAAAAAKAAKYGAAAGLVPGGPGFGPGVVGVPGAGVPGVGVPGAGIPVVPGAGIPGAAVPGVVSPEAAAKAAAKAAKYGARPGVGVGGIPTYGVGAGGFPGFGVGVGGIPGVAGVPGVGGVPGVGGVPGVGISPEAQAAAAAKAAKYGLVPGVGVAPGVGVAPGVGVAPGVGLAPGVGVAPGVGVAPGVGVAPGIGPGGVAAAAKSAAKVAAKAQLRAAAGLGAGIPGLGVGVGVPGLGVGAGVPGLGVGAGVPGFGAVPGALAAAKAAKYGAAVPGVLGGLGALGGVGIPGGVVGAGPAAAAAAAKAAAKAAQFGLVGAAGLGGLGVGGLGVPGVGGLGGIPPAAAAKAAKYGVAARPGFGLSPIFPGGACLGKACGRKRK

SEQ ID NO: 10652 - protein, 705 aa, Homo sapiens
MAGLTAAAPRPGVLLLLLSILHPSRPGGVPGAIPGGVPGGVFYPGAGLGALGGGALGPGGKPLKPVPGGLAGAGLGAGLGAFPAVTFPGALVPGGVADAAAAYKAAKAGAGLGGVPGVGGLGVSAGAVVPQPGAGVKPGKVPGVGLPGVYPGGVLPGARFPGVGVLPGVPTGAGVKPKAPGVGGAFAGIPGVGPFGGPQPGVPLGYPIKAPKLPGGYGLPYTTGKLPYGYGPGGVAGAAGKAGYPTGTGVGPQAAAAAAAKAAAKFGAGAAGVLPGVGGAGVPGVPGAIPGIGGIAGVGTPAAAAAAAAAAKAAKYGAAAGLVPGGPGFGPGVVGVPGAGVPGVGVPGAGIPVVPGAGIPGAAVPGVVSPEAAAKAAAKAAKYGARPGVGVGGIPTYGVGAGGFPGFGVGVGGIPGVAGVPGVGGVPGVGGVPGVGISPEAQAAAAAKAAKYGLVPGVGVAPGVGVAPGVGVAPGVGLAPGVGVAPGVGVAPGVGVAPGIGPGGVAAAAKSAAKVAAKAQLRAAAGLGAGIPGLGVGVGVPGLGVGAGVPGLGVGAGVPGFGAVPGALAAAKAAKYGAAVPGVLGGLGALGGVGIPGGVVGAGPAAAAAAAKAAAKAAQFGLVGAAGLGGLGVGGLGVPGVGGLGGIPPAAAAKAAKYGAAGLGGVLGGAGQFPLGGVAARPGFGLSPIFPGGACLGKACGRKRK

SEQ ID NO: 10653 - protein, 429 aa, Homo sapiens
MVFLSGNASDSSNCTQPPAPVNISKAILLGVILGGLILFGVLGNILVILSVACHRHLHSVTHYYIVNLAVADLLLTSTVLPFSAIFEVLGYWAFGRVFCNIWAAVDVLCCTASIMGLCIISIDRYIGVSYPLRYPTIVTQRRGLMALLCVWALSLVISIGPLFGWRQPAPEDETICQINEEPGYVLFSALGSFYLPLAIILVMYCRVYVVAKRESRGLKSGLKTDKSDSEQVTLRIHRKNAPAGGSGMASAKTKTHFSVRLLKFSREKKAAKTLGIVVGCFVLCWLPFFLVMPIGSFFPDFKPSETVFKIVFWLGYLNSCINPIIYPCSSQEFKKAFQNVLRIQCLCRKQSSKHALGYTLHPPSQAVEGQHKDMVRIPVGSRETFYRISKTDGVCEWKFFSSMPRGSARITVSKDQSSCTTARGHTPMT

SEQ ID NO: 10654 - protein, 658 aa, Homo sapiens
MAGLTAAAPRPGVLLLLLSILHPSRPGGVPGAIPGGVPGGVFYPGAGLGALGGGALGPGGKPLKPVPGGLAGAGLGAGLGAFPAVTFPGALVPGGVADAAAAYKAAKAGAGLGGVPGVGGLGVSAGAVVPQPGAGVKPGKVPGVGLPGVYPGGVLPGARFPGVGVLPGVPTGAGVKPKAPGVGGAFAGIPGVGPFGGPQPGVPLGYPIKAPKLPGYGPGGVAGAAGKAGYPTGTGVGPQAAAAAAAKAAAKFGAGAAGVLPGVGGAGVPGVPGAIPGIGGIAGVGTPAAAAAAAAAAKAAKYGAAAGLVPGGPGFGPGVVGVPGAGVPGVGVPGAGIPVVPGAGIPGAAVPGVVSPEAAAKAAAKAAKYGARPGVGVGGIPTYGVGAGGFPGFGVGVGGIPGVAGVPGVGGVPGVGGVPGVGISPEAQAAAAAKAAKYGLVPGVGVAPGVGVAPGVGVAPGVGLAPGVGVAPGVGVAPGVGVAPGIGPGGVAGAAAGLGAGIPGLGVGVGVPGLGVGAGVPGLGVGAGVPGFGAVPGALAAAKAAKYGAAVPGVLGGLGALGGVGIPGGVVGAGPAAAAAAAKAAAKAAQFGLVGAAGLGGLGVGGLGVPGVGGLGGIPPAAAAKAAKYGVAARPGFGLSPIFPGGACLGKACGRKRK

SEQ ID NO: 10655 - protein, 475 aa, Homo sapiens
MVFLSGNASDSSNCTQPPAPVNISKAILLGVILGGLILFGVLGNILVILSVACHRHLHSVTHYYIVNLAVADLLLTSTVLPFSAIFEVLGYWAFGRVFCNIWAAVDVLCCTASIMGLCIISIDRYIGVSYPLRYPTIVTQRRGLMALLCVWALSLVISIGPLFGWRQPAPEDETICQINEEPGYVLFSALGSFYLPLAIILVMYCRVYVVAKRESRGLKSGLKTDKSDSEQVTLRIHRKNAPAGGSGMASAKTKTHFSVRLLKFSREKKAAKTLGIVVGCFVLCWLPFFLVMPIGSFFPDFKPSETVFKIVFWLGYLNSCINPIIYPCSSQEFKKAFQNVLRIQCLCRKQSSKHALGYTLHPPSQAVEGQHKDMVRIPVGSRETFYRISKTDGVCEWKFFSSMPRGSARITVSKDQSSCTTARTKSRSVTRLECSGMILAHCNLRLPGSRDSPASASQAAGTTGMCHQADATRPS

SEQ ID NO: 10656 - protein, 407 aa, Homo sapiens
MGQKERSTADTLPDLEEWKSAAGLRWWQTAVVDGSGSGNEVIEGPQNARVLKGSQARFNCTVSQGWKLIMWALSDMVVLSVRPMEPIITNDRFTSQRYDQGGNFTSEMIIHNVEPSDSGNIRCSLQNSRLHGSAYLTVQVMGELFIPSVNLVVAENEPCEVTCLPSHWTRLPDISWELGLLVSHSSYYFVPEPSDLQSAVSILALTPQSNGTLTCVATWKSLKARKSATVNLTVIRCPQDTGGGINIPGVLSSLPSLGFSLPTWGKVGLGLAGTMLLTPTCTLTIRCCCCRRRCCGCNCCCRCCFCCRRKRGFRIQFQKKSEKEKTNKETETESGNENSGYNSDEQKTTDTASLPPKSCESSDPEQRNSSCGPPHQRADQRPPRPASHPQASFNLASPEKVSNTTVV

SEQ ID NO: 10657 - protein, 351 aa, Homo sapiens
MSDKNQIAARASLIEQLMSKRNFEDLGNHLTELETIYVTKEHLQETDVVRAVYRVLKNCPSVALKKKAKCLLSKWKAVYKQTHSKARNSPKLFPVRGNKEENSGPSHDPSQNETLGICSSNSLSSQDVAKLSEMIVPENRAIQLKPKEEHFGDGDPESTGKRSSELLDPTTPMRTKCIELLYAALTSSSTDQPKADLWQNFAREIEEHVFTLYSKNIKKYKTCIRSKVANLKNPRNSHLQQNLLSGTTSPREFAEMTVMEMANKELKQLRASYTESCIQEHYLPQVIDGTQTNKIKCRRCEKYNCKVTVIDRGTLFLPSWVRNSNPDEQMMTYVICNECGEQWYHSKWVCW

SEQ ID NO: 10658 - protein, 554 aa, Homo sapiens
MPLPWSLALPLLLSWVAGGFGNAASARHHGLLASARQPGVCHYGTKLACCYGWRRNSKGVCEATCEPGCKFGECVGPNKCRCFPGYTGKTCSQDVNECGMKPRPCQHRCVNTHGSYKCFCLSGHMLMPDATCVNSRTCAMINCQYSCEDTEEGPQCLCPSSGLRLAPNGRDCLDIDECASGKVICPYNRRCVNTFGSYYCKCHIGFELQYISGRYDCIDINECTMDSHTCSHHANCFNTQGSFKCKCKQGYKGNGLRCSAIPENSVKEVLRAPGTIKDRIKKLLAHKNSMKKKAKIKNVTPEPTRTPTPKVNLQPFNYEEIVSRGGNSHGGKKGNEEKMKEGLEDEKREEKALKNDIEERSLRGDVFFPKVNEAGEFGLILVQRKALTSKLEHKADLNISVDCSFNHGICDWKQDREDDFDWNPADRDNAIGFYMAVPALAGHKKDIGRLKLLLPDLQPQSNFCLLFDYRLAGDKVGKLRVFVKNSNNALAWEKTTSEDEKWKTGKIQLYQGTDATKSIIFEAERGKGKTGEIAVDGVLLVSGLCPDSLLSVDD

SEQ ID NO: 10659 - protein, 734 aa, Homo sapiens
MWGLLLALAAFAPAVGPALGAPRNSVLGLAQPGTTKVPGSTPALHSSPAQPPAETANGTSEQHVRIRVIKKKKVIMKKRKKLTLTRPTPLVTAGPLVTPTPAGTLDPAEKQETGCPPLGLESLRVSDSRLEASSSQSFGLGPHRGRLNIQSGLEDGDLYDGAWCAEEQDADPWFQVDAGHPTRFSGVITQGRNSVWRYDWVTSYKVQFSNDSRTWWGSRNHSSGMDAVFPANSDPETPVLNLLPEPQVARFIRLLPQTWLQGGAPCLRAEILACPVSDPNDLFLEAPASGSSDPLDFQHHNYKAMRKLMKQVQEQCPNITRIYSIGKSYQGLKLYVMEMSDKPGEHELGEPEVRYVAGMHGNEALGRELLLLLMQFLCHEFLRGNPRVTRLLSEMRIHLLPSMNPDGYEIAYHRGSELVGWAEGRWNNQSIDLNHNFADLNTPLWEAQDDGKVPHIVPNHHLPLPTYYTLPNATVAPETRAVIKWMKRIPFVLSANLHGGELVVSYPFDMTRTPWAARELTPTPDDAVFRWLSTVYAGSNLAMQDTSRRPCHSQDFSVHGNIINGADWHTVPGSMNDFSYLHTNCFEVTVELSCDKFPHENELPQEWENNKDALLTYLEQVRMGIAGVVRDKDTELGIADAVIAVDGINHDVTTAWGGDYWRLLTPGDYMVTASAEGYHSVTRNCRVTFEEGPFPCNFVLTKTPKQRLRELLAAGAKVPPDLRRRLERLRGQKD

SEQ ID NO: 10660 - protein, 1014 aa, Homo sapiens
MSDLRKRELGALFTSRGTGGVEWDGTQVSPGAHYCSPTGAGCPRPCADTPGPQPQPMDLRVGQRPPVEPPPEPTLLALQRPQRLHHHLFLAGLQQQRSVEPMRLSMDTPMPELQVGPQEQELRQLLHKDKSKRSAVASSVVKQKLAEVILKKQQAALERTVHPNSPGIPYRTLEPLETEGATRSMLSSFLPPVPSLPSDPPEHFPLRKTVSEPNLKLRYKPKKSLERRKNPLLRKESAPPSLRRRPAETLGDSSPSSSSTPASGCSSPNDSEHGPNPILGSEALLGQRLRLQETSVAPFALPTVSLLPAITLGLPAPARADSDRRTHPTLGPRGPILGSPHTPLFLPHGLEPEAGGTLPSRLQPILLLDPSGSHAPLLTVPGLGPLPFHFAQSLMTTERLSGSGLHWPLSRTRSEPLPPSATAPPPPGPMQPRLEQLKTHVQVIKRSAKPSEKPRLRQIPSAEDLETDGGGPGQVVDDGLEHRELGHGQPEARGPAPLQQHPQVLLWEQQRLAGRLPRGSTGDTVLLPLAQGGHRPLSRAQSSPAAPASLSAPEPASQARVLSSSETPARTLPFTTGLIYDSVMLKHQCSCGDNSRHPEHAGRIQSIWSRLQERGLRSQCECLRGRKASLEELQSVHSERHVLLYGTNPLSRLKLDNGKLAGLLAQRMFVMLPCGGVGVDTDTIWNELHSSNAARWAAGSVTDLAFKVASRELKNGFAVVRPPGHHADHSTAMGFCFFNSVAIACRQLQQQSKASKILIVDWDVHHGNGTQQTFYQDPSVLYISLHRHDDGNFFPGSGAVDEVGAGSGEGFNVNVAWAGGLDPPMGDPEYLAAFRIVVMPIAREFSPDLVLVSAGFDAAEGHPAPLGGYHVSAKCFGYMTQQLMNLAGGAVVLALEGGHDLTAICDASEACVAALLGNRVDPLSEEGWKQKPNLNAIRSLEAVIRVHMGALTLSQIPGHGSSQQQAGGAFSWPGHPCRAAVVMVNTGAACSAWPPVQTPGCLECQGLTKKKWRQ

SEQ ID NO: 10661 - protein, 490 aa, Homo sapiens
MNLAEICDNAKKGREYALLGNYDSSMVYYQGVMQQIQRHCQSVRDPAIKGKWQQVRQELLEEYEQVKSIVSTLESFKIDKPPDFPVSCQDEPFRDPAVWPPPVPAEHRAPPQIRRPNREVRPLRKEMAGVGARGPVGRAHPISKSEKPSTSRDKDYRARGRDDKGRKNMQDGASDGEMPKFDGAGYDKDLVEALERDIVSRNPSIHWDDIADLEEAKKLLREAVVLPMWMPDFFKGIRRPWKGVLMVGPPGTGKTMLAKAVATECGTTFFNVSSSTLTSKYRGESEKLVRLLFEMARFYAPTTIFIDEIDSICSRRGTSDEHEASRRVKSELLIQMDGVGGALENDDPSKMVMVLAATNFPWDIDEALRRRLEKRIYIPLPTAKGRAELLKINLREVELDPDIQLEDIAEKIEGYSGADITNVCRDASLMAMRRRINGLSPEEIRALSKEELQMPVTKGDFELALKKIAKSVSAADLEKYEKWMVEFGSA

SEQ ID NO: 10662 - protein, 355 aa, Homo sapiens
MDFIFHEKQEGFLCAQHCLNNLLQGEYFSPVELASIAHQLDEEERMRMAEGGVTSEEYLAFLQQPSENMDDTGFFSIQVISNALKFWGLEIIHFNNPEYQKLGIDPINERSFICNYKQHWFTIRKFGKHWFNLNSLLAGPELISDTCLANFLARLQQQAYSVFVVKGDLPDCEADQLLQIISVEEMDTPKLNGKKLVKQKEHRVYKTVLEKVSEESDESGTSDQDEEDFQRALELSRQETNREDEHLRSTIELSMQGSSGNTSQDLPKTSCVTPASEQPKKIKEDYFEKHQQEQKQQQQQSDLPGHSSYLHERPTTSSRAIESDLSDDISEGTVQAAVDTILEIMRKNLKIKGEK

SEQ ID NO: 10663 - protein, 219 aa, Homo sapiens
MSSHLVEPPPPLHNNNNNCEENEQSLPPPAGLNSSWVELPMNSSNGNDNGNGKNGGLEHVPSSSSIHNGDMEKILLDAQHESGQSSSRGSSHCDSPSPQEDGQIMFDVEMHTSRDHSSQSEEEVVEGEKEVEALKKSADWVSDWSSRPENIPPKEFHFRHPKRSVSLSMRKSGAMKKGGIFSAEFLKVFIPSLFLSHVLALGLGIYIGKRLSTPSASTY

SEQ ID NO: 10664 - protein, 44 aa, Homo sapiens
MSDKPDMAEIEKFDKSKLKKTETQEKNPLPSKETIEQEKQAGES

SEQ ID NO: 10665 - protein, 391 aa, Homo sapiens
MAARSPPSPHPSPPARQLGPRSPRVGRGAEVHAMRSEASGFAGAAREVVADESDKIWVGEEGSGGRRGPGGAAPAHAPLLSAPMGSRRLEGISVEEAMVTRTQLLEEELSSLKEELALCQADKEFVWSLWKRLQVTNPDLTQVVSLVVEREKQKSEAKDRKVLEILQVKDAKIQEFEQRESVLKQEINDLVKRKIAVDEENAFLRKEFSDLEKKFKDKSQEIKDTKECVQNKEEQNRLVIKNLEEENKKLSTRCTDLLNDLEKLRKQEAHLRKEKYSTDAKIKTFEDNLIEARKEVEVSQSKYNALSLQLSNKQTELIQKDMDITLVRKELQELQNLYKQNSTHTAQQAELIQQLQVLNMDTQKVLRNQEDVHTAESISYQKVCFYSVIKM

SEQ ID NO: 10666 - protein, 1406 aa, Homo sapiens
MAARSPPSPHPSPPARQLGPRSPRVGRGAEVHAMRSEASGFAGAAREVVADESDKIWVGEEGSGGRRGPGGAAPAHAPLLSAPMGSRRLEGISVEEAMVTRTQLLEEELSSLKEELALCQADKEFVWSLWKRLQVTNPDLTQVVSLVVEREKQKSEAKDRKVLEILQVKDAKIQEFEQRESVLKQEINDLVKRKIAVDEENAFLRKEFSDLEKKFKDKSQEIKDTKECVQNKEEQNRLVIKNLEEENKKLSTRCTDLLNDLEKLRKQEAHLRKEKYSTDAKIKTFEDNLIEARKEVEVSQSKYNALSLQLSNKQTELIQKDMDITLVRKELQELQNLYKQNSTHTAQQAELIQQLQVLNMDTQKVLRNQEDVHTAESISYQKLYNELHICFETTKSNEAMLRQSVTNLQDQLLQKEQENAKLKEKLQESQGAPLPLPQESDPDYSAQVPHRPSLSSLETLMVSQKSEIEYLQEKLKIANEKLSENISANKGFSRKSIMTSAEGKHKEPPVKRSRSLSPKSSFTDSEELQKLRKAERKIENLEKALQLKSQENDELRDAHEKRKERLQMLQTNYRAVKEQLKQWEEGSGMTEIRKIKRADPQQLRQEDSDAVWNELAYFKRENQELMIQKMNLEEELDELKVHISIDKAAIQELNRCVAERREEQLFRSGEDDEVKRSTPEKNGKEMLEQTLQKVTELENRLKSFEKRSRKLKEGNKKLMKENDFLKSLLKQQQEDTETREKELEQIIKGSKDVEKENTELQVKISELETEVTSLRRQVAEANALRNENEELINPMEKSHQSADRAKSEMATMKVRSGRYDCKTTMTKVKFKAAKKNCSVGRHHTVLNHSIKVMSNVFENLSKDGWEDVSESSSDSEAQTSQTLGTIIVETSQKISPTEDGKDQKESDPTEDSQTQGKEIVQTYLNIDGKTPKDYFHDKNAKKPTFQKKNCKMQKSSHTAVPTRVNREKYKNITAQKSSSNIILLRERIISLQQQNSVLQNAKKTAELSVKEYKEVNEKLLHQQQVSDQRFQTSRQTIKKLNLDLAGLRKEKEDLLKKLESSSEITSLAEENSQVTFPRIQVTSLSPSRSMDLEMKQLQYKLKNATNELTKQSSNVKTLKFELLAKEEHIKEMHEKISRMERDITMKRHLIEDLKFRQKVNLESNKSFSEMLQNLDKKVKTLTEECSNKKVSIDSLKQRLNVAVKEKSQYEQMYQKSKEELEKKDLKLTLLVSRISETESAMAEIETAASKQLQELALQSEQVLEGAQKTLLLANEKVEEFTTFVKALAKELQNDVHVVRRQIRELKKMKKNRDACKTSTHKAQTLAASILNISRSDLEEILDTEDQVEIEKTKIDAENDKEWMLYIQKLLEGQLPFASYLLEAVLEKINEKKKLVEGYFTIMKDIR

SEQ ID NO: 10667 - protein, 598 aa, Homo sapiens
MDALPRSGLNLKEEPLLPAGLGSVRSWMQGAGILDASTAAQSGVGLARAHFEKQPPSNLRKSNFFHFVLAMYDRQGQPVEVERTAFIDFVEKDREPGAEKTNNGIHYRLRLVYNNGLRTEQDLYVRLIDSMSKQAIIYEGQDKNPEMCRVLLTHEIMCSRCCDRKSCGNRNETPSDPVIIDRFFLKFFLKCNQNCLKNAGNPRDMRRFQVVVSTTVSVDGHVLAVSDNMFVHNNSKHGRRARRLDPSEAATPCIKAISPGEGWTTGGATVIVIGDNFFDGLQVVFGNVLVWSELITPHAIRVQTPPRHIPGVVEVTLSYKSKQFCKGCPGRFVYTALNEPTIDYGFQRLQKVIPRHPGDPERLPKEVLLKRAADLAEALYGVPGSNQELLLKRAADVAEALYSTPRAPGPLAPLAPSHPHPAVVGINAFSSPLAIAVGDATPGPEPGYARSCSSASPRGFAPSPGSQQSGYGGGLGAGLGGYGAPGVAGLGVPGSPSFLNGSTATSPFAIMPSSPPLAAASSMSLPAAAPTTSVFSFSPVNMISAVKQRSAFAPVLRPPSSPPQACPRAHGEGLPDQSFEDSDKFHSPARGLQGLAYS

SEQ ID NO: 10668 - protein, 631 aa, Homo sapiens
MTSANKAIELQLQVKQNAEELQDFMRDLENWEKDIKQKDMELRRQNGVPEENLPPIRNGNFRKKKKGKAKESSKKTREENTKNRIKSYDYEAWAKLDVDRILDELDKDDSTHESLSQESESEEDGIHVDSQKALVLKEKGNKYFKQGKYDEAIDCYTKGMDADPYNPVLPTNRASAYFRLKKFAVAESDCNLAVALNRSYTKAYSRRGAARFALQKLEEAKKDYERVLELEPNNFEATNELRKISQALASKENSYPKEADIVIKSTEGERKQIEAQQNKQQAISEKDRGNGFFKEGKYERAIECYTRGIAADGANALLPANRAMAYLKIQKYEEAEKDCTQAILLDGSYSKAFARRGTARTFLGKLNEAKQDFETVLLLEPGNKQAVTELSKIKKKPLKKVIIEETGNLIQTIDVPDSTTAAAPENNPINLANVIAATGTTSKKNSSQDDLFPTSDTPRAKVLKIEEVSDTSSLQPQASLKQDVCQSYSEKMPIEIEQKPAQFATTVLPPIPANSFQLESDFRQLKSSPDMLYQYLKQIEPSLYPKLFQKNLDPDVFNQIVKILHDFYIEKEKPLLIFEILQRLSELKRFDMAVMFMSETEKKIARALFNHIDKSGLKDSSVEELKKRYGG

SEQ ID NO: 10669 - protein, 560 aa, Homo sapiens
MFGIQESIQRSGSSMKEEPLGSGMNAVRTWMQGAGVLDANTAAQSGVGLARAHFEKQPPSNLRKSNFFHFVLALYDRQGQPVEIERTAFVGFVEKEKEANSEKTNNGIHYRLQLLYSNGIRTEQDFYVRLIDSMTKQAIVYEGQDKNPEMCRVLLTHEIMCRFFLKFFLKCNQNCLKNAGNPRDMRRFQVVVSTTVNVDGHVLAVSDNMFVHNNSKHGRRARRLDPSEATPCIKAISPSEGWTTGGATVIIIGDNFFDGLQVIFGTMLVWSELITPHAIRVQTPPRHIPGVVEVTLSYKSKQFCKGTPGRFIYTALNEPTIDYGFQRLQKVIPRHPGDPERLPKEVILKRAADLVEALYGMPHNNQEIILKRAADIAEALYSVPRNHNQLPALANTSVHAGMMGVNSFSGQLAVNVSEASQATNQGFTRNSSSVSPHGYVPSTTPQQTNYNSVTTSMNGYGSAAMSNLGGSPTFLNGSAANSPYAIVPSSPTMASSTSLPSNCSSSSGIFSFSPANMVSAVKQKSAFAPVVRPQTSPPPTCTSTNGNSLQAISGMIVPPM

SEQ ID NO: 10670 - protein, 1049 aa, Homo sapiens
MVFPMWTLKRQILILFNIILISKLLGARWFPKTLPCDVTLDVPKNHVIVDCTDKHLTEIPGGIPTNTTNLTLTINHIPDISPASFHRLDHLVEIDFRCNCVPIPLGSKNNMCIKRLQIKPRSFSGLTYLKSLYLDGNQLLEIPQGLPPSLQLLSLEANNIFSIRKENLTELANIEILYLGQNCYYRNPCYVSYSIEKDAFLNLTKLKVLSLKDNNVTAVPTVLPSTLTELYLYNNMIAKIQEDDFNNLNQLQILDLSGNCPRCYNAPFPCAPCKNNSPLQIPVNAFDALTELKVLRLHSNSLQHVPPRWFKNINKLQELDLSQNFLAKEIGDAKFLHFLPSLIQLDLSFNFELQVYRASMNLSQAFSSLKSLKILRIRGYVFKELKSFNLSPLHNLQNLEVLDLGTNFIKIANLSMFKQFKRLKVIDLSVNKISPSGDSSEVGFCSNARTSVESYEPQVLEQLHYFRYDKYARSCRFKNKEASFMSVNESCYKYGQTLDLSKNSIFFVKSSDFQHLSFLKCLNLSGNLISQTLNGSEFQPLAELRYLDFSNNRLDLLHSTAFEELHKLEVLDISSNSHYFQSEGITHMLNFTKNLKVLQKLMMNDNDISSSTSRTMESESLRTLEFRGNHLDVLWREGDNRYLQLFKNLLKLEELDISKNSLSFLPSGVFDGMPPNLKNLSLAKNGLKSFSWKKLQCLKNLETLDLSHNQLTTVPERLSNCSRSLKNLILKNNQIRSLTKYFLQDAFQLRYLDLSSNKIQMIQKTSFPENVLNNLKMLLLHHNRFLCTCDAVWFVWWVNHTEVTIPYLATDVTCVGPGAHKGQSVISLDLYTCELDLTNLILFSLSISVSLFLMVMMTASHLYFWDVWYIYHFCKAKIKGYQRLISPDCCYDAFIVYDTKDPAVTEWVLAELVAKLEDPREKHFNLCLEERDWLPGQPVLENLSQSIQLSKKTVFVMTDKYAKTENFKIAFYLSHQRLMDEKVDVIILIFLEKPFQKSKFLQLRKRLCGSSVLEWPTNPQAHPYFWQCLKNALATDNHVAYSQVFKETV

SEQ ID NO: 10671 - protein, 1969 aa, Homo sapiens
MAARSAPSCHLRLEWVYGYRGHQCRNNLYYTAAKEIVYFVAGVGVVYSPREHRQKFYRGHSDDIISLALHPERVLVATGQVGKEPYICIWDSYTVQTISVLKDVHTHGIACLAFDLDGQRLVSVGLDSKNAVCVWDWKRGKMLSMAPGHTDRIFDISWDLYQPNKLVSCGVKHIKFWSLCGNALTPKRGVFGKTGDLQTILCLACARDELTYSGALNGDIYVWKGINLIRTIQGAHAAGIFSMNACEEGFATGGRDGCIRLWDLTFKPITVIDLRETDQGYKGLSVRSVCWRGDHILVGTQDSEIFEIVVQERNKPFLIMQGHCEGELWALAVHPTKPLAVTGSDDRSVRIWSLVDHALIARCNMEEPIRCAAVNADGIHLALGMKDGSFTVLRVRDMTEVVHIKDRKEAIHELKYSPDGTYLAVGCNDSSVDIYGVAQRYKKVGECLGSLSFITHLDWSSDSRYLQTNDGNGKRLFYRMPGGKEVTSTEEIKGVHWASWTCVSGLEVNGIWPKYSDINDINSVDGNYIGQVLVTADDYGIIKLFRYPCLRKGAKFRKYIGHSAHVTNVRWSHDYQWVISIGGADHSVFQWKFIPERKLKDAVHIAPQESLADSHSDESDSDLSDVPELDSEIEQETQLTYRRQVYKEDLPQLKEQCKEKQKSATSKRRERAPGNSIRLHFVHGYRGYDCRSNLFYTQIGEIVYHVAAVGVIYNRQQNTQRFYLGHDDDILCLTIHPLKDYVATGQVGRDPSIHIWDTETIKPLSILKGHHQYGVSAVDFSADGKRLASVGIDDSHTVVLWDWKKGEKLSIARGSKDKIFVVKMNPYVPDKLITAGIKHMKFWRKAGGGLIGRKGYIGTLGKNDTMMCAVYGWTEEMAFSGTSTGDVCIWRDIFLVKTVKAHDGPVFSMHALEKGFVTGGKDGIVALWDDSFERCLKTYAIKRAALAPGSKGLLLEDNPSIRAISLGHGHILVGTKNGEILEVDKSGPITLLVQGHMEGEVWGLATHPYLPICATVSDDKTLRIWDLSPSHCMLAVRKLKKGGRCCCFSPDGKALAVGLNDGSFLMANADTLEDLVSFHHRKDMISDIRFSPGSGKYLAVASHDSFIDIYNVMSSKRVGICKGATSYITHIDWDIRGKLLQVNTGAKEQLFFEAPRGKKQTIPSVEVEKIAWASWTSVLGLCCEGIWPVIGEVTDVTASCLTSDKMVLATGDDLGFVKLFRYPTKGKFGKFKRYVAHSTHVTNVRWTYDDSMLVTLGGTDMSLMVWTNEMEGYREKRPCDSEESDIDSEEDGGYDSDVTRENEISYTIRALSTNIRPMLGIKPHLQQKEPSIDERPPVSRAPPQPEKLQTNNVGKKKRPIEDLVLELIFGYRGRDCRNNVHYLNDGDDIIYHTASVGILHNVATGSQSFYQEHNDDILCLTVNQHPKFINIVATGQVGDSADMSATAPSIHIWDAMNKQTLSILRCYHSKGVCSVSFSATGKLLLSVGLDPEHTITIWRWQEGAKIASRAGHNQRIFVAEFRPDSDTQFVSVGVKHVKFWTLAGRALLSKKGLLSTLEDARMQTMLAIAFGANNLTFTGTISGDVCVWKDHILCRIVARAHNGPVFAMYTTLRDGLIVTGGKERPSKEGGAVKLWDQELRRCRAFRLETGQATDCVRSVCRGKGKILVGTRNAEIIEVGEKNAACNILVNGHVDGPIWGLATHPSRDFFLSAAEDGTVRLWDIADKKMLNKVNLGHAARTVCYSPEGDMVAIGMKNGEFIILLVSSLKIWGKKRDRRCAIHDIRFSPDSRYLAVGSSENSVDFYDLTLGPTLNRISYCKDIPSFVIQMDFSADSSYLQVSSGCYKRHVYEVPSGKHLMDHAAIDRITWATWTSILGDEVLGIWSRHAEKADVNCACVSHSGISLVTGDDFGMVKLFDFPCPEKFAKHKRFLGHSPHVTNIRFTSGDRHVVSAGGDDCSLFVWKCVHTPH

SEQ ID NO: 10672 - protein, 1008 aa, Homo sapiens
MSSVSGNASFILGTGKIVTPQKHAELPPNPCTPDTFKSPLNFSTVTVEQLGITPESFVRNSAGKSSSYLKKCRRRSAVGARGSPETNHLIRFIARQQNIKNARKSPLAQDSPSQGSPALYRNVNTLRERISAFQSAFHSIKENEKMTGCLEFSEAGKESEMTDLTRKEGLSACQQSGFPAVLSSKRRRISYQRDSDENLTDAEGKVIGLQIFNIDTDRACAVETSVDLSEISSKLGSTQSGFLVEESLPLSELTETSNALKVADCVVGKGSSDAVSPDTFTAEVSSDAVPDVRSPATPACRRDLPTPKTFVLRSVLKKPSVKMCLESLQEHCNNLYDDDGTHPSLISNLPNCCKEKEAEDEENFEAPAFLNMRKRKRVTFGEDLSPEVFDESLPANTPLRKGGTPVCKKDFSGLSSLLLEQSPVPEPLPQPDFDDKGENLENIEPLQVSFAVLSSPNKSSISETLSGTDTFSSSNNHEKISSPKVGRITRTSNRRNQLVSVVEESVCNLLNTEVQPCKEKKINRRKSQETKCTKRALPKKSQVLKSCRKKKGKGKKSVQKSLYGERDIASKKPLLSPIPELPEVPEMTPSIPSIRRLGSGYFSSNGKLEEVKTPKNPVKRKDLLRHDPDLHMHQGYDKYDVSEFCSYIKSSSSLGNATSDEDPNTNIMNINENKNIPKAKNKSESENEPKAGTDSPVSCASVTEERVASDSPKPALTLQQGQEFSAGGQNAENLCQFFKISPDLNIKCERKDDFLGAAEGKLQCNRLMPNSQKDCHCLGDVLIENTKESKSQSEDLGRKPMESSSVVSCRDRKDRRRSMCYSDGRSLHLEKNGNHTPSSSVGSSVEISLENSELFKDLSDAIEQTFQRRNSETKVRRSTRLQKDLENEGLVWISLPLPSTSQKAKRRTICTFDSSGFESMSPIKETVSSRQKPQMAPPVSDPENSQGPAAGSSDEPGKRRKSFCISTLANTKATSQFKGYRRRSSLNGKGESSLTALERIEHNGERKQ

SEQ ID NO: 10673 - protein, 294 aa, Homo sapiens
MQFGTRTTTAEPGFMGTWQNADTNLLFRMSQQAIRCTLVNCTCECFQPGKINLRTCDQCKHGWVAHALDKLSTQHLYHPTQVEIVQSNVVFDISSLMLYGTQAVPVRLKILLDRLFSVLKQEEVLHILHGLGWTLRDYVRGYILQDAAGKVLDRWAIMSREEEIITLQQFLRFGETKSIVELMAIQEKEGQAVAVPSSKTDSDIRTFIESNNRTRSPSLLAHLENSNPSSIHHFENIPNSLAFLLPFQYINPVSAPLLGLPPNGLLLEQPGLRLREPSLSTQNEYNESSESEVS

SEQ ID NO: 10674 - protein, 1032 aa, Homo sapiens
MAHLGPTPPPHSLNYKSEDRLSEQDWPAYFKVPCCGVDTSQIEAIRCTLVNCTCECFQPGKINLRTCDQCKHGWVAHALDKLSTQHLYHPTQVEIVQSNVVFDISSLMLYGTQAVPVRLKILLDRLFSVLKQEEVLHILHGLGWTLRDYVRGYILQDAAGKVLDRWAIMSREEEIITLQQFLRFGETKSIVELMAIQEKEGQAVAVPSSKTDSDIRTFIESNNRTRSPSLLAHLENSNPSSIHHFENIPNSLAFLLPFQYINPVSAPLLGLPPNGLLLEQPGLRLREPSLSTQNEYNESSESEVSPTPYKNDQTPNRNALTSITNVEPKTEPACVSPIQNSAPVSDLTKTEHPKSSFRIHRMRRMGSASRKGRVFCNACGKTFYDKGTLKIHYNAVHLKIKHRCTIEGCNMVFSSLRSRNRHSANPNPRLHMPMLRNNRDKDLIRATSGAATPVIASTKSNLALTSPGRPPMGFTTPPLDPVLQNPLPSQLVFSGLKTVQPVPPFYRSLLTPGEMVSPPTSLPTSPIIPTSGTIEQHPPPPSEPVVPAVMMATHEPSADLAPKKKPRKSSMPVKIEKEIIDTADEFDDEDDDPNDGGAVVNDMSHDNHCHSQEEMSPGMSVKDFSKHNRTRCISRTEIRRADSMTSEDQEPERDYENESESSEPKLGEESMEGDEHIHSEVSEKVLMNSERPDENHSEPSHQDVIKVKEEFTDPTYDMFYMSQYGLYNGGGASMAALHESFTSSLNYGSPQKFSPEGDLCSSPDPKICYVCKKSFKSSYSVKLHYRNVHLKEMHVCTVAGCNAAFPSRRSRDRHSANINLHRKLLTKELDDMGLDSSQPSLSKDLRDEFLVKIYGAQHPMGLDVREDASSPAGTEDSHLNGYGRGMAEDYMVLDLSTTSSLQSSSSIHSSRESDAGSDEGILLDDIDGASDSGESAHKAEAPALPGSLGAEVSGSLMFSSLSGSNGGIMCNICHKMYSNKGTLRVHYKTVHLREMHKCKVPGCNMMFSSVRSRNRHSQNPNLHKNIPFTSVD

SEQ ID NO: 10675 - protein, 1099 aa, Homo sapiens
MAHLGPTPPPHSLNYKSEDRLSEQDWPAYFKVPCCGVDTSQIESEEAEVDVRERETQRDREPKRARDLTLRDSCTDNSMQFGTRTTTAEPGFMGTWQNADTNLLFRMSQQAIRCTLVNCTCECFQPGKINLRTCDQCKHGWVAHALDKLSTQHLYHPTQVEIVQSNVVFDISSLMLYGTQAVPVRLKILLDRLFSVLKQEEVLHILHGLGWTLRDYVRGYILQDAAGKVLDRWAIMSREEEIITLQQFLRFGETKSIVELMAIQEKEGQAVAVPSSKTDSDIRTFIESNNRTRSPSLLAHLENSNPSSIHHFENIPNSLAFLLPFQYINPVSAPLLGLPPNGLLLEQPGLRLREPSLSTQNEYNESSESEVSPTPYKNDQTPNRNALTSITNVEPKTEPACVSPIQNSAPVSDLTKTEHPKSSFRIHRMRRMGSASRKGRVFCNACGKTFYDKGTLKIHYNAVHLKIKHRCTIEGCNMVFSSLRSRNRHSANPNPRLHMPMLRNNRDKDLIRATSGAATPVIASTKSNLALTSPGRPPMGFTTPPLDPVLQNPLPSQLVFSGLKTVQPVPPFYRSLLTPGEMVSPPTSLPTSPIIPTSGTIEQHPPPPSEPVVPAVMMATHEPSADLAPKKKPRKSSMPVKIEKEIIDTADEFDDEDDDPNDGGAVVNDMSHDNHCHSQEEMSPGMSVKDFSKHNRTRCISRTEIRRADSMTSEDQEPERDYENESESSEPKLGEESMEGDEHIHSEVSEKVLMNSERPDENHSEPSHQDVIKVKEEFTDPTYDMFYMSQYGLYNGGGASMAALHESFTSSLNYGSPQKFSPEGDLCSSPDPKICYVCKKSFKSSYSVKLHYRNVHLKEMHVCTVAGCNAAFPSRRSRDRHSANINLHRKLLTKELDDMGLDSSQPSLSKDLRDEFLVKIYGAQHPMGLDVREDASSPAGTEDSHLNGYGRGMAEDYMVLDLSTTSSLQSSSSIHSSRESDAGSDEGILLDDIDGASDSGESAHKAEAPALPGSLGAEVSGSLMFSSLSGSNGGIMCNICHKMYSNKGTLRVHYKTVHLREMHKCKVPGCNMMFSSVRSRNRHSQNPNLHKNIPFTSVD

SEQ ID NO: 10676 - protein, 846 aa, Homo sapiens
MFRRARLSVKPNVRPGVGARGSTASNPQRGRESPRPPDPATDSASKPAEPTDVPTVDFGGAEPQEKAPRSSTEKTGGDNDVEESSRSSSTVSQRRKRISSTSSLVKSSVSVPSESHPLSTINQEAPQPTATSTKEKQPCSDRYRIYKAQKLREMLKEELRKEKKQWKNKYAINESQRPPDRSKMTMRDFIYYLPDNNPMTSSLEQEKKTEKPSTPVQTREQEGKSTPNAEDNEMEEETDDGPLLVPRVKVAEDGSIILDEESLTVEVLRTKGPCVVEENDPIFERGSTTTYSSFRKNYYSKPWSNKETDMFFLAISMVGTDFSMIGQLFPHRARIEIKNKFKREEKTNGWRIDKAFQEKRPFDFDFFAHLLQKVLAEEEKRKQKSVKNHSLKEKKSTKPRKNVKVKKVACEGVNNDPDESMSSRISDTERSQKDAQTVEEESLTLSREDAEQVALEVDLNQKKRRRKKQDGANELGVNNLLENATVQAGPSKGEKHKNKCQAIRPELKEGECSKEQMLSCTQNIDGIVGFASTEKVEKRTDPILSLSNQQDATSVATESSESSTSDLPSFEVGIRALCEVNNAEGSCIEERNVDLKNNSLEIDQTENVKPMLRGRFQRPKPNLSRAGKKSVLSQGKTESESKNSHSKTSVEKNHVEKDKMNTLDILRMETTERENPEAETVSVLGEKNCLQEGSQLKALRPVQVRGRLQKPKPNAGKAAERKEILISQEEIGANVEKNENESCADRDTPQHMEDQSRKDFEEEDVILQPEKNDSFQNVQPDEPKVLNECLSVQENNKANKLNQVPILRTRFQKPKPNIGRGTGRREISSKEEVLEKILSLGKWRQH

SEQ ID NO: 10677 - protein, 1322 aa, Homo sapiens
MDVFSFVKIAKLSSHRTKSSGWPPPSGTWGLSQVPPYGWEMTANRDGRDYFINHMTQAIPFDDPRLESCQIIPPAPRKVEMRRDPVLGFGFVAGSEKPVVVRSVTPGGPSEGKLIPGDQIVMINDEPVSAAPRERVIDLVRSCKESILLTVIQPYPSPKSAFISAAKKARLKSNPVKVRFSEEVIINGQVSETVKDNSLLFMPNVLKVYLENGQTKSFRFDCSTSIKDVILTLQEKLSIKGIEHFSLMLEQRTEGAGTKLLLLHEQETLTQVTQRPSSHKMRCLFRISFVPKDPIDLLRRDPVAFEYLYVQSCNDVVQERFGPELKYDIALRLAALQMYIATVTTKQTQKISLKYIEKEWGLETFLPSAVLQSMKEKNIKKALSHLVKANQNLVPPGKKLSALQAKVHYLKFLSDLRLYGGRVFKATLVQAEKRSEVTLLVGPRYGISHVINTKTNLVALLADFSHVNRIEMFSEEESLVRVELHVLDVKPITLLMESSDAMNLACLTAGYYRLLVDSRRSIFNMANKKNTATQETGPENKGKHNLLGPDWNCIPQMTTFIGEGEQEAQITYIDSKQKTVEITDSTMCPKEHRHLYIDNAYSSDGLNQQLSQPGEAPCEADYRSLAQRSLLTLSGPETLKKAQESPRGAKVSFIFGDFALDDGISPPTLGYETLLDEGPEMLEKQRNLYIGSANDMKGLDLTPEAEGIQFVENSVYANIGDVKSFQAAEGIEEPLLHDICYAENTDDAEDEDEVSCEEDLVVGEMNQPAILNLSGSSDDIIDLTSLPPPEGDDNEDDFLLRSLNMAIAAPPPGFRDSSDEEDSQSQAASFPEDKEKGSSLQNDEIPVSLIDAVPTSAEGKCEKGLDNAVVSTLGALEALSVSEEQQTSDNSGVAILRAYSPESSSDSGNETNSSEMTESSELATAQKQSENLSRMFLATHEGYHPLAEEQTEFPASKTPAGGLPPKSSHALAARPATDLPPKVVPSKQLLHSDHMEMEPETMETKSVTDYFSKLHMGSVAYSCTSKRKSKLADGEGKAPPNGNTTGKKQQGTKTAEMEEEASGKFGTVSSRDSQHLSTFNLERTAFRKDSQRWYVATEGGMAEKSGLEAATGKTFPRASGLGAREAEGKEEGAPDGETSDGSGLGQGDRFLTDVTCASSAKDLDNPEDADSSTCDHPSKLPEADESVARLCDYHLAKRMSSLQSEGHFSLQSSQGSSVDAGCGTGSSGSACATPVESPLCPSLGKHLIPDASGKGVNYIPSEERAPGLPNHGATFKELHPQTEGMCPRMTVPALHTAINTEPLFGTLRDGCHRLPKIKETTV

SEQ ID NO: 10678 - protein, 1326 aa, Homo sapiens
MNLNTSSNTGDTQRLKIASLDVKQILKNETELDITDNLRKKLHWAKKEKLEITTKHNAELASYESQIAKLRSEVEKGEALRQSLEYDLAVARKEAGLGRRAAEERLAEAHRIQEKLCAQNSELQAKTNETEKAFQTSQQKWKEECRRFEHDLEERDNMIQNCNREYDLLMKEKSRLEKTLQEALEKHQREKNEMESHIRETALEEFRLQEEQWEAERRELQFIVQEQDTAVQNMHKKVEKLETEHMDCSDLLRRQTSELEFSTQREERLRKEFEATTLRVRKLEENIEAERAAHLESKFNSEIIQLRIRDLEGALQVEKASQAEAVADLEIIKNEFKEVESAYEREKHNAQESFAKLNLLEKEYFSKNKKLNEDIEEQKKVIIDLSKRLQYNEKSCSELQEELVMAKKHQAFLVETCENNVKELESILDSFTVSGQWTSGIHKDKDKPPSFSVVLERLRRTLTDYQNKLEDASNEEKACNELDSTKQKIDSHTKNIKELQDKLADVNKELSHLHTKCADREALISTLKVELQNVLHCWEKEKAQAAQSESELQKLSQAFHKDAEEKLTFLHTLYQHLVAGCVLIKQPEGMLDKFSWSELCAVLQENVDALIADLNRANEKIRHLEYICKNKSDTMRELQQTQEDTFTKVAEQIKAQESCWHRQKKELELQYSELFLEVQKRAQKFQEIAEKNMEKLNHIEKSHEQLVLENSHFKKLLSQTQREQMSLLAACALMAGALYPLYSRSCALSTQRDFLQEQVNTFELFKLEIRTLAQALSTVEEKKQEEAKMKKKTFKGLIRIFRKGVIAVLAANRLKILGQSCASLFTWMESFKEGIGMLVCTGEPQDKHKFPKHQKEQLRCLQALSWLTSSDLLAAIISSMAELQDVIGKADPNSRICGHLLIGAAKNSFAKLMDKISLVMECIPLHSSRSITYVEKDSLVQRLAHGLHKVNTLALKYGLRGHVPITKSTASLQKQILGFTQRLHAAEVERRSLRLEVTEFKRSVNEMKKELDKAQGLQMQLNEFKQSKLITHEKFESACEELNNALLREEQAQMLLNEQAQQLQELNYKLELHSSEEADKNQTLGEAVKSLSEAKMELRRKDQSLRQLNRHLTQLEQDKRRLEENIHDAESALRMAAKDKECVANHMRAVENTLHKVRDQISLSWSAASRNDFTLQLPKLHLETFAMEGLKGGPEVVACQAMIKSFMDVYQLASTRIMTLEKEMTSHRSHIAALKSELHTACLRENASLQSIGSRDHSNLSIPSRAPLPADTTGIGDFLPLKAELDTTYTFLKETFINTVPHALTSSHSSPVTMSANANRPTQIGL

SEQ ID NO: 10679 - protein, 886 aa, Homo sapiens
MEPPTVPSERSLSLSLPGPREGQATLKPPPQHLWRQPRTPIRIQQRGYSDSAERAERERQPHRPIERADAMDTSDRPGLRTTRMSWPSSFHGTGTGSGGAGGGSSRRFEAENGPTPSPGRSPLDSQASPGLVLHAGAATSQRRESFLYRSDSDYDMSPKTMSRNSSVTSEAHAEDLIVTPFAQVLASLRSVRSNFSLLTNVPVPSNKRSPLGGPTPVCKATLSEETCQQLARETLEELDWCLEQLETMQTYRSVSEMASHKFKRMLNRELTHLSEMSRSGNQVSEYISTTFLDKQNEVEIPSPTMKEREKQQAPRPRPSQPPPPPVPHLQPMSQITGLKKLMHSNSLNNSNIPRFGVKTDQEELLAQELENLNKWGLNIFCVSDYAGGRSLTCIMYMIFQERDLLKKFRIPVDTMVTYMLTLEDHYHADVAYHNSLHAADVLQSTHVLLATPALDAVFTDLEILAALFAAAIHDVDHPGVSNQFLINTNSELALMYNDESVLENHHLAVGFKLLQEDNCDIFQNLSKRQRQSLRKMVIDMVLATDMSKHMTLLADLKTMVETKKVTSSGVLLLDNYSDRIQVLRNMVHCADLSNPTKPLELYRQWTDRIMAEFFQQGDRERERGMEISPMCDKHTASVEKSQVGFIDYIVHPLWETWADLVHPDAQEILDTLEDNRDWYYSAIRQSPSPPPEEESRGPGHPPLPDKFQFELTLEEEEEEEISMAQIPCTAQEALTAQGLSGVEEALDATIAWEASPAQESLEVMAQEASLEAELEAVYLTQQAQSTGSAPVAPDEFSSREEFVVAVSHSSPSALALQSPLLPAWRTLSVSEHAPGLPGLPSTAAEVEAQREHQAAKRACSACAGTFGEDTSALPAPGGGGSGGDPT

SEQ ID NO: 10680 - protein, 765 aa, Homo sapiens
MSAQSLLHSVFSCSSPASSSAASAKGFSKRKLRQTRSLDPALIGGCGSDEAGAEGSARGATAGRLYSPSLPAESLGPRLASSSRGPPPRATRLPPPGPLCSSFSTPSTPQEKSPSGSFHFDYEVPLGRGGLKKSMAWDLPSVLAGPASSRSASSILCSSGGGPNGIFASPRRWLQQRKFQSPPDSRGHPYVVWKSEGDFTWNSMSGRSVRLRSVPIQSLSELERARLQEVAFYQLQQDCDLSCQITIPKDGQKRKKSLRKKLDSLGKEKNKDKEFIPQAFGMPLSQVIANDRAYKLKQDLQRDEQKDASDFVASLLPFGNKRQNKELSSSNSSLSSTSETPNESTSPNTPEPAPRARRRGAMSVDSITDLDDNQSRLLEALQLSLPAEAQSKKEKARDKKLSLNPIYRQVPRLVDSCCQHLEKHGLQTVGIFRVGSSKKRVRQLREEFDRGIDVSLEEEHSVHDVAALLKEFLRDMPDPLLTRELYTAFINTLLLEPEEQLGTLQLLIYLLPPCNCDTLHRLLQFLSIVARHADDNISKDGQEVTGNKMTSLNLATIFGPNLLHKQKSSDKEFSVQSSARAEESTAIIAVVQKMIENYEALFMVPPDLQNEVLISLLETDPDVVDYLLRRKASQSSSPDMLQSEVSFSVGGRHSSTDSNKASSGDISPYDNNSPVLSERSLLAMQEDAAPGGSEKLYRVPGQFMLVGHLSSSKSRESSPGPRLGKGNWSLASRRWPKQATLLLLHVAWCGALRTFSSSLPYLMFL

SEQ ID NO: 10681 - protein, 327 aa, Homo sapiens
MPALLERPKLSNAMARALHRHIMMERERKRQEEEEVDKMMEQKMKEEQERRKKKEMEERMSLEETKEQILKLEEKLLALQEEKHQLFLQLKKVLHEEEKRRRKEQSDLTTLTSAAYQQSLTVHTGTHLLSMQGSPGGHNRPGTLMAADRAKQMFGPQVLTTRHYVGSAAAFAGTPEHGQFQGSPGGAYGTAQPPPHYGPTQPAYSPSQQLRAPSAFPAVQYLSQPQPQPYAVHGHFQPTQTGFLQPGGALSLQKQMEHANQQTGFSDSSSLRPMHPQALHPAPGLLASPQLPVQMQPAGKSGFAATSQPGPRLPFIQHSQNPRFYHK

SEQ ID NO: 10682 - protein, 530 aa, Homo sapiens
MTRDFKPGDLIFAKMKGYPHWPARVDEVPDGAVKPPTNKLPIFFFGTHETAFLGPKDIFPYSENKEKYGKPNKRKGFNEGLWEIDNNPKVKFSSQQAATKQSNASSDVEVEEKETSVSKEDTDHEEKASNEDVTKAVDITTPKAARRGRKRKAEKQVETEEAGVVTTATASVNLKVSPKRGRPAATEVKIPKPRGRPKMVKQPCPSESDIITEEDKSKKKGQEEKQPKKQPKKDEEGQKEEDKPRKEPDKKEGKKEVESKRKNLAKTGVTSTSDSEEEGDDQEGEKKRKGGRNFQTAHRRNMLKGQHEKEAADRKRKQEEQMETEQQNKDEGKKPEVKKVEKKRETSMDSRLQRIHAEIKNSLKIDNLDVNRCIEALDELASLQVTMQQAQKHTEMITTLKKIRRFKVSQVIMEKSTMLYNKFKNMFLVGEGDSVITQVLNKSLAEQRQHEEANKTKDQGKKGPNKKLEKEQTGSKTLNGGSDAQDGNQPQHNGESNEDSKDNHEASTKKKPSSEERETEISLKDSTLDN

SEQ ID NO: 10683 - protein, 447 aa, Homo sapiens
MAGAGGGNDIQWCFSQVKGAVDDDVAEADIISTVEFNHSGELLATGDKGGRVVIFQQEQENKIQSHSRGEYNVYSTFQSHEPEFDYLKSLEIEEKINKIRWLPQKNAAQFLLSTNDKTIKLWKISERDKRPEGYNLKEEDGRYRDPTTVTTLRVPVFRPMDLMVEASPRRIFANAHTYHINSISINSDYETYLSADDLRINLWHLEITDRSFNIVDIKPANMEELTEVITAAEFHPNSCNTFVYSSSKGTIRLCDMRASALCDRHSKLFEEPEDPSNRSFFSEIISSISDVKFSHSGRYMMTRDYLSVKIWDLNMENRPVETYQVHEYLRSKLCSLYENDCIFDKFECCWNGSDSVVMTGSYNNFFRMFDRNTKRDITLEASRENNKPRTVLKPRKVCASGKRKKDEISVDSLDFNKKILHTAWHPKENIIAVATTNNLYIFQDKVN

SEQ ID NO: 10684 - protein, 723 aa, Homo sapiens
MGILERVVRRNGRVDRSLKDECDTAEKKAKVIAGMNAVEENQGPGESQKVEEASPPAVQQPTDPASPTVATTPEPVGSDAGDKNATKAGDDEPEYEDGRGFGIGELVWGKLRGFSWWPGRIVSWWMTGRSRAAEGTRWVMWFGDGKFSVVCVEKLMPLSSFCSAFHQATYNKQPMYRKAIYEVLQVASSRAGKLFPVCHDSDESDTAKAVEVQNKPMIEWALGGFQPSGPKGLEPPEEEKNPYKEVYTDMWVEPEAAAYAPPPPAKKPRKSTAEKPKVKEIIDERTRERLVYEVRQKCRNIEDICISCGSLNVTLEHPLFVGGMCQNCKNCFLECAYQYDDDGYQSYCTICCGGREVLMCGNNNCCRCFCVECVDLLVGPGAAQAAIKEDPWNCYMCGHKGTYGLLRRREDWPSRLQMFFANNHDQEFDPPKVYPPVPAEKRKPIRVLSLFDGIATGLLVLKDLGIQVDRYIASEVCEDSITVGMVRHQGKIMYVGDVRSVTQKHIQEWGPFDLVIGGSPCNDLSIVNPARKGLYEGTGRLFFEFYRLLHDARPKEGDDRPFFWLFENVVAMGVSDKRDISRFLESNPVMIDAKEVSAAHRARYFWGNLPGMNRPLASTVNDKLELQECLEHGRIAKFSKVRTITTRSNSIKQGKDQHFPVFMNEKEDILWCTEMERVFGFPVHYTDVSNMSRLARQRLLGRSWSVPVIRHLFAPLKEYFACV

SEQ ID NO: 10685 - protein, 781 aa, Homo sapiens
MPAMPSSGPGDTSSSAAEREEDRKDGEEQEEPRGKEERQEPSTTARKVGRPGRKRKHPPVESGDTPKDPAVISKSPSMAQDSGASELLPNGDLEKRSEPQPEEGSPAGGQKGGAPAEGEGAAETLPEASRAVENGCCTPKEGRGAPAEAGKEQKETNIESMKMEGSRGRLRGGLGWESSLRQRPMPRLTFQAGDPYYISKRKRDEWLARWKREAEKKAKVIAGMNAVEENQGPGESQKVEEASPPAVQQPTDPASPTVATTPEPVGSDAGDKNATKAGDDEPEYEDGRGFGIGELVWGKLRGFSWWPGRIVSWWMTGRSRAAEGTRWVMWFGDGKFSVVCVEKLMPLSSFCSAFHQATYNKQPMYRKAIYEVLQVASSRAGKLFPVCHDSDESDTAKAVEVQNKPMIEWALGGFQPSGPKGLEPPEEEKNPYKEVYTDMWVEPEAAAYAPPPPAKKPRKSTAEKPKVKEIIDERTRERLVYEVRQKCRNIEDICISCGSLNVTLEHPLFVGGMCQNCKNCFLECAYQYDDDGYQSYCTICCGGREVLMCGNNNCCRCFCVECVDLLVGPGAAQAAIKEDPWNCYMCGHKGTYGLLRRREDWPSRLQMFFANNHDQEFDPPKVYPPVPAEKRKPIRVLSLFDGIATGLLVLKDLGIQVDRYIASEVCEDSITVGMVRHQGKIMYVGDVRSVTQKHIQEWGPFDLVIGGSPCNDLSIVNPARKGLYEGTGRLFFEFYRLLHDARPKEGDDRPFFWLFENVVAMGVSDKRDISRFLEVQNSHLY

SEQ ID NO: 10686 - protein, 271 aa, Homo sapiens
MGSLFPLSLLFFLAAAYPGVGSALGRRTKRAQSPKGSPLAPSGTSVPFWVRMSPEFVAVQPGKSVQLNCSNSCPQPQNSSLRTPLRQGKTLRGPGWVSYQLLDVRAWSSLAHCLVTCAGKTRWATSRITAYKPPHSVILEPPVLKGRKYTLRCHVTQVFPVGYLVVTLRHGSRVIYSESLERFTGLDLANVTLTYEFAAGPRDFWQPVICHARLNLDGLVVRNSSAPITLMLAWSPAPTALASGSIAALVGILLTVGAAYLCKCLAMKSQA

SEQ ID NO: 10687 - protein, 552 aa, Homo sapiens
METLESELTCPICLELFEDPLLLPCAHSLCFNCAHRILVSHCATNESVESITAFQCPTCRHVITLSQRGLDGLKRNVTLQNIIDRFQKASVSGPNSPSETRRERAFDANTMTSAEKVLCQFCDQDPAQDAVKTCVTCEVSYCDECLKATHPNKKPFTGHRLIEPIPDSHIRGLMCLEHEDEKVNMYCVTDDQLICALCKLVGRHRDHQVAALSERYDKLKQNLESNLTNLIKRNTELETLLAKLIQTCQHVEVNASRQEAKLTEECDLLIEIIQQRRQIIGTKIKEGKVMRLRKLAQQIANCKQCIERSASLISQAEHSLKENDHARFLQTAKNITERVSMATASSQVLIPEINLNDTFDTFALDFSREKKLLECLDYLTAPNPPTIREELCTASYDTITVHWTSDDEFSVVSYELQYTIFTGQANVVSLCNSADSWMIVPNIKQNHYTVHGLQSGTKYIFMVKAINQAGSRSSEPGKLKTNSQPFKLDPKSAHRKLKVSHDNLTVERDESSSKKSHTPERFTSQGSYGVAGNVFIDSGRHYWEVVISGSTW

SEQ ID NO: 10688 - protein, 776 aa, Homo sapiens
MLPGCIFLMILLIPQVKEKFILGVEGQQLVRPKKLPLIQKRDTGHTHDDDILKTYEEELLYEIKLNRKTLVLHLLRSREFLGSNYSETFYSMKGEAFTRHPQIMDHCFYQGSIVHEYDSAASISTCNGLRGFFRINDQRYLIEPVKYSDEGEHLVFKYNLRVPYGANYSCTELNFTRKTVPGDNESEEDSKIKGIHDEKYVELFIVADDTVYRRNGHPHNKLRNRIWGMVNFVNMIYKTLNIHVTLVGIEIWTHEDKIELYSNIETTLLRFSFWQEKILKTRKDFDHVVLLSGKWLYSHVQGISYPGGMCLPYYSTSIIKDLLPDTNIIANRMAHQLGHNLGMQHDEFPCTCPSGKCVMDSDGSIPALKFSKCSQNQYHQYLKDYKPTCMLNIPFPYNFHDFQFCGNKKLDEGEECDCGPAQECTNPCCDAHTCVLKPGFTCAEGECCESCQIKKAGSICRPAKDECDFPEMCTGHSPACPKDQFRVNGFPCKNSEGYCFMGKCPTREDQCSELFDDEAIESHDICYKMNTKGNKFGYCKNKENRFLPCEEKDVRCGKIYCTGGELSSLLGEDKTYHLKDPQKNATVKCKTIFLYHDSTDIGLVASGTKCGEGMVCNNGECLNMEKVYISTNCPSQCNENPVDGHGLQCHCEEGQAPVACEETLHVTNITILVVVLVLVIVGIGVLILLVRYRKCIKLKQVQSPPTETLGVENKGYFGDEQQIRTEPILPEIHFLNQRTPESLESLPTSFSSPHYITLKPASKDSRGIADPNQSAK

SEQ ID NO: 10689 - protein, 2199 aa, Homo sapiens
MAEPSSARRPVPLIESELYFLIARYLSAGPCRRAAQVLVQELEQYQLLPKRLDWEGNEHNRSYEELVLSNKHVAPDHLLQICQRIGPMLDKEIPPSISRVTSLLGAGRQSLLRTAKDCRHTVWKGSAFAALHRGRPPEMPVNYGSPPNLVEIHRGKQLTGCSTFSTAFPGTMYQHIKMHRRILGHLSAVYCVAFDRTGHRIFTGSDDCLVKIWSTHNGRLLSTLRGHSAEISDMAVNYENTMIAAGSCDKIIRVWCLRTCAPVAVLQGHTGSITSLQFSPMAKGSQRYMVSTGADGTVCFWQWDLESLKFSPRPLKFTEKPRPGVQMLCSSFSVGGMFLATGSTDHVIRMYFLGFEAPEKIAELESHTDKVDSIQFCNNGDRFLSGSRDGTARIWRFEQLEWRSILLDMATRISGDLSSEEERFMKPKVTMIAWNQNDSIVVTAVNDHVLKVWNSYTGQLLHNLMGHADEVFVLETHPFDSRIMLSAGHDGSIFIWDITKGTKMKHYFNMIEGQGHGAVFDCKFSQDGQHFACTDSHGHLLIFGFGCSKPYEKIPDQMFFHTDYRPLIRDSNNYVLDEQTQQAPHLMPPPFLVDVDGNPHPTKYQRLVPGRENSADEHLIPQLGYVATSDGEVIEQIISLQTNDNDERSPESSILDGMIRQLQQQQDQRMGADQDTIPRGLSNGEETPRRGFRRLSLDIQSPPNIGLRRSGQVEGVRQMHQNAPRSQIATERDLQAWKRRVVVPEVPLGIFRKLEDFRLEKGEEERNLYIIGRKRKTLQLSHKSDSVVLVSQSRQRTCRRKYPNYGRRNRSWRELSSGNESSSSVRHETSCDQSEGSGSSEEDEWRSDRKSESYSESSSDSSSRYSDWTADAGINLQPPLRTSCRRRITRFCSSSEDEISTENLSPPKRRRKRKKENKPKKENLRRMTPAELANMEHLYEFHPPVWITDTTLRKSPFVPQMGDEVIYFRQGHEAYIEAVRRNNIYELNPNKEPWRKMDLRDQELVKIVGIRYEVGPPTLCCLKLAFIDPATGKLMDKSFSIRYHDMPDVIDFLVLRQFYDEARQRNWQSCDRFRSIIDDAWWFGTVLSQEPYQPQYPDSHFQCYIVRWDNTEIEKLSPWDMEPIPDNVDPPEELGASISVTTDELEKLLYKPQAGEWGQKSRDEECDRIISGIDQLLNLDIAAAFAGPVDLCTYPKYCTVVAYPTDLYTIRMRLVNRFYRRLSALVWEVRYIEHNARTFNEPESVIARSAKKITDQLLKFIKNQHCTNISELSNTSENDEQNAEDLDDSDLPKTSSGRRRVHDGKKSIRATNYVESNWKKQCKELVNLIFQCEDSEPFRQPVDLVEYPDYRDIIDTPMDFGTVRETLDAGNYDSPLEFCKDIRLIFSNAKAYTPNKRSKIYSMTLRLSALFEEKMKKISSDFKIGQKFNEKLRRSQRFKQRQNCKGDSQPNKSIRNLKPKRLKSQTKIIPELVGSPTQSTSSRTAYLGTHKTSAGISSGVTSGDSSDSAESSERRKRNRPITNGSTLSESEVEDSLATSLSSSASSSSEESKESSRARESSSRSGLSRSSNLRVTRTRAAQRKTGPVSLANGCGRKATRKRVYLSDSDNNSLETGEILKARAGNNRKVLRKCAAVAANKIKLMSDVEENSSSESVCSGRKLPHRNASAVARKKLLHNSEDEQSLKSEIEEEELKDENQLLPVSSSHTAQSNVDESENRDSESESDLRVARKNWHANGYKSHTPAPSKTKFLKIESSEEDSKSHDSDHACNRTAGPSTSVQKLKAESISEEADSEPGRSGGRKYNTFHKNASFFKKTKILSDSEDSESEEQDREDGKCHKMEMNPISGNLNCDPIAMSQCSSDHGCETDLDSDDDKIEKPNNFMKDSASQDNGLSRKISRKRVCSSDSDSSLQVVKKSSKARTGLLRITRRCAATAANKIKLMSDVEDVSLENVHTRSKNGRKKPLHLACTTAKKKLSDCEGSVHCEVPSEQYACEGKPPDPDSEGSTKVLSQALNGDSDSEDMLNSEHKHRHTNIHKIDAPSKRKSSSVTSSGEDSKSHIPGSETDRTFSSESTLAQKATAENNFEVELNYGLRRWNGRRLRTYGKAPFSKTKVIHDSQETAEKEVKRKRSHPELENVKISETTGNSKFRPDTSSKSSDLGSVTESDIDCTDNTKTKRRKTKGKAKVVRKDKTFSPVYL

SEQ ID NO: 10690 - protein, 463 aa, Homo sapiens
MKILFVEPAIFLSAFAMTLTGPLTTQYVYRRIWEETGNYTFSSDSNISECEKNKSSPIFAFQEEVQKKVSRFNLQMDISGLIPGLVSTFILLSISDHYGRKFPMILSSVGALATSVWLCLLCYFAFPFQLLIASTFIGAFCGNYTTFWGACFAYIVDQCKEHKQKTIRIAIIDFLLGLVTGLTGLSSGYFIRELGFEWSFLIIAVSLAVNLIYILFFLGDPVKECSSQNVTMSCSEGFKNLFYRTYMLFKNASGKRRFLLCLLLFTVITYFFVVIGIAPIFILYELDSPLCWNEVFIGYGSALGSASFLTSFLGIWLFSYCMEDIHMAFIGIFTTMTGMAMTAFASTTLMMFLARVPFLFTIVPFSVLRSMLSKVVRSTEQGTLFACIAFLETLGGVTAVSTFNGIYSATVAWYPGFTFLLSAGLLLLPAISLCVVKCTSWNEGSYELLIQEESSEDASDRAC

SEQ ID NO: 10691 - protein, 1893 aa, Homo sapiens
MARLADYFVLVAFGPHPRGSGEGQGQILQRFPEKDWEDNPFPQGIELFCQPSGWQLCPERNPPTFFVAVLTDINSERHYCACLTFWEPAEPSQETTRVEDATEREEEGDEGGQTHLSPTAPAPSAQLFAPKTLVLVSRLDHTEVFRNSLGLIYAIHVEGLNVCLENVIGNLLTCTVPLAGGSQRTISLGAGDRQVIQTPLADSLPVSRCSVALLFRQLGITNVLSLFCAALTEHKVLFLSRSYQRLADACRGLLALLFPLRYSFTYVPILPAQLLEVLSTPTPFIIGVNAAFQAETQELLDVIVADLDGGTVTIPECVHIPPLPEPLQSQTHSVLSMVLDPELELADLAFPPPTTSTSSLKMQDKELRAVFLRLFAQLLQGYRWCLHVVRIHPEPVIRFHKAAFLGQRGLVEDDFLMKVLEGMAFAGFVSERGVPYRPTDLFDELVAHEVARMRADENHPQRVLRHVQELAEQLYKNENPYPAVAMHKVQRPGESSHLRRVPRPFPRLDEGTVQWIVDQAAAKMQGAPPAVKAERRTTVPSGPPMTAILERCSGLHVNSARRLEVVRNCISYVFEGKMLEAKKLLPAVLRALKGRAARRCLAQELHLHVQQNRAVLDHQQFDFVVRMMNCCLQDCTSLDEHGIAAALLPLVTAFCRKLSPGVTQFAYSCVQEHVVWSTPQFWEAMFYGDVQTHIRALYLEPTEDLAPAQEVGEAPSQEDERSALDVASEQRRLWPTLSREKQQELVQKEESTVFSQAIHYANRMSYLLLPLDSSKSRLLRERAGLGDLESASNSLVTNSMAGSVAESYDTESGFEDAETCDVAGAVVRFINRFVDKVCTESGVTSDHLKGLHVMVPDIVQMHIETLEAVQRESRRLPPIQKPKLLRPRLLPGEECVLDGLRVYLLPDGREEGAGGSAGGPALLPAEGAVFLTTYRVIFTGMPTDPLVGEQVVVRSFPVAALTKEKRISVQTPVDQLLQDGLQLRSCTFQLLKMAFDEEVGSDSAELFRKQLHKLRYPPDIRATFAFTLGSAHTPGRPPRVTKDKGPSLRTLSRNLVKNAKKTIGRQHVTRKKYNPPSWEHRGQPPPEDQEDEISVSEELEPSTLTPSSALKPSDRMTMSSLVERACCRDYQRLGLGTLSSSLSRAKSEPFRISPVNRMYAICRSYPGLLIVPQSVQDNALQRVSRCYRQNRFPVVCWRSGRSKAVLLRSGGLHGKGVVGLFKAQNAPSPGQSQADSSSLEQEKYLQAVVSSMPRYADASGRNTLSGFSSAHMGSHVPSPRARVTTLSNPMAASASRRTAPRGKWGSVRTSGRSSGLGTDVGSRLAGRDALAPPQANGGPPDPGFLRPQRAALYILGDKAQLKGVRSDPLQQWELVPIEVFEARQVKASFKKLLKACVPGCPAAEPSPASFLRSLEDSEWLIQIHKLLQVSVLVVELLDSGSSVLVGLEDGWDITTQVVSLVQLLSDPFYRTLEGFRLLVEKEWLSFGHRFSHRGAHTLAGQSSGFTPVFLQFLDCVHQVHLQFPMEFEFSQFYLKFLGYHHVSRRFRTFLLDSDYERIELGLLYEEKGERRGQVPCRSVWEYVDRLSKRTPVFHNYMYAPEDAEVLRPYSNVSNLKVWDFYTEETLAEGPPYDWELAQGPPEPPEEERSDGGAPQSRRRVVWPCYDSCPRAQPDAISRLLEELQRLETELGQPAERWKDTWDRVKAAQRLEGRPDGRGTPSSLLVSTAPHHRRSLGVYLQEGPVGSTLSLSLDSDQSSGSTTSGSRQAARRSTSTLYSQFQTAESENRSYEGTLYKKGAFMKPWKARWFVLDKTKHQLRYYDHRVDTECKGVIDLAEVEAVAPGTPTMGAPKTVDEKAFFDVKTTRRVYNFCAQDVPSAQQWVDRIQSCLSDA

SEQ ID NO: 10692 - protein, 729 aa, Homo sapiens
MVNAGAMSGSGNLMDFLDEPFPDVGTYEDFHTIDWLREKSRDTDRHRKITSKSKESIWEFIKSLLDAWSGWVVMLLIGLLAGTLAGVIDLAVDWMTDLKEGVCLSAFWYSHEQCCWTSNETTFEDRDKCPLWQKWSELLVNQSEGASAYILNYLMYILWALLFAFLAVSLVRVFAPYACGSGIPEIKTILSGFIIRGYLGKWTLLIKTVTLVLVVSSGLSLGKEGPLVHVACCCGNFFSSLFSKYSKNEGKRREVLSAAAAAGVSVAFGAPIGGVLFSLEEVSYYFPLKTLWRSFFAALVAAFTLRSINPFGNSRLVLFYVEYHTPWRRKTTRLGKYPVLEVIVVTAITAIIAYPNPYTRQSTSELISELFNDCGALESSQLCDYINDPNMTRPVDDIPDRPAGVGVYTAMWQLALALIFKIVVTIFTFGMKIPSGLFIPSMAVGAIAGRMVGIGVEQLAYHHHDWIIFRNWCRPGADCVTPGLYAMVGAAACLGGVTRMTVSLVVIMFELTGGLEYIVPLMAAAVTSKWVADAFGKEGIYEAHIHLNGYPFLDVKDEFTHRTLATDVMRPRRGEPPLSVLTQDSMTVEDVETLIKETDYNGFPVVVSRDSERLIGFAQRRELILAIKNARQRQEGIVSNSIMYFTEEPPELPANSPHPLKLRRILNLSPFTVTDHTPMETVVDIFRKLGLRQCLVTRSGRLLGIITKKDVLRHMAQMANQDPESIMFN

SEQ ID NO: 10693 - protein, 760 aa, Homo sapiens
MVNAGAMSGSGNLMDFLDEPFPDVGTYEDFHTIDWLREKSRDTDRHRKITSKSKESIWEFIKSLLDAWSGWVVMLLIGLLAGTLAGVIDLAVDWMTDLKEGVCLSAFWYSHEQCCWTSNETTFEDRDKCPLWQKWSELLVNQSEGASAYILNYLMYILWALLFAFLAVSLVRVFAPYACGSGIPEIKTILSGFIIRGYLGKWTLLIKTVTLVLVVSSGLSLGKEGPLVHVACCCGNFFSSLFSKYSKNEGKRREVLSAAAAAGVSVAFGAPIGGVLFSLEEVSYYFPLKTLWRSFFAALVAAFTLRSINPFGNSRLVLFYVEYHTPWYMAELFPFILLGVFGGLWGTLFIRCNIAWCRRRKTTRLGKYPVLEVIVVTAITAIIAYPNPYTRQSTSELISELFNDCGALESSQLCDYINDPNMTRPVDDIPDRPAGVGVYTAMWQLALALIFKIVVTIFTFGMKIPSGLFIPSMAVGAIAGRMVGIGVEQLAYHHHDWIIFRNWCRPGADCVTPGLYAMVGAAACLGGVTRMTVSLVVIMFELTGGLEYIVPLMAAAVTSKWVADAFGKEGIYEAHIHLNGYPFLDVKDEFTHRTLATDVMRPRRGEPPLSVLTQDSMTVEDVETLIKETDYNGFPVVVSRDSERLIGFAQRRELILAIKNARQRQEGIVSNSIMYFTEEPPELPANSPHPLKLRRILNLSPFTVTDHTPMETVVDIFRKLGLRQCLVTRSGRLLGIITKKDVLRHMAQMANQDPESIMFN

SEQ ID NO: 10694 - protein, 310 aa, Homo sapiens
MVYKTLFALCILTAGWRVQSLPTSAPLSVSLPTNIVPPTTIWTSSPQNTDADTASPSNGTHNNSVLPVTASAPTSLLPKNISIESREEEITSPGSNWEGTNTDPSPSGFSSTSGGVHLTTTLEEHSSGTPEAGVAATLSQSAAEPPTLISPQAPASSPSSLSTSPPEVFSASVTTNHSSTVTSTQPTGAPTAPESPTEESSSDHTPTSHATAEPVPQEKTPPTTVSGKVMCELIDMETTTTFPRVIMQEVEHALSSGSIAAITVTVIAVVLLVFGVAAYLKIRHSSYGRLLDDHDYGSWGNYNNPLYDDS

SEQ ID NO: 10695 - protein, 1092 aa, Homo sapiens
MDHINKLTQIEDPREQWRREQERMLKEYLIVAQEALNAKKEIYQIKQQRFELAQEEYQQLHKMCEDDSRSYASSFSGYSTNTKYDPHQIKAEIASRRDRLSRLKRELTQMKQELQYKEKGVETLQEIDRKMSSTHTSYKLDEAQAIMSELRTIKKAICTGEKERRDLMHSLAKLTDSFKNSCSVTDSLVDFPHHVGVPGDAGVPQQFCDAGSQTDIIGEFVFDDKTRLVDRVRLNWQYEEARKRVANIQQQLARLDNESWPSTAEADRDRLQLIKEKEALLQELQLIIAQRRSAGDVARLEEERERLEEELRRARATSAQGATERILLQEKRNCLLMQLEEATRLTSYLQSQLKSLCASTLTVSSGSSRGSLASSRGSLASSRGSLSSVSFTDIYGLPQYEKPDAEGSQLLRFDLIPFDSLGRDAPFSEPPGPSGFHKQRRSLDTPQSLASLSSRSSLSSLSPPSSPLDTPFLPASRDSPLAQLADSCEGPGLGALDRLRAHASAMGDEDLPGMAALQPHGVPGDGEGPHERGPPPASAPVGGTVTLREDSAKRLERRARRISACLSDYSLASDSGVFEPLTKRNEDAEEPAYGDTASNGDPQIHVGLLRDSGSECLLVHVLQLKNPAGLAVKEDCKVHIRVYLPPLDSGTPNTYCSKALEFQVPLVFNEVFRIPVHSSALTLKSLQLYVCSVTPQLQEELLGIAQINLADYDSLSEMQLRWHSVQVFTSSEPSRTREAGCAGESSARDPAHTISISGKTDAVTVLLARTTAQLQAVERELAEERAKLEYTEEEVLEMERKEEQAEAISERSWQADSVDSGCSNCTQTSPPYPEPCCMGIDSILGHPFAAQAGPYSPEKFQPSPLKVDKETNTEDLFLEEAASLVKERPSRRARGSPFVRSGTIVRSQTFSPGARSQYVCRLYRSDSDSSTLPRKSPFVRNTLERRTLRYKQSCRSSLAELMARTSLDLELDLQASRTRQRQLNEELCALRELRQRLEDAQLRGQTDLPPWVLRDERLRGLLREAERQTRQTKLDYRHEQAAEKMLKKASKEIYQLRGQSHKEPIQVQTFREKIAFFTRPRINIPPLPADDV

SEQ ID NO: 10696 - protein, 234 aa, Homo sapiens
MLRVPEPRPGEAKAEGAAPPTPSKPLTSFLIQDILRDGAQRQGGRTSSQRQRDPEPEPEPEPEGGRSRAGAQNDQLSTGPRAAPEEAETLAETEPERHLGSYLLDSENTSGALPRLPQTPKQPQKRSRAAFSHTQVIELERKFSHQKYLSAPERAHLAKNLKLTETQVKIWFQNRRYKTKRKQLSSELGDLEKHSSLPALKEEAFSRASLVSVYNSYPYYPYLYCVGSWSPAFW

SEQ ID NO: 10697 - protein, 1335 aa, Homo sapiens
MNSLSWGAANAVLLLLLLAWASPTFISINRGVRVMKGHSAFLSGDDLKFAIPKEKDACKVEVVMNEPITQRVGKLTPQVFDCHFLPNEVKYVHNGCPILDEDTVKLRLYRFTERDTFIETFILWVYLLEPDCNIIHMSNNVLEVPEFNGLSQAIDKNLLRFDYDRMASLECTVSLDTARTRLPAHGQMVLGEPRPEEPRGDQPHSFFPESQLRAKLKCPGGSCTPGLKKIGSLKVSCEEFLLMGLRYQHLDPPSPNIDYISIQLDLTDTRSKIVYKSESAWLPVYIRAGIPNQIPKAAFMAVFILEVDQFILTSLTTSVLDCEEDETPKPLLVFNITKAPLQGYVTHLLDHTRPISSFTWKDLSDMQIAYQPPNSSHSERRHDEVELEVYDFFFERSAPMTVHISIRTADTNAPRVSWNTGLSLLEGQSRAITWEQFQVVDNDDIGAVRLVTVGGLQHGWLTLRGGKGFLFTVADLQAGVVRYHHDDSDSTKDFVVFRIFDGHHSIRHKFPINVLPKDDSPPFLITNVVIELEEGQTILIQGSMLRASDVDASDDYIFFNITKPPQAGEIMKKPGPGLIGYPVHGFLQRDLFNGIIYYRHFGGEIFEDSFQFVLWDSHEPPNLSVPQVATIHITPVDDQLPKEAPGVSRHLVVKETEVAYITKKQLHFIDSESYDRELVYTITTPPFFSFSHRHLDAGKLFMVDSIPKVVKNPTALELRSFTQHAVNYMKVAYMPPMQDIGPHCRDVQFTFSVSNQHGGTLHGICFNITILPVDNQVPEAFTNPLKVTEGGQSIISTEHILISDADTKLDNIDLSLRELPLHGRVELNGFPLNSGGTFSWGDLHTLKVRYQHDGTEVLQDDLLLEVTDGTNSAEFVLHVEVFPVNDEPPVLKADLMPVMNCSEGGEVVITSEYIFATDVDSDNLKLMFVIAREPQHGVVRRAGVTVDQFSQRDVISEAVTYKHTGGEIGLMPCFDTITLVVSDGEAGPFVNGCCYNGPNPSVPLHASFPVYDLNITVYPVDNQPPSIAIGPVFVVDEGCSTALTVNHLSATDPDTAADDLEFVLVSPPQFGYLENILPSVGFEKSNIGISIDSFQWKDMNAFHINYVQSRHLRIEPTADQFTVYVTDGKHHSLEIPFSIIINPTNDEAPDFVVQNITVCEGQMKELDSSIISAVDLDIPQDALLFSITQKPRHGLLIDRGFSKDFSENKQPANPHQKHAPVHSFSMELLKTGMRLTYMHDDSESLADDFTIQLSDGKHKILKTISVEVIPVNDEKPMLSKKAEIAMNMGETRIISSAILSAIDEDSPREKIYYVFERLPQNGQLQLKECQLRCGI

SEQ ID NO: 10698 - protein, 2179 aa, Homo sapiens
MNSLSWGAANAVLLLLLLAWASPTFISINRGVRVMKGHSAFLSGDDLKFAIPKEKDACKVEVVMNEPITQRVGKLTPQVFDCHFLPNEVKYVHNGCPILDEDTVKLRLYRFTERDTFIETFILWVYLLEPDCNIIHMSNNVLEVPEFNGLSQAIDKNLLRFDYDRMASLECTVSLDTARTRLPAHGQMVLGEPRPEEPRGDQPHSFFPESQLRAKLKCPGGSCTPGLKKIGSLKVSCEEFLLMGLRYQHLDPPSPNIDYISIQLDLTDTRSKIVYKSESAWLPVYIRAGIPNQIPKAAFMAVFILEVDQFILTSLTTSVLDCEEDETPKPLLVFNITKAPLQGYVTHLLDHTRPISSFTWKDLSDMQIAYQPPNSSHSERRHDEVELEVYDFFFERSAPMTVHISIRTADTNAPRVSWNTGLSLLEGQSRAITWEQFQVVDNDDIGAVRLVTVGGLQHGWLTLRGGKGFLFTVADLQAGVVRYHHDDSDSTKDFVVFRIFDGHHSIRHKFPINVLPKDDSPPFLITNVVIELEEGQTILIQGSMLRASDVDASDDYIFFNITKPPQAGEIMKKPGPGLIGYPVHGFLQRDLFNGIIYYRHFGGEIFEDSFQFVLWDSHEPPNLSVPQVATIHITPVDDQLPKEAPGVSRHLVVKETEVAYITKKQLHFIDSESYDRELVYTITTPPFFSFSHRHLDAGKLFMVDSIPKVVKNPTALELRSFTQHAVNYMKVAYMPPMQDIGPHCRDVQFTFSVSNQHGGTLHGICFNITILPVDNQVPEAFTNPLKVTEGGQSIISTEHILISDADTKLDNIDLSLRELPLHGRVELNGFPLNSGGTFSWGDLHTLKVRYQHDGTEVLQDDLLLEVTDGTNSAEFVLHVEVFPVNDEPPVLKADLMPVMNCSEGGEVVITSEYIFATDVDSDNLKLMFVIAREPQHGVVRRAGVTVDQFSQRDVISEAVTYKHTGGEIGLMPCFDTITLVVSDGEAGPFVNGCCYNGPNPSVPLHASFPVYDLNITVYPVDNQPPSIAIGPVFVVDEGCSTALTVNHLSATDPDTAADDLEFVLVSPPQFGYLENILPSVGFEKSNIGISIDSFQWKDMNAFHINYVQSRHLRIEPTADQFTVYVTDGKHHSLEIPFSIIINPTNDEAPDFVVQNITVCEGQMKELDSSIISAVDLDIPQDALLFSITQKPRHGLLIDRGFSKDFSENKQPANPHQKHAPVHSFSMELLKTGMRLTYMHDDSESLADDFTIQLSDGKHKILKTISVEVIPVNDEKPMLSKKAEIAMNMGETRIISSAILSAIDEDSPREKIYYVFERLPQNGQLQLKIGRDWVPLSPGMKCTQEEVDLNLLRYTHTGAMDSQNQDSFTFYLWDGNNRSPALDCQITIKDMEKGDIVILTKPLVVSKGDRGFLTTTTLLAVDGTDKPEELLYVITSPPRYGQIEYVHYPGVPITNFSQMDVVGQTVCYVHKSKVTVSSDRFRFIISNGLRTEHGVFEITLETVDRALPVVTRNKGLRLAQGAVGLLSPDLLQLTDPDTPAENLTFLLVQLPQHGQLYLWGTGLLQHNFTQQDVDSKNVAYRHSGGDSQTDCFTFMATDGTNQGFIVNGRVWEEPVLFTIQVDQLDKTAPRITLLHSPSQVGLLKNGCYGIYITSRVLKASDPDTEDDQIIFKILQGPKHGHLENTTTGEFIHEKFSQKDLNSKTILYIINPSLEVNSDTVEFQIMDPTGNSATPQILELKWSHIEWSQTEYEVCENVGLLPLEIIRRGYSMDSAFVGIKVNQVSAAVGKDFTVIPSKLIQFDPGMSTKMWNIAITYDGLEEDDEVFEVILNSPVNAVLGTKTKAAVKILDSKGGQCHPSYSSNQSKHSTWEKGIWHLLPPGSSSSTTSGSFHLERRPLPSSMQLAVIRGDTLRGFDSTDLSQRKLRTRGNGKTVRPSSVYRNGTDIIYNYHGIVSLKLEDDSFPTHKRKAKVSIISQPQKTIKVAELPQADKVESTTDSHFPRQDQLPSFPKNCTLELKGLFHFEEGIQKLYQCNGIAWKAWSPQTKDVEDKSCPAGWHQHSGYCHILITEQKGTWNAAAQACREQYLGNLVTVFSRQHMRWLWDIGGRKSFWIGLNDQVHAGHWEWIGGEPVAFTNGRRGPSQRSKLGKSCVLVQRQGKWQTKDCRRAKPHNYVCSRKL

SEQ ID NO: 10699 - protein, 508 aa, Homo sapiens
MSSDDRHLGSSCGSFIKTEPSSPSSGIDALSHHSPSGSSDASGGFGLALGTHANGLDSPPMFAGAGLGGTPCRKSYEDCASGIMEDSAIKCEYMLNAIPKRLCLVCGDIASGYHYGVASCEACKAFFKRTIQGNIEYSCPATNECEITKRRRKSCQACRFMKCLKVGMLKEGVRLDRVRGGRQKYKRRLDSESSPYLSLQISPPAKKPLTKIVSYLLVAEPDKLYAMPPPGMPEGDIKALTTLCDLADRELVVIIGWAKHIPGFSSLSLGDQMSLLQSAWMEILILGIVYRSLPYDDKLVYAEDYIMDEEHSRLAGLLELYRAILQLVRRYKKLKVEKEEFVTLKALALANSDSMYIEDLEAVQKLQDLLHEALQDYELSQRHEEPWRTGKLLLTLPLLRQTAAKAVQHFYSVKLQGKVPMHKLFLEMLEAKVGQEQLRGSPKDERMSSHDGKCPFQSAAFTSRDQSNSPGIPNPRPSSPTPLNERGRQISPSTRTPGGQGKHLWLTM

SEQ ID NO: 10700 - protein, 715 aa, Homo sapiens
MVTQESMLKAALPLFTRFIISNGLRTEHGVFEITLETVDRALPVVTRNKGLRLAQGAVGLLSPDLLQLTDPDTPAENLTFLLVQLPQHGQLYLWGTGLLQHNFTQQDVDSKNVAYRHSGGDSQTDCFTFMATDGTNQGFIVNGRVWEEPVLFTIQVDQLDKTAPRITLLHSPSQVGLLKNGCYGIYITSRVLKASDPDTEDDQIIFKILQGPKHGHLENTTTGEFIHEKFSQKDLNSKTILYIINPSLEVNSDTVEFQIMDPTGNSATPQILELKWSHIEWSQTEYEVCENVGLLPLEIIRRGYSMDSAFVGIKVNQVSAAVGKDFTVIPSKLIQFDPGMSTKMWNIAITYDGLEEDDEVFEVILNSPVNAVLGTKTKAAVKILDSKGGQCHPSYSSNQSKHSTWEKGIWHLLPPGSSSSTTSGSFHLERRPLPSSMQLAVIRGDTLRGFDSTDLSQRKLRTRGNGKTVRPSSVYRNGTDIIYNYHGIVSLKLEDDSFPTHKRKAKVSIISQPQKTIKVAELPQADKVESTTDSHFPRQDQLPSFPKNCTLELKGLFHFEEGIQKLYQCNGIAWKAWSPQTKDVEDKSCPAGWHQHSGYCHILITEQKGTWNAAAQACREQYLGNLVTVFSRQHMRWLWDIGGRKSFWIGLNDQVHAGHWEWIGGEPVAFTNGRRGPSQRSKLGKSCVLVQRQGKWQTKDCRRAKPHNYVCSRKL

SEQ ID NO: 10701 - protein, 669 aa, Homo sapiens
MAVYRAALGASLAAARLLPLGRCSPSPAPRSTLSGAAMEPAPRWLAGLRFDNRALRALPVEAPPPGPEGAPSAPRPVPGACFTRVQPTPLRQPRLVALSEPALALLGLGAPPAREAEAEAALFFSGNALLPGAEPAAHCYCGHQFGQFAGQLGDGAAMYLGEVCTATGERWELQLKGAGPTPFSRQADGRKVLRSSIREFLCSEAMFHLGVPTTRAGACVTSESTVVRDVFYDGNPKYEQCTVVLRVASTFIRFGSFEIFKSADEHTGRAGPSVGRNDIRVQLLDYVISSFYPEIQAAHASDSVQRNAAFFREVTRRTARMVAEWQCVGFCHGVLNTDNMSILGLTIDYGPFGFLDRYDPDHVCNASDNTGRYAYSKQPEVCRWNLRKLAEALQPELPLELGEAILAEEFDAEFQRHYLQKMRRKLGLVQVELEEDGALVSKLLETMHLTGADFTNTFYLLSSFPVELESPGLAEFLARLMEQCASLEELRLAFRPQMDPRQLSMMLMLAQSNPQLFALMGTRAGIARELERVEQQSRLEQLSAAELQSRNQGHWADWLQAYRARLDKDLEGAGDAAAWQAEHVRVMHANNPKYVLRNYIAQNAIEAAERGDFSEVRRVLKLLETPYHCEAGAATDAEATEADGADGRQRSYSSKPPLWAAELCVTUSS

SEQ ID NO: 10702 - protein, 1616 aa, Homo sapiens
MEGAEPRARPERLAEAETRAADGGRLVEVQLSGGAPWGFTLKGGREHGEPLVITKIEEGSKAAAVDKLLAGDEIVGINDIGLSGFRQEAICLVKGSHKTLKLVVKRRSELGWRPHSWHATKFSDSHPELAASPFTSTSGCPSWSGRHHASSSSHDLSSSWEQTNLQRTLDHFSSLGSVDSLDHPSSRLSVAKSNSSIDHLGSHSKRDSAYGSFSTSSSTPDHTLSKADTSSAENILYTVGLWEAPRQGGRQAQAAGDPQGSEEKLSCFPPRVPGDSGKGPRPEYNAEPKLAAPGRSNFGPVWYVPDKKKAPSSPPPPPPPLRSDSFAATKSHEKAQGPVFSEAAAAQHFTALAQAQPRGDRRPELTDRPWRSAHPGSLGKGSGGPGCPQEAHADGSWPPSKDGASSRLQASLSSSDVRFPQSPHSGRHPPLYSDHSPLCADSLGQEPGAASFQNDSPPQVRGLSSCDQKLGSGWQGPRPCVQGDLQAAQLWAGCWPSDTALGALESLPPPTVGQSPRHHLPQPEGPPDARETGRCYPLDKGAEGCSAGAQEPPRASRAEKASQRLAASITWADGESSRICPQETPLLHSLTQEGKRRPESSPEDSATRPPPFDAHVGKPTRRSDRFATTLRNEIQMHRAKLQKSRSTVALTAAGEAEDGTGRWRAGLGGGTQEGPLAGTYKDHLKEAQARVLRATSFKRRDLDPNPGDLYPESLEHRMGDPDTVPHFWEAGLAQPPSSTSGGPHPPRIGGRRRFTAEQKLKSYSEPEKMNEVGLTRGYSPHQHPRTSEDTVGTFADRWKFFEETSKPVPQRPAQKQALHGIPRDKPERPRTAGRTCEGTEPWSRTTSLGDSLNAHSAAEKAGTSDLPRRLGTFAEYQASWKEQRKPLEARSSGRCHSADDILDVSLDPQERPQHVHGRSRSSPSTDHYKQEASVELRRQAGDPGEPREELPSAVRAEEGQSTPRQADAQCREGSPGSQQHPPSQKAPNPPTFSELSHCRGAPELPREGRGRAGTLPRDYRYSEESTPADLGPRAQSPGSPLHARGQDSWPVSSALLSKRPAPQRPPPPKREPRRYRATDGAPADAPVGVLGRPFPTPSPASLDVYVARLSLSHSPSVFSSAQPQDTPKATVCERGSQHVSGDASRPLPEALLPPKQQHLRLQTATMETSRSPSPQFAPQKLTDKPPLLIQDEDSTRIERVMDNNTTVKMVPIKIVHSESQPEKESRQSLACPAEPPALPHGLEKDQIKTLSTSEQFYSRFCLYTRQGAEPEAPHRAQPAEPQPLGTQVPPEKDRCTSPPGLSYMKAKEKTVEDLKSEELAREIVGKDKSLADILDPSVKIKTTMDLMEGIFPKDEHLLEEAQQRRKLLPKIPSPRSTEERKEEPSVPAAVSLATNSTYYSTSAPKAELLIKMKDLQEQQEHEEDSGSDLDHDLSVKKQELIESISRKLQVLREARESLLEDVQANTVLGAEVEAIVKGVCKPSEFDKFRMFIGDLDKVVNLLLSLSGRLARVENALNNLDDGASPGDRQSLLEKQRVLIQQHEDAKELKENLDRRERIVFDILANYLSEESLADYEHFVKMKSALIIEQRELEDKIHLGEEQLKCLLDSLQPERGK

SEQ ID NO: 10703 - protein, 265 aa, Homo sapiens
MGLRIHFVVDPHGWCCMGLIVFVWLYNIVLIPKIVLFPHYEEGHIPGILIIIFYGISIFCLVALVRASITDPGRLPENPKIPHGEREFWELCNKCNLMRPKRSHHCSRCGHCVRRMDHHCPWINNCVGEDNHWLFLQLCFYTELLTCYALMFSFCHYYYFLPLKKRNLDLFVFRHELAIMRLAAFMGITMLVGITGLFYTQLIGIITDTTSIEKMSNCCEDISRPRKPWQQTFSEVFGTRWKILWFIPFRQRQPLRVPYHFANHV

SEQ ID NO: 10704 - protein, 508 aa, Homo sapiens
MTSLMPGAGLLPIPTPNPLTTLGVSLSSLGAIPAAALDPNIATLGEIPQPPLMGNVDPSKIDEIRRTVYVGNLNSQTTTADQLLEFFKQVGEVKFVRMAGDETQPTRFAFVEFADQNSVPRALAFNGVMFGDRPLKINHSNNAIVKPPEMTPQAAAKELEEVMKRVREAQSFISAAIEPESGKSNERKGGRSRSHTRSKSRSSSKSHSRRKRSQSKHRSRSHNRSRSRQKDRRRSKSPHKKRSKSRERRKSRSRSHSRDKRKDTREKIKEKERVKEKDREKEREREKEREKEKERGKNKDRDKEREKDREKDKEKDREREREKEHEKDRDKEKEKEQDKEKEREKDRSKEIDEKRKKDKKSRTPPRSYNASRRSRSSSRERRRRRSRSSSRSPRTSKTIKRKSSRSPSPRSRNKKDKKREKERDHISERRERERSTSMRKSSNDRDGKEKLEKNSTSLKEKEHNKEPDSSVSKEVDDKDAPRTEENKIQHNGNCQLNEENLSTKTEAV

SEQ ID NO: 10705 - protein, 446 aa, Homo sapiens
MERIPVSVDFWVVCCAVLKCNPGIPKRMSTLCFGFSDEFHPFIEALLPHVRAIAYTWFNLQARKRKYFKKHEKRMSKDEERAVKDELLSEKPEIKQKWASRLLAKLRKDIRQEYREDFVLTVTGKKHPCCVLSNPDQKGKIRRIDCLRQADKVWRLDLVMVILFKGIPLESTDGERLMKSPHCTNPALCVQPHHITVSVKELDLFLAYYVQEQDSGQSGSPSHNDPAKNPPGYLEDSFVKSGVFNVSELVRVSRTPITQGTGVNFPIGEIPSQPYYHDMNSGVNLQRSLSSPPSSKRPKTISIDENMEPSPTGDFYPSPSSPAAGSRTWHERDQDMSSPTTMKKPEKPLFSSASPQDSSPRLSTFPQHHHPGIPGVAHSVISTRTPPPPSPLPFPTQAILPPAPSSYFSHPTIRYPPHLNPQDTLKNYVPSYDPSSPQTSQSWYLG

SEQ ID NO: 10706 - protein, 1302 aa, Homo sapiens
MTTKRSLFVRLVPCRCLRGEEETVTTLDYSHCSLEQVPKEIFTFEKTLEELYLDANQIEELPKQLFNCQSLHKLSLPDNDLTTLPASIANLINLRELDVSKNGIQEFPENIKNCKVLTIVEASVNPISKLPDGFSQLLNLTQLYLNDAFLEFLPANFGRLTKLQILELRENQLKMLPKTMNRLTQLERLDLGSNEFTEVPEVLEQLSGLKEFWMDANRLTFIPGFIGSLKQLTYLDVSKNNIEMVEEGISTCENLQDLLLSSNSLQQLPETIGSLKNITTLKIDENQLMYLPDSIGGLISVEELDCSFNEVEALPSSIGQLTNLRTFAADHNYLQQLPPEIGSWKNITVLFLHSNKLETLPEEMGDMQKLKVINLSDNRLKNLPFSFTKLQQLTAMWLSDNQSKPLIPLQKETDSETQKMVLTNYMFPQQPRTEDVMFISDNESFNPSLWEEQRKQRAQVAFECDEDKDEREAPPREGNLKRYPTPYPDELKNMVKTVQTIVHRLKDEETNEDSGRDLKPHEDQQDINKDVGVKTSESTTTVKSKVDEREKYMIGNSVQKISEPEAEISPGSLPVTANMKASENLKHIVNHDDVFEESEELSSDEEMKMAEMRPPLIETSINQPKVVALSNNKKDDTKETDSLSDEVTHNSNQNNSNCSSPSRMSDSVSLNTDSSQDTSLCSPVKQTHIDINSKIRQEDENFNSLLQNGDILNSSTEEKFKAHDKKDFNLPEYDLNVEERLVLIEKSVDSTATADDTHKLDHINMNLNKLITNDTFQPEIMERSKTQDIVLGTSFLSINSKEETEHLENGNKYPNLESVNKVNGHSEETSQSPNRTEPHDSDCSVDLGISKSTEDLSPQKSGPVGSVVKSHSITNMEIGGLKIYDILSDNGPQQPSTTVKITSAVDGKNIVRSKSATLLYDQPLQVFTGSSSSSDLISGTKAIFKFDSNHNPEEPNIIRGPTSGPQSAPQIYGPPQYNIQYSSSAAVKDTLWHSKQNPQIDHASFPPQLLPRSESTENQSYAKHSANMNFSNHNNVRANTAYHLHQRLGPARHGEMWAISPNDRLIPAVTRSTIQRQSSVSSTASVNLGDPGSTRRAQIPEGDYLSYREFHSAGRTPPMMPGSQRPLSARTYSIDGPNASRPQSARPSINEIPERTMSVSDFNYSRTSPSKRPNARVGSEHSLLDPPGKSKVPRDWREQVLRHIEAKKLEKIRVRVEKDPELGFSISGGVGGRGNPFRPDDDGIFVTRVQPEGPASKLLQPGDKIIQANGYSFINIEHGQAVSLLKTFQNTVELIIVREVSS

SEQ ID NO: 10707 - protein, 1346 aa, Homo sapiens
MTTKRSLFVRLVPCRCLRGEEETVTTLDYSHCSLEQVPKEIFTFEKTLEELYLDANQIEELPKQLFNCQSLHKLSLPDNDLTTLPASIANLINLRELDVSKNGIQEFPENIKNCKVLTIVEASVNPISKLPDGFSQLLNLTQLYLNDAFLEFLPANFGRLTKLQILELRENQLKMLPKTMNRLTQLERLDLGSNEFTEVPEVLEQLSGLKEFWMDANRLTFIPGFIGSLKQLTYLDVSKNNIEMVEEGISTCENLQDLLLSSNSLQQLPETIGSLKNITTLKIDENQLMYLPDSIGGLISVEELDCSFNEVEALPSSIGQLTNLRTFAADHNYLQQLPPEIGSWKNITVLFLHSNKLETLPEEMGDMQKLKVINLSDNRLKNLPFSFTKLQQLTAMWLSDNQSKPLIPLQKETDSETQKMVLTNYMFPQQPRTEDVMFISDNESFNPSLWEEQRKQRAQVAFECDEDKDEREAPPREGNLKRYPTPYPDELKNMVKTVQTIVHRLKDEETNEDSGRDLKPHEDQQDINKDVGVKTSESTTTVKSKVDEREKYMIGNSVQKISEPEAEISPGSLPVTANMKASENLKHIVNHDDVFEESEELSSDEEMKMAEMRPPLIETSINQPKVVALSNNKKDDTKETDSLSDEVTHNSNQNNSNCSSPSRMSDSVSLNTDSSQDTSLCSPVKQTHIDINSKIRQEDENFNSLLQNGDILNSSTEEKFKAHDKKDFNLPEYDLNVEERLVLIEKSVDSTATADDTHKLDHINMNLNKLITNDTFQPEIMERSKTQDIVLGTSFLSINSKEETEHLENGNKYPNLESVNKVNGHSEETSQSPNRTEPHDSDCSVDLGISKSTEDLSPQKSGPVGSVVKSHSITNMEIGGLKIYDILSDNGPQQPSTTVKITSAVDGKNIVRSKSATLLYDQPLQVFTGSSSSSDLISGTKAIFKFDSNHNPEEPNIIRGPTSGPQSAPQIYGPPQYNIQYSSSAAVKDTLWHSKQNPQIDHASFPPQLLPRSESTENQSYAKHSANMNFSNHNNVRANTAYHLHQRLGPARHGEMWAISPNDRLIPAVTRSTIQRQSSVSSTASVNLGDPGSTRRAQIPEGDYLSYREFHSAGRTPPMMPGSQRPLSARTYSIDGPNASRPQSARPSINEIPERTMSVSDFNYSRTSPSKRPNARVGSEHSLLDPPGKSKVPRDWREQVLRHIEAKKLEKMPLSNGQMGQPLRPQANYSQIHHPPQASVARHPSREQLIDYLMLKVAHQPPYTQPHCSPRQGHELAKQEIRVRVEKDPELGFSISGGVGGRGNPFRPDDDANGYSFINIEHGQAVSLLKTFQNTVELIIVREVSS

SEQ ID NO: 10708 - protein, 1371 aa, Homo sapiens
MTTKRSLFVRLVPCRCLRGEEETVTTLDYSHCSLEQVPKEIFTFEKTLEELYLDANQIEELPKQLFNCQSLHKLSLPDNDLTTLPASIANLINLRELDVSKNGIQEFPENIKNCKVLTIVEASVNPISKLPDGFSQLLNLTQLYLNDAFLEFLPANFGRLTKLQILELRENQLKMLPKTMNRLTQLERLDLGSNEFTEVPEVLEQLSGLKEFWMDANRLTFIPGFIGSLKQLTYLDVSKNNIEMVEEGISTCENLQDLLLSSNSLQQLPETIGSLKNITTLKIDENQLMYLPDSIGGLISVEELDCSFNEVEALPSSIGQLTNLRTFAADHNYLQQLPPEIGSWKNITVLFLHSNKLETLPEEMGDMQKLKVINLSDNRLKNLPFSFTKLQQLTAMWLSDNQSKPLIPLQKETDSETQKMVLTNYMFPQQPRTEDVMFISDNESFNPSLWEEQRKQRAQVAFECDEDKDEREAPPREGNLKRYPTPYPDELKNMVKTVQTIVHRLKDEETNEDSGRDLKPHEDQQDINKDVGVKTSESTTTVKSKVDEREKYMIGNSVQKISEPEAEISPGSLPVTANMKASENLKHIVNHDDVFEESEELSSDEEMKMAEMRPPLIETSINQPKVVALSNNKKDDTKETDSLSDEVTHNSNQNNSNCSSPSRMSDSVSLNTDSSQDTSLCSPVKQTHIDINSKIRQEDENFNSLLQNGDILNSSTEEKFKAHDKKDFNLPEYDLNVEERLVLIEKSVDSTATADDTHKLDHINMNLNKLITNDTFQPEIMERSKTQDIVLGTSFLSINSKEETEHLENGNKYPNLESVNKVNGHSEETSQSPNRTEPHDSDCSVDLGISKSTEDLSPQKSGPVGSVVKSHSITNMEIGGLKIYDILSDNGPQQPSTTVKITSAVDGKNIVRSKSATLLYDQPLQVFTGSSSSSDLISGTKAIFKFDSNHNPEEPNIIRGPTSGPQSAPQIYGPPQYNIQYSSSAAVKDTLWHSKQNPQIDHASFPPQLLPRSESTENQSYAKHSANMNFSNHNNVRANTAYHLHQRLGPARHGEMWAISPNDRLIPAVTRSTIQRQSSVSSTASVNLGDPGSTRRAQIPEGDYLSYREFHSAGRTPPMMPGSQRPLSARTYSIDGPNASRPQSARPSINEIPERTMSVSDFNYSRTSPSKRPNARVGSEHSLLDPPGKSKVPRDWREQVLRHIEAKKLEKMPLSNGQMGQPLRPQANYSQIHHPPQASVARHPSREQLIDYLMLKVAHQPPYTQPHCSPRQGHELAKQEIRVRVEKDPELGFSISGGVGGRGNPFRPDDDGIFVTRVQPEGPASKLLQPGDKIIQANGYSFINIEHGQAVSLLKTFQNTVELIIVREVSS

SEQ ID NO: 10709 - protein, 1710 aa, Homo sapiens
MSLDFGSVALPVQNEDEEYDEEDYEREKELQQLLTDLPHDMLDDDLSSPELQYSDCSEDGTDGQPHHPEQLEMSWNEQMLPKSQSVNGYNEIQSLYAGEKCGNVWEENRSKTEDRHPVYHPEEGGDEGGSGYSPPSKCEQTDLYHLPENFRPYTNGQKQEFNNQATNVIKFSDPQWNHFQGPSCQGLEPYNKVTYKPYQSSAQNNGSPAQEITGSDTFEGLQQQFLGANENSAENMQIIQLQVLNKAKERQLENLIEKLNESERQIRYLNHQLVIIKDEKDGLTLSLRESQKLFQNGKEREIQLEAQIKALETQIQALKVNEEQMIKKSRTTEMALESLKQQLVDLHHSESLQRAREQHESIVMGLTKKYEEQVLSLQKNLDATVTALKEQEDICSRLKDHVKQLERNQEAIKLEKTEIINKLTRSLEESQKQCAHLLQSGSVQEVAQLQFQLQQAQKAHAMSANMNKALQEELTELKDEISLYESAAKLGIHPSDSEGELNIELTESYVDLGIKKVNWKKSKVTSIVQEEDPNEELSKDEFILKLKAEVQRLLGSNSMKRHLVSQLQNDLKDCHKKIEDLHQVKKDEKSIEVETKTDTSEKPKNQLWPESSTSDVVRDDILLLKNEIQVLQQQNQELKETEGKLRNTNQDLCNQMRQMVQDFDHDKQEAVDRCERTYQQHHEAMKTQIRESLLAKHALEKQQLFEAYERTHLQLRSELDKLNKEVTAVQECYLEVCREKDNLELTLRKTTEKEQQTQEKIKEKLIQQLEKEWQSKLDQTIKAMKKKTLDCGSQTDQVTTSDVISKKEMAIMIEEQKCTIQQNLEQEKDIAIKGAMKKLEIELELKHCENITKQVEIAVQNAHQRWLGELPELAEYQALVKAEQKKWEEQHEVSVNKRISFAVSEAKEKWKSELENMRKNILPGKELEEKIHSLQKELELKNEEVPVVIRAELAKARSEWNKEKQEEIHRIQEQNEQDYRQFLDDHRNKINEVLAAAKEDFMKQKTELLLQKETELQTCLDQSRREWTMQEAKRIQLEIYQYEEDILTVLGVLLSDTQKEHISDSEDKQLLEIMSTCSSKWMSVQYFEKLKGCIQKAFQDTLPLLVENADPEWKKRNMAELSKDSASQGTGQGDPGPAAGHHAQPLALQATEAEADKKKVLEIKDLCCGHCFQELEKAKQECQDLKGKLEKCCRHLQHLERKHKAVVEKIGEENNKVVEELIEENNDMKNKLEELQTLCKTPPRSLSAGAIENACLPCSGGALEELRGQYIKAVKKIKCDMLRYIQESKERAAEMVKAEVLRERQETARKMRKYYLICLQQILQDDGKEGAEKKIMNAASKLATMAKLLETPISSKSQSKTTQSALPLTSEMLIAVKKSKRNDVNQKIPCCIESKSNSVNTITRTLCEQAPKRRAACNLQRLLENSEHQSIKHVGSKETHLEFQFGDGSCKHLNSLPRNVSPEFVPCEGEGGFGLHKKKDLLSDNGSESLPHSAAYPFLGTLGNKPSPRCTPGPSESGCMHITFRDSNERLGLKVYKCNPLMESENAASEKSQGLDVQEPPVKDGGDLSDCLGWPSSSATLSFDSREASFVHGRPQGTLEIPSESVKSKQFSPSGYLSDTEESNMICQTMKCQRYQTPYLSEETTYLEPGKISVNCGHPSRHKADRLKSDFKKLSSTLPSSVCQQPSRKLIVPLSSQQDSGFDSPFVNLD

SEQ ID NO: 10710 - protein, 494 aa, Homo sapiens
MMYSPICLTQDEFHPFIEALLPHVRAIAYTWFNLQARKRKYFKKHEKRMSKDEERAVKDELLSEKPEIKQKWASRLLAKLRKDIRQEYREDFVLTVTGKKHPCCVLSNPDQKGKIRRIDCLRQADKVWRLDLVMVILFKGIPLESTDGERLMKSPHCTNPALCVQPHHITVSVKELDLFLAYYVQEQDSGQSGSPSHNDPAKNPPGYLEDSFVKSGVFNVSELVRVSRTPITQGTGVNFPIGEIPSQPYYHDMNSGVNLQRSLSSPPSSKRPKTISIDENMEPSPTGDFYPSPSSPAAGSRTWHERDQDMSSPTTMKKPEKPLFSSASPQDSSPRLSTFPQHHHPGIPGVAHSVISTRTPPPPSPLPFPTQAILPPAPSSYFSHPTIRYPPHLNPQDTLKNYVPSYDPSSPQTSQPNGSGQVVGKVPGHFTPVLAPSPHPSAVRPVTLSMTDTKPITTSTEAYTASGTSQANRYVGLSPRDPSFLHQQQSWYLG

SEQ ID NO: 10711 - protein, 451 aa, Homo sapiens
MNLEGGGRGGEFGMSAVSCGNGKLRQWLIDQIDSGKYPGLVWENEEKSIFRIPWKHAGKQDYNREEDAALFKAWALFKGKFREGIDKPDPPTWKTRLRCALNKSNDFEELVERSQLDISDPYKVYRIVPEGAKKGAKQLTLEDPQMSMSHPYTMTTPYPSLPAQQVHNYMMPPLDRSWRDYVPDQPHPEIPYQCPMTFGPRGHHWQGPACENGCQVTGTFYACAPPESQAPGVPTEPSIRSAEALAFSDCRLHICLYYREILVKELTTSSPEGCRISHGHTYDASNLDQVLFPYPEDNGQRKNIEKLLSHLERGVVLWMAPDGLYAKRLCQSRIYWDGPLALCNDRPNKLERDQTCKLFDTQQFLSELQAFAHHGRSLPRFQVTLCFGEEFPDPQRQRKLITAHVEPLLARQLYYFAQQNSGHFLRGYDLPEHISNPEDYHRSIRHSSIQE

SEQ ID NO: 10712 - protein, 420 aa, Homo sapiens
MMYSPICLTQDEFHPFIEALLPHVRAIAYTWFNLQARKRKYFKKHEKRMSKDEERAVKDELLSEKPEIKQKWASRLLAKLRKDIRQEYREDFVLTVTGKKHPCCVLSNPDQKGKIRRIDCLRQADKVWRLDLVMVILFKGIPLESTDGERLMKSPHCTNPALCVQPHHITVSVKELDLFLAYYVQEQDSGQSGSPSHNDPAKNPPGYLEDSFVKSGVFNVSELVRVSRTPITQGTGVNFPIGEIPSQPYYHDMNSGVNLQRSLSSPPSSKRPKTISIDENMEPSPTGDFYPSPSSPAAGSRTWHERDQDMSSPTTMKKPEKPLFSSASPQDSSPRLSTFPQHHHPGIPGVAHSVISTRTPPPPSPLPFPTQAILPPAPSSYFSHPTIRYPPHLNPQDTLKNYVPSYDPSSPQTSQSWYLG

SEQ ID NO: 10713 - protein, 1429 aa, Homo sapiens
MIKCLSVEVQAKLRSGLAISSLGQCVEELALNSIDAEAKCVAVRVNMETFQVQVIDNGFGMGSDDVEKVGNRYFTSKCHSVQDLENPRFYGFRGEALANIADMASAVEISSKKNRTMKTFVKLFQSGKALKACEADVTRASAGTTVTVYNLFYQLPVRRKCMDPRLEFEKVRQRIEALSLMHPSISFSLRNDVSGSMVLQLPKTKDVCSRFCQIYGLGKSQKLREISFKYKEFELSGYISSEAHYNKNMQFLFVNKRLVLRTKLHKLIDFLLRKESIICKPKNGPTSRQMNSSLRHRSTPELYGIYVINVQCQFCEYDVCMEPAKTLIEFQNWDTLLFCIQEGVKMFLKQEKLFVELSGEDIKEFSEDNGFSLFDATLQKRVTSDERSNFQEACNNILDSYEMFNLQSKAVKRKTTAENVNTQSSRDSEATRKNTNDAFLYIYESGGPGHSKMTEPSLQNKDSSCSESKMLEQETIVASEAGENEKHKKSFLEHSSLENPCGTSLEMFLSPFQTPCHFEESGQDLEIWKESTTVNGMAANILKNNRIQNQPKRFKDATEVGCQPLPFATTLWGVHSAQTEKEKKKESSNCGRRNVFSYGRVKLCSTGFITHVVQNEKTKSTETEHSFKNYVRPGPTRAQETFGNRTRHSVETPDIKDLASTLSKESGQLPNKKNCRTNISYGLENEPTATYTMFSAFQEGSKKSQTDCILSDTSPSFPWYRHVSNDSRKTDKLIGFSKPIVRKKLSLSSQLGSLEKFKRQYGKVENPLDTEVEESNGVTTNLSLQVEPDILLKDKNRLENSDVCKITTMEHSDSDSSCQPASHILNSEKFPFSKDEDCLEQQMPSLRESPMTLKELSLFNRKPLDLEKSSESLASKLSRLKGSERETQTMGMMSRFNELPNSDSSRKDSKLCSVLTQDFCMLFNNKHEKTENGVIPTSDSATQDNSFNKNSKTHSNSNTTENCVISETPLVLPYNNSKVTGKDSDVLIRASEQQIGSLDSPSGMLMNPVEDATGDQNGICFQSEESKARACSETEESNTCCSDWQRHFDVALGRMVYVNKMTGLSTFIAPTEDIQAACTKDLTTVAVDVVLENGSQYRCQPFRSDLVLPFLPRARAERTVMRQDNRDTVDDTVSSESLQSLFSEWDNPVFARYPEVAVDVSSGQAESLAVKIHNILYPYRFTKGMIHSMQVLQQVDNKFIACLMSTKTEENGEADSYEKQQAQGSGRKKLLSSTLIPPLEITVTEEQRRLLWCYHKNLEDLGLEFVFPDTSDSLVLVGKVPLCFVEREANELRRGRSTVTKSIVEEFIREQLELLQTTGGIQGTLPLTVQKVLASQACHGAIKFNDGLSLQESCRLIEALSSCQLPFQCAHGRPSMLPLADIDHLEQEKQIKPNLTKLRKMAQAWRLFGKAECDTRQSLQQSMPPCEPP

SEQ ID NO: 10714 - protein, 338 aa, Homo sapiens
MNASEFRRRGKEMVDYMANYMEGIEGRQVYPDVEPGYLRPLIPAAAPQEPDTFEDIINDVEKIIMPGVTHWHSPYFFAYFPTASSYPAMLADMLCGAIGCIGFSWAASPACTELETVMMDWLGKMLELPKAFLNEKAGEGGGVIQGSASEATLVALLAARTKVIHRLQAASPELTQAAIMEKLVAYSSDQAHSSVERAGLIGGVKLKAIPSDGNFAMRASALQEALERDKAAGLIPFFMVATLGTTTCCSFDNLLEVGPICNKEDIWLHVDAAYAGSAFICPEFRHLLNGVEFADSFNFNPHKWLLVNFDCSAMWSRQPVRMLRLKKTCLVSAVVRRS

SEQ ID NO: 10715 - protein, 739 aa, Homo sapiens
MPALARDGGQLPLLVVFSAMIFGTITNQDLPVIKCVLINHKNNDSSVGKSSSYPMVSESPEDLGCALRPQSSGTVYEAAAVEVDVSASITLQVLVDAPGNISCLWVFKHSSLNCQPHFDLQNRGVVSMVILKMTETQAGEYLLFIQSEATNYTILFTVSIRNTLLYTLRRPYFRKMENQDALVCISESVPEPIVEWVLCDSQGESCKEESPAVVKKEEKVLHELFGTDIRCCARNELGRECTRLFTIDLNQTPQTTLPQLFLKVGEPLWIRCKAVHVNHGFGLTWELENKALEEGNYFEMSTYSTNRTMIRILFAFVSSVARNDTGYYTCSSSKHPSQSALVTIVEKGFINATNSSEDYEIDQYEEFCFSVRFKAYPQIRCTWTFSRKSFPCEQKGLDNGYSISKFCNHKHQPGEYIFHAENDDAQFTKMFTLNIRRKPQVLAEASASQASCFSDGYPLPSWTWKKCSDKSPNCTEEITEGVWNRKANRKVFGQWVSSSTLNMSEAIKGFLVKCCAYNSLGTSCETILLNSPGPFPFIQDNISFYATIGVCLLFIVVLTLLICHKYKKQFRYESQLQMVQVTGSSDNEYFYVDFREYEYDLKWEFPRENLEFGKVLGSGAFGKVMNATAYGISKTGVSIQVAVKMLKEKADSSEREALMSELKMMTQLGSHENIVNLLGACTLSGPIYLIFEYCCYGDLLNYLRSKREKFHRTWTEIFKEHNFSFYPTFQSHPNSSKKK

SEQ ID NO: 10716 - protein, 1038 aa, Homo sapiens
MWRCGGRQGLCVLRRLSGGHAHHRAWRWNSNRACERALQYKLGDKIHGFTVNQVTSVPELFLTAVKLTHDDTGARYLHLAREDTNNLFSVQFRTTPMDSTGVPHILEHTVLCGSQKYPCRDPFFKMLNRSLSTFMNAFTASDYTLYPFSTQNPKDFQNLLSVYLDATFFPCLRELDFWQEGWRLEHENPSDPQTPLVFKGVVFNEMKGAFTDNERIFSQHLQNRLLPDHTYSVVSGGDPLCIPELTWEQLKQFHATHYHPSNARFFTYGNFPLEQHLKQIHEEALSKFQKIEPSTVVPAQTPWDKPREFQITCGPDSFATDPSKQTTISVSFLLPDITDTFEAFTLSLLSSLLTSGPNSPFYKALIESGLGTDFSPDVGYNGYTREAYFSVGLQGIAEKDIETVRSLIDRTIDEVVEKGFEDDRIEALLHKIEIQMKHQSTSFGLMLTSYIASCWNHDGDPVELLKLGNQLAKFRQCLQENPKFLQEKVKQYFKNNQHKLTLSMRPDDKYHEKQAQVEATKLKQKVEALSPGDRQQIYEKGLELRSQQSKPQDASCLPALKVSDIEPTIPVTELDVVLTAGDIPVQYCAQPTNGMVYFRAFSSLNTLPEELRPYVPLFCSVLTKLGCGLLDYREQAQQIELKTGGMSASPHVLPDDSHMDTYEQVGVLFSSLCLDRNLPDMMQLWSEIFNNPCFEEEEHFKVLVKMTAQELANGIPDSGHLYASIRAGRTLTPAGDLQETFSGMDQVRLMKRIAEMTDIKPILRKLPRIKKHLLNGDNMRCSVNATPQQMPQTEKAVEDFLRSIGRSKKERRPVRPHTVEKPVPSSSGGDAHVPHGSQVIRKLVMEPTFKPWQMKTHFLMPFPVNYVGECIRTVPYTDPDHASLKILARLMTAKFLHTEIREKGGAYGGGAKLSHNGIFTLYSYRDPNTIETLQSFGKAVDWAKSGKFTQQDIDEAKLSVFSTVDAPVAPSDKGMDHFLYGLSDEMKQAHREQLFAVSHDKLLAVSDRYLGTGKSTHGLAILGPENPKIAKDPSWIIQ

SEQ ID NO: 10717 - protein, 1099 aa, Homo sapiens
MSLNNSSNVFLDSVPSNTNRFQVSVINENHESSAAADDNTDPPHYEETSFGDEAQKRLRISFRPGNQECYDNFLQSGETAKTDASFHAYDSHTNTYYLQTFGHNTMDAVPKIEYYRNTGSISGPKVNRPSLLEIHEQLAKNVAVTPSSADRVANGDGIPGDEQAENKEDDQAGVVKFGWVKGVLVRCMLNIWGVMLFIRLSWIVGEAGIGLGVLIILLSTMVTSITGLSTSAIATNGFVRGGGAYYLISRSLGPEFGGSIGLIFAFANAVAVAMYVVGFAETVVDLLKESDSMMVDPTNDIRIIGSITVVILLGISVAGMEWEAKAQVILLVILLIAIANFFIGTVIPSNNEKKSRGFFNYQASIFAENFGPRFTKGEGFFSVFAIFFPAATGILAGANISGDLEDPQDAIPRGTMLAIFITTVAYLGVAICVGACVVRDATGNMNDTIISGMNCNGSAACGLGYDFSRCRHEPCQYGLMNNFQVMSMVSGFGPLITAGIFSATLSSALASLVSAPKVFQALCKDNIYKALQFFAKGYGKNNEPLRGYILTFLIAMAFILIAELNTIAPIISNFFLASYALINFSCFHASYAKSPGWRPAYGIYNMWVSLFGAVLCCAVMFVINWWAAVITYVIEFFLYVYVTCKKPDVNWGSSTQALSYVSALDNALELTTVEDHVKNFRPQCIVLTGGPMTRPALLDITHAFTKNSGLCICCEVFVGPRKLCVKEMNSGMAKKQAWLIKNKIKAFYAAVAADCFRDGVRSLLQASGLGRMKPNTLVIGYKKNWRKAPLTEIENYVGIIHDAFDFEIGVVIVRISQGFDISQVLQVQEELERLEQERLALEATIKDNECEEESGGIRGLFKKAGKLNITKTTPKKDGSINTSQSMHVGEFNQKLVEASTQFKKKQEKGTIDVWWLFDDGGLTLLIPYILTLRKKWKDCKLRIYVGGKINRIEEEKIVMASLLSKFRIKFADIHIIGDINIRPNKESWKVFEEMIEPYRLHESCKDLTTAEKLKRETPWKITDAELEAVKEKSYRQVRLNELLQEHSRAANLIVLSLPVARKGSISDLLYMAWLEILTKNLPPVLLVRGNHKNVLTFYS

SEQ ID NO: 10718 - protein, 332 aa, Homo sapiens
MEPVGRKRSRKAAKAQLEAQVTAAQGATKEGSGIASNFPGQPTMEPVGRKRSRKAAKAQLEAQVRAAPAKKHTGKDPVRDECEERNPFTETREEDVTDEHGEREPFAEKDEHTGIHTMKLEHIAADIKKGLAAKREMIKIDKAAYRKTKNTIERALKKKQLKRQKRDYRHTRKLLNVLKEYIAEKQKDDEAEEAEAAAAAAEAAAAAEAAAAAAEVIVVEDEEEEEKEEEEEKEEEEEEGEEEGGGEEGEEGGGGGEGEETEEEEEEEEEEEEEEQIKAFQEKQKRWQQPTGVRSWRLREMKPLLEQLLKAAKDTKDNYCIISSSEESELDN

SEQ ID NO: 10719 - protein, 620 aa, Homo sapiens
MSALTPPTDMPTPTTDKITQAAMETIYLCKFRVSMDGEWLCLRELDDISLTPDPEPTHEDPNYLMANERMNLMNMAKLSIKGLIESALNLGRTLDSDYAPLQQFFVVMEHCLKHGLKAKKTFLGQNKSFWGPLELVEKLVPEAAEITASVKDLPGLKTPVGRGRAWLRLALMQKKLSEYMKALINKKELLSEFYEPNALMMEEEGAIIAGLLVGLNVIDANFCMKGEDLDSQVGVIDFSMYLKDGNSSKGTEGDGQITAILDQKNYVEELNRHLNATVNNLQAKVDALEKSNTKLTEELAVANNRIITLQEEMERVKEESSYILESNRKGPKQDRTAEGQALSEARKHLKEETQLRLDVEKELEMQISMRQEMELAMKMLEKDVCEKQDALVSLRQQLDDLRALKHELAFKLQSSDLGVKQKSELNSRLEEKTNQMAATIKQLEQRLRQAERSRQSAELDNRLFKQDFGDKINSLQLEVEELTRQRNQLELELKQEKERRLQNDRSIPGRGSQKSESKMDGKHKMQEENVKLKKPLEESHRLQPHPMDEQDQLLLSEKPQLCQLCQEDGSLTKNVCKNCSGTFCDACSTNELPLPSSIKLERVCNPCHKHLMKQYSTSPS

SEQ ID NO: 10720 - protein, 304 aa, Homo sapiens
MSSIKHLVYAVIRFLREQSQMDTYTSDEQESLEVAIQCLETVFKISPEDTHLAVSQPLTEMFTSSFCKNDVLPLSNSVPEDVGKADQLKDEGNNHMKEENYAAAVDCYTQAIELDPNNAVYYCNRAAAQSKLGHYTDAIKDCEKAIAIDSKYSKAYGRMGLALTALNKFEEAVTSYQKALDLDPENDSYKSNLKIAEQKLREVSSPTGTGLSFDMASLINNPAFISMAASLMQNPQVQQLMSGMMTNAIGGPAAGVGGLTDLSSLIQAGQQFAQQIQQQNPELIEQLRNHIRSRSFSSSAEEHS

SEQ ID NO: 10721 - protein, 2037 aa, Homo sapiens
MLEAIDKNRALHAAERLQTKLRERGDVANEDKLSLLKSVLQSPLFSQILSLQTSVQQLKDQVNIATSATSNIEYAHVPHLSPAVIPTLQNESFLLSPNNGNLEALTGPGIPHINGKPACDEFDQLIKNMAQGRHVEVFELLKPPSGGLGFSVVGLRSENRGELGIFVQEIQEGSVAHRDGRLKETDQILAINGQALDQTITHQQAISILQKAKDTVQLVIARGSLPQLVSPIVSRSPSAASTISAHSNPVHWQHMETIELVNDGSGLGFGIIGGKATGVIVKTILPGGVADQHGRLCSGDHILKIGDTDLAGMSSEQVAQVLRQCGNRVKLMIARGAIEERTAPTALGITLSSSPTSTPELRVDASTQKGEESETFDVELTKNVQGLGITIAGYIGDKKLEPSGIFVKSITKSSAVEHDGRIQIGDQIIAVDGTNLQGFTNQQAVEVLRHTGQTVLLTLMRRGMKQEAELMSREDVTKDADLSPVNASIIKENYEKDEDFLSSTRNTNILPTEEEGYPLLSAEIEEIEDAQKQEAALLTKWQRIMGINYEIVVAHVSKFSENSGLGISLEATVGHHFIRSVLPEGPVGHSGKLFSGDELLEVNGITLLGENHQDVVNILKELPIEVTMVCCRRTVPPTTQSELDSLDLCDIELTEKPHVDLGEFIGSSETEDPVLAMTDAGQSTEEVQAPLAMWEAGIQHIELEKGSKGLGFSILDYQDPIDPASTVIIIRSLVPGGIAEKDGRLLPGDRLMFVNDVNLENSSLEEAVEALKGAPSGTVRIGVAKPLPLSPEEGYVSAKEDSFLYPPHSCEEAGLADKPLFRADLALVGTNDADLVDESTFESPYSPENDSIYSTQASILSLHGSSCGDGLNYGSSLPSSPPKDVIENSCDPVLDLHMSLEELYTQNLLQRQDENTPSVDISMGPASGFTINDYTPANAIEQQYECENTIVWTESHLPSEVISSAELPSVLPDSAGKGSEYLLEQSSLACNAECVMLQNVSKESFERTINIAKGNSSLGMTVSANKDGLGMIVRSIIHGGAISRDGRIAIGDCILSINEESTISVTNAQARAMLRRHSLIGPDIKITYVPAEHLEEFKISLGQQSGRVMALDIFSSYTGRDIPELPEREEGEGEESELQNTAYSNWNQPRRVELWREPSKSLGISIVGGRGMGSRLSNGEVMRGIFIKHVLEDSPAGKNGTLKPGDRIVEVDGMDLRDASHEQAVEAIRKAGNPVVFMVQSIINRPRAPSQSESEPEKAPLCSVPPPPPSAFAEMGSDHTQSSASKISQDVDKEDEFGYSWKNIRERYGTLTGELHMIELEKGHSGLGLSLAGNKDRSRMSVFIVGIDPNGAAGKDGRLQIADELLEINGQILYGRSHQNASSIIKCAPSKVKIIFIRNKDAVNQMAVCPGNAVEPLPSNSENLQNKETEPTVTTSDAAVDLSSFKNVQHLELPKDQGGLGIAISEEDTLSGVIIKSLTEHGVAATDGRLKVGDQILAVDDEIVVGYPIEKFISLLKTAKMTVKLTIHAENPDSQAVPSAAGAASGEKKNSSQSLMVPQSGSPEPESIRNTSRSSTPAIFASDPATCPIIPGCETTIEISKGRTGLGLSIVGGSDTLLGAIIIHEVYEEGAACKDGRLWAGDQILEVNGIDLRKATHDEAINVLRQTPQRVRLTLYRDEAPYKEEEVCDTLTIELQKKPGKGLGLSIVGKRNDTGVFVSDIVKGGIADADGRLMQGDQILMVNGEDVRNATQEAVAALLKCSLGTVTLEVGRIKAGPFHSERRPSQSSQVSEGSLSSFTFPLSGSSTSESLESSSKKNALASEIQGLRTVEMKKGPTDSLGISIAGGVGSPLGDVPIFIAMMHPTGVAAQTQKLRVGDRIVTICGTSTEGMTHTQAVNLLKNASGSIEMQVVAGGDVSVVTGHQQEPASSSLSFTGLTSSSIFQDDLGPPQCKSITLERGPDGLGFSIVGGYGSPHGDLPIYVKTVFAKGAASEDGRLKRGDQIIAVNGQSLEGVTHEEAVAILKRTKGTVTLMVLS

SEQ ID NO: 10722 - protein, 283 aa, Homo sapiens
MNGEEQYYAATQLYKDPCAFQRGPAPEFSASPPACLYMGRQPPPPPPHPFPGALGALEQGSPPDISPYEVPPLADDPAVAHLHHHLPAQLALPHPPAGPFPEGAEPGVLEEPNRVQLPFPWMKSTKAHAWKGQWAGGAYAAEPEENKRTRTAYTRAQLLELEKEFLFNKYISRPRRVELAVMLNLTERHIKIWFQNRRMKWKKEEDKKRGGGTAVGGGGVAEPEQDCAVTSGEELLALPPPPPPGGAVPPAAPVAAREGRLPPGLSASPQPSSVAPRRPQEPR

SEQ ID NO: 10723 - protein, 952 aa, Homo sapiens
MSCVHYKFSSKLNYDTVTFDGLHISLCDLKKQIMGREKLKAADCDLQITNAQTKEEYTDDNALIPKNSSVIVRRIPIGGVKSTSKTYVISRTEPAMATTKAIDDSSASISLAQLTKTANLAEANASEEDKIKAMMSQSGHEYDPINYMKKPLGPPPPSYTCFRCGKPGHYIKNCPTNGDKNFESGPRIKKSTGIPRSFMMEVKDPNMKGAMLTNTGKYAIPTIDAEAYAIGKKEKPPFLPEEPSSSSEEDDPIPDELLCLICKDIMTDAVVIPCCGNSYCDECIRTALLESDEHTCPTCHQNDVSPDALIANKFLRQAVNNFKNETGYTKRLRKQLPPPPPPIPPPRPLIQRNLQPLMRSPISRQQDPLMIPVTSSSTHPAPSISSLTSNQSSLAPPVSGNPSSAPAPVPDITATVSISVHSEKSDGPFRTSSTGGSPVRKSEEKTDTKRTVIKTMEEYNNDNTAPAEDVIIMIQVPQSKWDKDDFESEEEDVKSTQPISSVGKPASVIKNVSTKPSNIVKYPEKESEPSEKIQKFTKDVSHEIIQHEVKSSKNSASSEKGKTKDRDYSVLEKENPEKRKNSTQPEKESNLDRLNEQGNFKSLSQSSKEARTSDKHDSTRASSNKDFTPNRDKKTDYDTREYSSSKRRDEKNELTRRKDSPSRNKDSASGQKNKPREERDLPKKGTGDSKKSNSSPSRDRKPHDHKATYDTKRPNEETKSVDKNPCKDREKHVLEARNNKESSGNKLLYILNPPETQVEKEQITGQIDKSTVKPKPQLSHSSRLSSDLTRETDEAAFEPDYNESDSESNVSVKEEESSGNISKDLKDKIVEKAKESLDTAAVVQVGISRNQSHSSPSVSPSRSHSPSGSQTRSHSSSASSAESQDSKKKKKKKEKKKHKKHKKHKKHKKHAGTEVELEKSQKHKHKKKKSKKNKDKEKEKEKDDQKVKSVTV

SEQ ID NO: 10724 - protein, 674 aa, Homo sapiens
MNWNEKPKSATLPPLYPKSQPPFLHQSLINQITTTSQSSFSYPGSNQEACMYPGNSNPISQPLLNIQNYPQQISVSDMHNGTVVASHTSVERITYANVNGPKQLTHNLQMSSGVTQNVWLNSPMRNPVHSHIGATVSHQTDFGANVPNMPALQSQLITSDTYSMQMQMIPSNSTRLPVAYQGNQGLNQSFSEQQVDWTQQCISKGLTYPDYRPPPKLYRYSPQSFLPDSTIQKQNFIPHTSLQVKNSQLLNSVLTLPSRQTSAVPSQQYATQTDKRPPPPPYNCRYGSQPLQSTQHITKHLSMEVPQSREMLSSEIRTSFQQQWQNPNENVSTIGNFTNLKVNTNSKQPFNSPIRSSVDGVQTLAQTNEEKIMDSCNPTSNQVLDTSVAKEKLVRDIKTLVEIKQKFSELARKIKINKDLLMAAGCIKMTNTSYSEPAQNSKLSLKQTAKIQSGPQITPVMPENAERQTPTVVESAETNKTQCMLNSDIQEVNCRRFNQVDSVLPNPVYSEKRPMPDSSHDVKVLTSKTSAVEMTQAVLNTQLSSENVTKVEQNSPAVCETISVPKSMSTEEYKSKIQNENMLLLALLSQARKTQKTVLKDANQTIQDSKPDSCEMNPNTQMTGNQLNLKNMETPSTSNVSGRVLDNSFCSGQESSTKGMPAKSDSSCSMEVLA

SEQ ID NO: 10725 - protein, 1117 aa, Homo sapiens
MEILWKTLTWILSLIMASSEFHSDHRLSYSSQEEFLTYLEHYQLTIPIRVDQNGAFLSFTVKNDKHSRRRRSMDPIDPQQAVSKLFFKLSAYGKHFHLNLTLNTDFVSKHFTVEYWGKDGPQWKHDFLDNCHYTGYLQDQRSTTKVALSNCVGLHGVIATEDEEYFIEPLKNTTEDSKHFSYENGHPHVIYKKSALQQRHLYDHSHCGVSDFTRSGKPWWLNDTSTVSYSLPINNTHIHHRQKRSVSIERFVETLVVADKMMVGYHGRKDIEHYILSVMNIVAKLYRDSSLGNVVNIIVARLIVLTEDQPNLEINHHADKSLDSFCKWQKSILSHQSDGNTIPENGIAHHDNAVLITRYDICTYKNKPCGTLGLASVAGMCEPERSCSINEDIGLGSAFTIAHEIGHNFGMNHDGIGNSCGTKGHEAAKLMAAHITANTNPFSWSACSRDYITSFLDSGRGTCLDNEPPKRDFLYPAVAPGQVYDADEQCRFQYGATSRQCKYGEVCRELWCLSKSNRCVTNSIPAAEGTLCQTGNIEKGWCYQGDCVPFGTWPQSIDGGWGPWSLWGECSRTCGGGVSSSLRHCDSPAPSGGGKYCLGERKRYRSCNTDPCPLGSRDFREKQCADFDNMPFRGKYYNWKPYTGGGVKPCALNCLAEGYNFYTERAPAVIDGTQCNADSLDICINGECKHVGCDNILGSDAREDRCRVCGGDGSTCDAIEGFFNDSLPRGGYMEVVQIPRGSVHIEVREVAMSKNYIALKSEGDDYYINGAWTIDWPRKFDVAGTAFHYKRPTDEPESLEALGPTSENLIVMVLLQEQNLGIRYKFNVPITRTGSGDNEVGFTWNHQPWSECSATCAGGVQRQEVVCKRLDDNSIVQNNYCDPDSKPPENQRACNTEPCPPEWFIGDWLECSKTCDGGMRTRAVLCIRKIGPSEEETLDYSGCLTHRPVEKEPCNNQSCPPQWVALDWSECTPKCGPGFKHRIVLCKSSDLSKTFPAAQCPEESKPPVRIRCSLGRCPPPRWVTGDWGQCSAQCGLGQQMRTVQCLSYTGQASSDCLETVRPPSMQQCESKCDSTPISNTEECKDVNKVAYCPLVLKFKFCSRAYFRQMCCKTCQGH

SEQ ID NO: 10726 - protein, 411 aa, Homo sapiens
MAAPRPPPARLSGVMVPAPIQDLEALRALTALFKEQRNRNLDTIGVAVDLILLFRELRVEQESLLTAFRCGLQFLGNIASRNEDSQSIVWVHAFPELFLSCLNHPDKKIVAYSSMILFTSLNHERMKELEENLNIAIDVIDAYQKHPESEWPFLIITDLFLKSPELVQAMFPKLNNQERVTLLDLMIAKITSDEPLTKDDIPVFLRHAELIASTFVDQCKTVLKLASEEPPDDEEALATIRLLDVLCEMTVNTELLGYLQVFPGLLERVIDLLRVIHVAGKETTNIFSNCGCVRAEGDISNVANGFKSHLIRLIGNLCYKNKDNQDKVNELDGIPLILDNCNISDSNPFLTQWVIYAIRNLTEDNSQNQDLIAKMEEQGLADASLLKKVGFEVEKKGEKLILKSTRDTPKP

SEQ ID NO: 10727 - protein, 472 aa, Homo sapiens
MSNIYIQEPPTNGKVLLKTTAGDIDIELWSKEAPKACRNFIQLCLEAYYDNTIFHRVVPGFIVQGGDPTGTGSGGESIYGAPFKDEFHSRLRFNRRGLVAMANAGSHDNGSQFFFTLGRADELNNKHTIFGKVTGDTVYNMLRLSEVDIDDDERPHNPHKIKSCEVLFNPFDDIIPREIKRLKKEKPEEEVKKLKPKGTKNFSLLSFGEEAEEEEEEVNRVSQSMKGKSKSSHDLLKDDPHLSSVPVVESEKGDAPDLVDDGEDESAEHDEYIDGDEKNLMRERIAKKLKKDTSANVKSAGEGEVEKKSVSRSEELRKEARQLKRELLAAKQKKVENAAKQAEKRSEEEEAPPDGAVAEYRREKQKYEALRKQQSKKGTSREDQTLALLNQFKSKLTQAIAETPENDIPETEVEDDEGWMSHVLQFEDKSRKVKDASMQDSDTFEIYDPRNPVNKRRREESKKLMREKKERR

SEQ ID NO: 10728 - protein, 525 aa, Homo sapiens
MASALSYVSKFKSFVILFVTPLLLLPLVILMPAKVCVQYMKDTNMLFLGGLIVAVAVERWNLHKRIALRTLLWVGAKPARLMLGFMGVTALLSMWISNTATTAMMVPIVEAILQQMEATSAATEAGLELVDKGKAKELPGSQVIFEGPTLGQQEDQERKRLCKAMTLCICYAASIGGTATLTGTGPNVVLLGQMNELFPDSKDLVNFASWFAFAFPNMLVMLLFAWLWLQFVYMRFNFKKSWGCGLESKKNEKAALKVLQEEYRKLGPLSFAEINVLICFFLLVILWFSRDPGFMPGWLTVAWVEGETKYVSDATVAIFVATLLFIVPSQKPKFNFRSQTEEERKTPFYPPPLLDWKVTQEKVPWGIVLLLGGGFALAKGSEASGLSVWMGKQMEPLHAVPPAAITLILSLLVAVFTECTSNVATTTLFLPIFASMSRSIGLNPLYIMLPCTLSASFAFMLPVATPPNAIVFTYGHLKVADMVKTGVIMNIIGVFCVFLAVNTWGRAIFDLDHFPDWANVTHIET

SEQ ID NO: 10729 - protein, 776 aa, Homo sapiens
MCGYERCRPCRGAHGYLRGGQGVLHLRGLPGHGGRRLKHRRGRLGECLQHPASGAVRGDWREKPGCWSHRFPCPGRHALVGGTIIGSARCQAFRTREGRLKAACNLLQRGITNLCVIGGDGSLTGANLFRKEWSGLLEELARNGQIDKEAVQKYAYLNVVGMVGSIDNDFCGTDMTIGTDSALHRIIEVVDAIMTTAQSHQRTFVLEVMGRHCGYLALVSALACGADWVFLPESPPEEGWEEQMCVKLSENRARKKRLNIIIVAEGAIDTQNKPITSEKIKELVVTQLGYDTRVTILGHVQRGGTPSAFDRILASRMGVEAVIALLEATPDTPACVVSLNGNHAVRLPLMECVQMTQDVQKAMDERRFQDAVRLRGRSFAGNLNTYKRLAIKLPDDQIPKTNCNVAVINVGAPAAGMNAAVRSAVRVGIADGHRMLAIYDGFDGFAKGQIKEIGWTDVGGWTGQGGSILGTKRVLPGKYLEEIATQMRTHSINALLIIGGFEAYLGLLELSAAREKHEEFCVPMVMVPATVSNNVPGSDFSIGADTALNTITDTCDRIKQSASGTKRRVFIIETMGGYCGYLANMGGLAAGADAAYIFEEPFDIRDLQSNVEHLTEKMKTTIQRGLVLRNESCSENYTTDFIYQLYSEEGKGVFDCRKNVLGHMQQGGAPSPFDRNFGTKISARAMEWITAKLKEARGRGKKFTTDDSICVLGISKRNVIFQPVAELKKQTDFEHRIPKEQWWLKLRPLMKILAKYKASYDVSDSGQLEHVQPWSV

SEQ ID NO: 10730 - protein, 297 aa, Homo sapiens
MQRARPTLWAAALTLLVLLRGPPVARAGASSAGLGPVVRCEPCDARALAQCAPPPAVCAELVREPGCGCCLTCALSEGQPCGIYTERCGSGLRCQPSPDEARPLQALLDGRGLCVNASAVSRLRAYLLPAPPAPGEPPAPGNASESEEDRSAGSVESPSVSSTHRVSDPKFHPLHSKIIIIKKGHAKDSQRYKVDYESQSTDTQNFSSESKRETEYGPCRREMEDTLNHLKFLNVLSPRGVHIPNCDKKGFYKKKQCRPSKGRKRGFCWCVDKYGQPLPGYTTKGKEDVHCYSMQSK

SEQ ID NO: 10731 - protein, 194 aa, Homo sapiens
MQRARPLQALLDGRGLCVNASAVSRLRAYLLPAPPAPGNASESEEDRSAGSVESPSVSSTHRVSDPKFHPLHSKIIIIKKGHAKDSQRYKVDYESQSTDTQNFSSESKRETEYGPCRREMEDTLNHLKFLNVLSPRGVHIPNCDKKGFYKKKQCRPSKGRKRGFCWCVDKYGQPLPGYTTKGKEDVHCYSMQSK

SEQ ID NO: 10732 - protein, 370 aa, Homo sapiens
MDSELKEEIPVHEEFILCGGAETQVLKCGPWTDLFHDQSVKRPKLLIFIIPGNPGFSAFYVPFAKALYSLTNRRFPVWTISHAGHALAPKDKKILTTSEDSNAQEIKDIYGLNGQIEHKLAFLRTHVPKDMKLVLIGHSIGSYFTLQMLKRVPELPVIRAFLLFPTIERMSESPNGRIATPLLCWFRYVLYVTGYLLLKPCPETIKSLLIRRGLQVMNLENEFSPLNILEPFCLANAAYLGGQEMMEVVKRDDETIKEHLCKLTFYYGTIDPWCPKEYYEDIKKDFPEGDIRLCEKNIPHAFITHFNQEMADMIADSLKDDLSKIGNPSWHYHSLRTMRCPSAQILKPPDERFGSDLLPTYWWKNQISRD

SEQ ID NO: 10733 - protein, 465 aa, Homo sapiens
MHSSCRQRRNQNLSKEIPQTEFHTGYSMENEPGIVSPFKRVFLKGEKSRDKKAHEKVTERRPLHTVVLSLPERVEPDRLLSDYIEKEVKYLGQLTSIPGYLNPSSRTEILHFIDNAKRAHQLPGHLTQEHDAVLSLSAYNVKLAWRDGEDIILRVPIHDIAAVSYVRDDAAHLVVLKTAQDPGISPSQSLCAESSRGLSAGSLSESAVGPVEACCLVILAAESKVAAEELCCLLGQVFQVVYTESTIDFLDRAIFDGASTPTHHLSLHSDDSSTKVDIKETYEVEASTFCFPESVDVGGASPHSKTISESELSASATELLQDYMLTLRTKLSSQEIQQFAALLHEYRNGASIHEFCINLRQLYGDSRKFLLLGLRPFIPEKDSQHFENFLETIGVKDGRGIITDSFGRHRRALSTTSSSTTNGNRATGSSDDRSAPSEGDEWDRMISDISSDIEALGCSMDQDSA

SEQ ID NO: 10734 - protein, 265 aa, Homo sapiens
MVTLTYFGAHFAVIRRASLEKNPYQAVHQWAFSAGLSLVGLLTLGAVLSAAATVREAQGLMAGVEDAMLDTYDLVYEQAMKGTSHVRRQELAAIQDVFLCCGKKSPFSRLGSTEADLCQGEEAAREDCLQGIRSFLRTHQQVASSLTSIGLALTVSALLFSSFLWFAIRCGCSLDRKGKYTLTPRACGRQPQEPSLLRCSQGGPTHCLHSEAVAIGPRGCSGSLRWLQESDAAPLPLSCHLAAHRALQGRSRGGLSGCPERGLSD

SEQ ID NO: 10735 - protein, 784 aa, Homo sapiens
MDADDSRAPKGSLRKFLEHLSGAGKAIGVLTSGGDAQGMNAAVRAVVRMGIYVGAKVYFIYEGYQGMVDGGSNIAEADWESVSSILQVGGTIIGSARCQAFRTREGRLKAACNLLQRGITNLCVIGGDGSLTGANLFRKEWSGLLEELARNGQIDKEAVQKYAYLNVVGMVGSIDNDFCGTDMTIGTDSALHRIIEVVDAIMTTAQSHQRTFVLEVMGRHCGYLALVSALACGADWVFLPESPPEEGWEEQMCVKLSENRARKKRLNIIIVAEGAIDTQNKPITSEKIKELVVTQLGYDTRVTILGHVQRGGTPSAFDRILASRMGVEAVIALLEATPDTPACVVSLNGNHAVRLPLMECVQMTQDVQKAMDERRFQDAVRLRGRSFAGNLNTYKRLAIKLPDDQIPKTNCNVAVINVGAPAAGMNAAVRSAVRVGIADGHRMLAIYDGFDGFAKGQIKEIGWTDVGGWTGQGGSILGTKRVLPGKYLEEIATQMRTHSINALLIIGGFEAYLGLLELSAAREKHEEFCVPMVMVPATVSNNVPGSDFSIGADTALNTITDTCDRIKQSASGTKRRVFIIETMGGYCGYLANMGGLAAGADAAYIFEEPFDIRDLQSNVEHLTEKMKTTIQRGLVLRNESCSENYTTDFIYQLYSEEGKGVFDCRKNVLGHMQQGGAPSPFDRNFGTKISARAMEWITAKLKEARGRGKKFTTDDSICVLGISKRNVIFQPVAELKKQTDFEHRIPKEQWWLKLRPLMKILAKYKASYDVSDSGQLEHVQPWSV

SEQ ID NO: 10736 - protein, 384 aa, Homo sapiens
MDAALLLNVEGVKKTILHGGTGELPNFITGSRVIFHFRTMKCDEERTVIDDSRQVGQPMHIIIGNMFKLEVWEILLTSMRVHEVAEFWCDTIHTGVYPILSRSLRQMAQGKDPTEWHVHTCGLANMFAYHTLGYEDLDELQKEPQPLVFVIELLQVDAPSDYQRETWNLSNHEKMKAVPVLHGEGNRLFKLGRYEEASSKYQEAIICLRNLQTKEKPWEVQWLKLEKMINTLILNYCQCLLKKEEYYEVLEHTSDILRHHPGIVKAYYVRARAHAEVWNEAEAKADLQKVLELEPSMQKAVRRELRLLENRMAEKQEEERLRCRNMLSQGATQPPAEPPTEPPAQSSTEPPAEPPTAPSAELSAGPPAEPATEPPPSPGHSLQH

SEQ ID NO: 10737 - protein, 562 aa, Homo sapiens
MTRNARPNIVLLMADDLGVGDLCCYGNNSVSTPNIDRLASEGVRLTQHLAAASMCTPSRAAFLTGRYPIRSGMVSAYNLNRAFTWLGGSGGLPTNETTFAKLLQHRGYRTGLIGKWHLGLSCASRNDHCYHPLNHGFHYFYGVPFGLLSDCQASKTPELHRWLRIKLWISTVALALVPFLLLIPKFARWFSVPWKVIFVFALLAFLFFTSWYSSYGFTRRWNCILMRNHEIIQQPMKEEKVASLMLKEALAFIERYKREPFLLFFSFLHVHTPLISKKKFVGRSKYGRYGDNVEEMDWMVGKILDALDQERLANHTLVYFTSDNGGHLEPLDGAVQLGGWNGIYKGGKGMGGWEGGIRVPGIFRWPSVLEAGRVINEPTSLMDIYPTLSYIGGGILSQDRVIDGQNLMPLLEGRASHSDHEFLFHYCGVYLHTVRWHQKDCATVWKAHYVTPKFYPEGTGACYGSGICSCSGDVTYHDPPLLFDISRDPSEALPLNPDNEPLFDSVIKKMEAAIREHRRTLTPVPQQFSVFNTIWKPWLQPCCGTFPFCGCDKEDDILPMAP

SEQ ID NO: 10738 - protein, 589 aa, Homo sapiens
MLHLHHSCLCFRSWLPAMLAVLLSLAPSASSDISASRPNILLLMADDLGIGDIGCYGNNTMRTPNIDRLAEDGVKLTQHISAASLCTPSRAAFLTGRYPVRSGMVSSIGYRVLQWTGASGGLPTNETTFAKILKEKGYATGLIGKWHLGLNCESASDHCHHPLHHGFDHFYGMPFSLMGDCARWELSEKRVNLEQKLNFLFQVLALVALTLVAGKLTHLIPVSWMPVIWSALSAVLLLASSYFVGALIVHADCFLMRNHTITEQPMCFQRTTPLILQEVASFLKRNKHGPFLLFVSFLHVHIPLITMENFLGKSLHGLYGDNVEEMDWMVGRILDTLDVEGLSNSTLIYFTSDHGGSLENQLGNTQYGGWNGIYKGGKGMGGWEGGIRVPGIFRWPGVLPAGRVIGEPTSLMDVFPTVVRLAGGEVPQDRVIDGQDLLPLLLGTAQHSDHEFLMHYCERFLHAARWHQRDRGTMWKVHFVTPVFQPEGAGACYGRKVCPCFGEKVVHHDPPLLFDLSRDPSETHILTPASEPVFYQVMERVQQAVWEHQRTLSPVPLQLDRLGNIWRPWLQPCCGPFPLCWCLREDDPQ

SEQ ID NO: 10739 - protein, 718 aa, Homo sapiens
MRAVLDTADIAIVALYFILVMCIGFFAMWKSNRSTVSGYFLAGRSMTWVAIGASLFVSNIGSEHFIGLAGSGAASGFAVGAWEFNALLLLQLLGWVFIPIYIRSGVYTMPEYLSKRFGGHRIQVYFAALSLILYIFTKLSVDLYSGALFIQESLGWNLYVSVILLIGMTALLTVTGGLVAVIYTDTLQALLMIIGALTLMIISIMEIGGFEEVKRRYMLASPDVTSILLTYNLSNTNSCNVSPKKEALKMLRNPTDEDVPWPGFILGQTPASVWYWCADQVIVQRVLAAKNIAHAKGSTLMAGFLKLLPMFIIVVPGMISRILFTDDIACINPEHCMLVCGSRAGCSNIAYPRLVMKLVPVGLRGLMMAVMIAALMSDLDSIFNSASTIFTLDVYKLIRKSASSRELMIVGRIFVAFMVVISIAWVPIIVEMQGGQMYLYIQEVADYLTPPVAALFLLAIFWKRCNEQGAFYGGMAGFVLGAVRLILAFAYRAPECDQPDNRPGFIKDIHYMYVATGLFWVTGLITVIVSLLTPPPTKEQIRTTTFWSKKNLVVKENCSPKEEPYKMQEKSILRCSENNETINHIIPNGKSEDSIKGLQPEDVNLLVTCREEGNPVASLGHSEAETPVDAYSNGQAALMGEKERKKETDDGGRYWKFIDWFCGFKSKSLSKRSLRDLMEEEAVCLQMLEETRQVKVILNIGLFAVCSLGIFMFVYFSL

SEQ ID NO: 10740 - protein, 1332 aa, Homo sapiens
MAEAGLRGWLLWALLLRLAQSEPYTTIHQPGYCAFYDECGKNPELSGSLMTLSNVSCLSNTPARKITGDHLILLQKICPRLYTGPNTQACCSAKQLVSLEASLSITKALLTRCPACSDNFVNLHCHNTCSPNQSLFINVTRVAQLGAGQLPAVVAYEAFYQHSFAEQSYDSCSRVRVPAAATLAVGTMCGVYGSALCNAQRWLNFQGDTGNGLAPLDITFHLLEPGQAVGSGIQPLNEGVARCNESQGDDVATCSCQDCAASCPAIARPQALDSTFYLGQMPGSLVLIIILCSVFAVVTILLVGFRVAPARDKSKMVDPKKGTSLSDKLSFSTHTLLGQFFQGWGTWVASWPLTILVLSVIPVVALAAGLVFTELTTDPVELWSAPNSQARSEKAFHDQHFGPFFRTNQVILTAPNRSSYRYDSLLLGPKNFSGILDLDLLLELLELQERLRHLQVWSPEAQRNISLQDICYAPLNPDNTSLYDCCINSLLQYFQNNRTLLLLTANQTLMGQTSQVDWKDHFLYCANAPLTFKDGTALALSCMADYGAPVFPFLAIGGYKGKDYSEAEALIMTFSLNNYPAGDPRLAQAKLWEEAFLEEMRAFQRRMAGMFQVTFMAERSLEDEINRTTAEDLPIFATSYIVIFLYISLALGSYSSWSRVMVDSKATLGLGGVAVVLGAVMAAMGFFSYLGIRSSLVILQVVPFLVLSVGADNIFIFVLEYQRLPRRPGEPREVHIGRALGRVAPSMLLCSLSEAICFFLGALTPMPAVRTFALTSGLAVILDFLLQMSAFVALLSLDSKRQEASRLDVCCCVKPQELPPPGQGEGLLLGFFQKAYAPFLLHWITRGVVLLLFLALFGVSLYSMCHISVGLDQELALPKDSYLLDYFLFLNRYFEVGAPVYFVTTLGYNFSSEAGMNAICSSAGCNNFSFTQKIQYATEFPEQSYLAIPASSWVDDFIDWLTPSSCCRLYISGPNKDKFCPSTVNSLNCLKNCMSITMGSVRPSVEQFHKYLPWFLNDRPNIKCPKGGLAAYSTSVNLTSDGQVLASRFMAYHKPLKNSQDYTEALRAARELAANITADLRKVPGTDPAFEVFPYTITNVFYEQYLTILPEGLFMLSLCLVPTFAVSCLLLGLDLRSGLLNLLSIVMILVDTVGFMALWGISYNAVSLINLVSAVGMSVEFVSHITRSFAISTKPTWLERAKEATISMGSAVFAGVAMTNLPGILVLGLAKAQLIQIFFFRLNLLITLLGLLHGLVFLPVILSYVGPDVNPALALEQKRAEEAVAAVMVASCPNHPSRVSTADNIYVNHSFEGSIKGAGAISNFLPNNGRQF

SEQ ID NO: 10741 - protein, 594 aa, Homo sapiens
MVLLHVLFEHAVGYALLALKEVEEISLLQPQVEESVLNLGKFHSIVRLVAFCPFASSQVALENANAVSEGVVHEDLRLLLETHLPSKKKKVLLGVGDPKIGAAIQEELGYNCQTGGVIAEILRGVRLHFHNLVKGLTDLSACKAQLGLGHSYSRAKVKFNVNRVDNMIIQSISLLDQLDKDINTFSMRVREWYGYHFPELVKIINDNATYCRLAQFIGNRRELNEDKLEKLEELTMDGAKAKAILDASRSSMGMDISAIDLINIESFSSRVVSLSEYRQSLHTYLRSKMSQVAPSLSALIGEAVGARLIAHAGSLTNLAKYPASTVQILGAEKALFRALKTRGNTPKYGLIFHSTFIGRAAAKNKGRISRYLANKCSIASRIDCFSEVPTSVFGEKLREQVEERLSFYETGEIPRKNLDVMKEAMVQAEEAAAEITRKLEKQEKKRLKKEKKRLAALALASSENSSSTPEECEEMSEKPKKKKKQKPQEVPQENGMEDPSISFSKPKKKKSFSKEELMSSDLEETAGSTSIPKRKKSTPKEETVNDPEEAGHRSGSKKKRKFSKEEPVSSGPEEAVGKSSSKKKKKFHKASQED

SEQ ID NO: 10742 - protein, 550 aa, Homo sapiens
MAEASFGSSSPVGSLSSEDHDFDPTAEMLVHDYDDERTLEEEEMMDEGKNFSSEIEDLEKEGTMPLEDLLAFYGYEPTIPAVANSSANSSPSELADELPDMTLDKEEIAKDLLSGDDEETQSSADDLTPSVTSHETSDFFPRPLRSNTACDGDKESEVEDVETDSGNSPEDLRKEIMIGLQYQAEIPPYLGEYDGNEKVYENEDQLLWCPDVVLESKVKEYLVETSLRTGSEKIMDRISAGTHTRDNEQALYELLKCNHNIKEAIERYCCNGKASQEGMTAWTEEECRSFEHALMLFGKDFHLIQKNKVRTRTVAECVAFYYMWKKSERYDYFAQQTRFGKKRYNHHPGVTDYMDRLVDETEALGGTVNASALTSNRPEPIPDQQLNILNSFTASDLTALTNSVATVCDPTDVNCLDDSFPPLGNTPRGQVNHVPVVTEELLTLPSNGESDCFNLFETGFYHSELNPMNMCSEESERPAKRLKMGIAVPESFMNEVSVNNLGVDFENHTHHITSAKMAVSVADFGSLSANETNGFISAHALHQHAALHSE

SEQ ID NO: 10743 - protein, 172 aa, Homo sapiens
MAESLRSPRRSLYKLVGSPPWKEAFRQRCLERMRNSRDRLLNRYRQAGSSGPGNSQNSFLVQEVMEEEWNALQSVENCPEDLAQLEELIDMAVLEEIQQELINQEQSIISEYEKSLQFDEKCLSIMLAEWEANPLICPVCTKYNLRITSGVVVCQCGLSIPSHACDTWAVIL

SEQ ID NO: 10744 - protein, 219 aa, Homo sapiens
MAESLRSPRRSLYKLVGSPPWKEAFRQRCLERMRNSRDRLLNRYRQAGSSGPGNSQNSFLVQEVMEEEWNALQSVENCPEDLAQLEELIDMAVLEEIQQELINQEQSIISEYEKSLQFDEKCLSIMLAEWEANPLICPVCTKYNLRITSGVVVCQCGLSIPSHSSELTEQKLRACLEGSINEHSAHCPHTPEFSVTGGTEEKSSLLMSCLACDTWAVIL

SEQ ID NO: 10745 - protein, 363 aa, Homo sapiens
MFKRHKSLASERKRALLSQRATRFILKDDMRNFHFLSKLVLSAGPLRPTPAVKHSKTTHFEIEIFDAQTRKQICILDKVTQSSTIHDVKQKFHKACPKWYPSRVGLQLECGGPFLKDYITIQSIAASSIVTLYATDLGQQVSWTTVFLAEYTGPLLIYLLFYLRIPCIYDGKESARRLRHPVVHLACFCHCIHYIRYLLETLFVHKVSAGHTPLKNLIMSCAFYWGFTSWIAYYINHPLYTPPSFGNRQITVSAINFLICEAGNHFINVMLSHPNHTGNNACFPSPNYNPFTWMFFLVSCPNYTYEIGSWISFTVMTQTLPVGIFTLLMSIQMSLWAQKKHKIYLRKFNSYIHRKSAMIPFIL

SEQ ID NO: 10746 - protein, 549 aa, Homo sapiens
MAEASFGSSSPVGSLSSEDHDFDPTAEMLVHDYDDERTLEEEEMMDEGKNFSSEIEDLEKEGTMPLEDLLAFYGYEPTIPAVANSSANSSPSELADELPDMTLDKEEIAKDLLSGDDEETQSSADDLTPSVTSHETSDFFPRPLRSNTACDGDKESEVEDVETDSGNSPEDLRKEIMIGLQYQAEIPPYLGEYDGNEKVYENEDQLLWCPDVVLESKVKEYLVETSLRTGSEKIMDRISAGTHTRDNEQALYELLKCNHNIKEAIERYCCNGKASQGMTAWTEEECRSFEHALMLFGKDFHLIQKNKVRTRTVAECVAFYYMWKKSERYDYFAQQTRFGKKRYNHHPGVTDYMDRLVDETEALGGTVNASALTSNRPEPIPDQQLNILNSFTASDLTALTNSVATVCDPTDVNCLDDSFPPLGNTPRGQVNHVPVVTEELLTLPSNGESDCFNLFETGFYHSELNPMNMCSEESERPAKRLKMGIAVPESFMNEVSVNNLGVDFENHTHHITSAKMAVSVADFGSLSANETNGFISAHALHQHAALHSE

SEQ ID NO: 10747 - protein, 694 aa, Homo sapiens
MENKSLESSQTDLKLVAHPRAKSKVWKYFGFDTNAEGCILQWKKIYCRICMAQIAYSGNTSNLSYHLEKNHPEEFCEFVKSNTEQMREAFATAFSKLKPESSQQPGQDALAVKAGHGYDSKKQQELTAAVLGLICEGLYPASIVDEPTFKVLLKTADPRYELPSRKYISTKAIPEKYGAVREVILKELAEATWCGISTDMWRSENQNRAYVTLAAHFLGLGAPNCLSMGSRCLKTFEVPEENTAETITRVLYEVFIEWGISAKVFGATTNYGKDIVKACSLLDVAVHMPCLGHTFNAGIQQAFQLPKLGALLSRCRKLVEYFQQSAVAMYMLYEKQKQQNVAHCMLVSNRVSWWGSTLAMLQRLKEQQFVIAGVLVEDSNNHHLMLEASEWATIEGLVELLQPFKQVAEMLSASRYPTISMVKPLLHMLLNTTLNIKETDSKELSMAKEVIAKELSKTYQETPEIDMFLNVATFLDPRYKRLPFLSAFERQQVENRVVEEAKGLLDKVKDGGYRPAEDKIFPVPEEPPVKKLMRTSTPPPASVINNMLAEIFCQTGGVEDQEEWHAQVVEELSNFKSQKVLGLNEDPLKWWSDRLALFPLLPKVLQKYWCVTATRVAPERLFGSAANVVSAKRNRLAPAHVDEQVFLYENARSGAEAEPEDQDEGEWGLDQEQVFSLGDGVSGGFFGIRDSSFL

SEQ ID NO: 10748 - protein, 555 aa, Homo sapiens
MAEASFGSSSPVCFIPVGSLSSEDHDFDPTAEMLVHDYDDERTLEEEEMMDEGKNFSSEIEDLEKEGTMPLEDLLAFYGYEPTIPAVANSSANSSPSELADELPDMTLDKEEIAKDLLSGDDEETQSSADDLTPSVTSHETSDFFPRPLRSNTACDGDKESEVEDVETDSGNSPEDLRKEIMIGLQYQAEIPPYLGEYDGNEKVYENEDQLLWCPDVVLESKVKEYLVETSLRTGSEKIMDRISAGTHTRDNEQALYELLKCNHNIKEAIERYCCNGKASQEGMTAWTEEECRSFEHALMLFGKDFHLIQKNKVRTRTVAECVAFYYMWKKSERYDYFAQQTRFGKKRYNHHPGVTDYMDRLVDETEALGGTVNASALTSNRPEPIPDQQLNILNSFTASDLTALTNSVATVCDPTDVNCLDDSFPPLGNTPRGQVNHVPVVTEELLTLPSNGESDCFNLFETGFYHSELNPMNMCSEESERPAKRLKMGIAVPESFMNEVSVNNLGVDFENHTHHITSAKMAVSVADFGSLSANETNGFISAHALHQHAALHSE

SEQ ID NO: 10749 - protein, 1783 aa, Homo sapiens
MTSLKRSQTERPLATDRASVVGTDGTPKVHTDDFYMRRFRSQNGSLGSSVMAPVGPPRSEGSHHITSTPGVPKMGVRARIADWPPRKENIKESSRSSQEIETSSCLDSLSSKSSPVSQGSSVSLNSNDSAMLKSIQNTLKNKTRPSENMDSRFLMPEAYPSSPRKALRRIRQRSNSDITISELDVDSFDECISPTYKTGPSLHREYGSTSSIDKQGTSGESFFDLLKGYKDDKSDRGPTPTKLSDFLITGGGKGSGFSLDVIDGPISQRENLRLFKEREKPLKRRSKSETGDSSIFRKLRNAKGEELGKSSDLEDNRSEDSVRPWTCPKCFAHYDVQSILFDLNEAIMNRHNVIKRRNTTTGASAAAVASLVSGPLSHSASFSSPMGSTEDLNSKGSLSMDQGDDKSNELVMSCPYFRNEIGGEGERKISLSKSNSGSFSGCESASFESTLSSHCTNAGVAVLEVPKENLVLHLDRVKRYIVEHVDLGAYYYRKFFYQKEHWNYFGADENLGPVAVSIRREKPDEMKENGSPYNYRIIFRTSELMTLRGSVLEDAIPSTAKHSTARGLPLKEVLEHVVPELNVQCLRLAFNTPKVTEQLMKLDEQGLNYQQKVGIMYCKAGQSTEEEMYNNESAGPAFEEFLQLLGERVRLKGFEKYRAQLDTKTDSTGTHSLYTTYKDYEIMFHVSTMLPYTPNNKQQLLRKRHIGNDIVTIVFQEPGAQPFSPKNIRSHFQHVFVIVRVHNPCSDSVCYSVAVTRSRDVPSFGPPIPKGVTFPKSNVFRDFLLAKVINAENAAHKSEKFRAMATRTRQEYLKDLAEKNVTNTPIDPSGKFPFISLASKKKEKSKPYPGAELSSMGAIVWAVRAEDYNKAMELDCLLGISNEFIVLIEQETKSVVFNCSCRDVIGWTSTDTSLKIFYERGECVSVGSFINIEEIKEIVKRLQFVSKGCESVEMTLRRNGLGQLGFHVNYEGIVADVEPYGYAWQAGLRQGSRLVEICKVAVATLSHEQMIDLLRTSVTVKVVIIPPHDDCTPRRSCSETYRMPVMEYKMNEGVSYEFKFPFRNNNKWQRNASKGPHSPQVPSQVQSPMTSRLNAGKGDGKMPPPERAANIPRSISSDGRPLERRLSPGSDIYVTVSSMALARSQCRNSPSNLSSSSDTGSVGGTYRQKSMPEGFGVSRRSPASIDRQNTQSDIGGSGKSTPSWQRSEDSIADQMEPTCHLPAVSKVLPAFRESPSGRLMRQDPVVHLSPNKQGHSDSHYSSHSSSNTLSSNASSAHSDEKWYDGDRTESELNSYNYLQGTSADSGIDTTSYGPSHGSTASLGAATSSPRSGPGKEKVAPLWHSSSEVISMADRTLETESHGLDRKTESSLSLDIHSKSQAGSTPLTRENSTFSINDAASHTSTMSSRHSASPVVFTSARSSPKEELHPAAPSQLAPSFSSSSSSSSGPRSFYPRQGATSKYLIGWKKPEGTINSVGFMDTRKRHQSDGNEIAHTRLRASTRDLRASPKPTSKSTIEEDLKKLIDLESPTPESQKSFKFHALSSPQSPFPSTPTSRRALHRTLSDESIYNSQREHFFTSRASLLDQALPNDVLFSSTYPSLPKSLPLRRPSYTLGMKSLHGEFSASDSSLTDIQETRRQPMPDPGLMPLPDTAADLDWSNLVDAAKAYEVQRASFFAASDENHRPLSAASNSDQLEDQALAQMKPYSSSKDSSPTLASKVDQLEGMLKMLREDLKKEKEDKAHLQAEVQHLREDNLRLQEESQNASDKLKKFTEWVFNTIDMS

SEQ ID NO: 10750 - protein, 562 aa, Homo sapiens
MCPKSLSEKNSNNEVACKKTKIKKTCRRIIPPKMKNTSSKAESTLQNSSSAVHTESNKLQPKRTADAMNLSVDVESSQDGDSDEDTTPSLDFSGLSPYERKRLKNISENADFFASLQLSESAARLREMIEKRQPPKSKRKKPKRENGIGCRRSMRLLKVDPSGVSLPAAPTPPTLVADETPLLPPGPLEMTSENQEDNNERFKGFLHTWAGMSKPSSKNTEKGLSSIKSYKANLNGMVISEDTVYKVTTGPIFSMALHPSETRTLVAVGAKFGQVGLCDLTQQPKEDGVYVFHPHSQPVSCLYFSPANPAHILSLSYDGTLRCGDFSRAIFEEVYRNERSSFSSFDFLAEDASTLIVGHWDGNMSLVDRRTPGTSYEKLTSSSMGKIRTVHVHPVHRQYFITAGLRDTHIYDARRLNSRRSQPLISLTEHTKSIASAYFSPLTGNRVVTTCADCNLRIFDSSCISSKIPLLTTIRHNTFTGRWLTRFQAMWDPKQEDCVIVGSMAHPRRVEIFHETGKRVHSFGGEYLVSVCSINAMHPTRYILAGGNSSGKIHVFMNEKSC

SEQ ID NO: 10751 - protein, 336 aa, Homo sapiens
MAVATAAAVLAALGGALWLAARRFVGPRVQRLRRGGDPGLMHGKTVLITGANSGLGRATAAELLRLGARVIMGCRDRARAEEAAGQLRRELRQAAECGPEPGVSGVGELIVRELDLASLRSVRAFCQEMLQEEPRLDVLINNAGIFQCPYMKTEDGFEMQFGVNHLGHFLLTNLLLGLLKSSAPSRIVVVSSKLYKYGDINFDDLNSEQSYNKSFCYSRSKLANILFTRELARRLEGTNVTVNVLHPGIVRTNLGRHIHIPLLVKPLFNLVSWAFFKTPVEGAQTSIYLASSPEVEGVSGRYFGDCKEEELLPKAMDESVARKLWDISEVMVGLLK

SEQ ID NO: 10752 - protein, 1081 aa, Homo sapiens
MEPSRALLGCLASAAAAAPPGEDGAGAGAEEEEEEEEEAAAAVGPGELGCDAPLPYWTAVFEYEAAGEDELTLRLGDVVEVLSKDSQVSGDEGWWTGQLNQRVGIFPSNYVTPRSAFSSRCQPGGEDPSCYPPIQLLEIDFAELTLEEIIGIGGFGKVYRAFWIGDEVAVKAARHDPDEDISQTIENVRQEAKLFAMLKHPNIIALRGVCLKEPNLCLVMEFARGGPLNRVLSGKRIPPDILVNWAVQIARGMNYLHDEAIVPIIHRDLKSSNILILQKVENGDLSNKILKITDFGLAREWHRTTKMSAAGTYAWMAPEVIRASMFSKGSDVWSYGVLLWELLTGEVPFRGIDGLAVAYGVAMNKLALPIPSTCPEPFAKLMEDCWNPDPHSRPSFTNILDQLTTIEESGFFEMPKDSFHCLQDNWKHEIQEMFDQLRAKEKELRTWEEELTRAALQQKNQEELLRRREQELAEREIDILERELNIIIHQLCQEKPRVKKRKGKFRKSRLKLKDGNRISLPSDFQHKFTVQASPTMDKRKSLINSRSSPPASPTIIPRLRAIQLTPGESSKTWGRSSVVPKEEGEEEEKRAPKKKGRTWGPGTLGQKELASGDEGLKSLVDGYKQWSSSAPNLVKGPRSSPALPGFTSLMEMEDEDSEGPGSGESRLQHSPSQSYLCIPFPRGEDGDGPSSDGIHEEPTPVNSATSTPQLTPTNSLKRGGAHHRRCEVALLGCGAVLAATGLGFDLLEAGKCQLLPLEEPEPPAREEKKRREGLFQRSSRPRRSTSPPSRKLFKKEEPMLLLGDPSASLTLLSLSSISECNSTRSLLRSDSDEIVVYEMPVSPVEAPPLSPCTHNPLVNVRVERFKRDPNQSLTPTHVTLTTPSQPSSHRRTPSDGALKPETLLASRSPSSNGLSPSPGAGMLKTPSPSRDPGEFPRLPDPNVVFPPTPRRWNTQQDSTLERPKTLEFLPRPRPSANRQRLDPWWFVSPSHARSTSPANSSSTETPSNLDSCFASSSSTVEERPGLPALLPFQAGPLPPTERTLLDLDAEGQSQDSTVPLCRAELNTHRPAPYEIQQEFWS

SEQ ID NO: 10753 - protein, 441 aa, Homo sapiens
MDDDDFGGFEAAETFDGGSGETQTTSPAIPWAAFPAVSGVHLSPSSPEIVLDRDHSSSIGCLSSDAIISSPENTHAANSIVSQTIPKAQIQQSTHTHLDISLFPLGLTDEKSNGTIALVDDSEDPGANVSNIQLQQKISSLEIKLKVSEEEKQRIKQDVESLMEKHNVLEKGFLKEKEQEAISFQDRYKELQEKHKQELEDMRKAGHEALSIIVDEYKALLQSSVKQQVEAIEKQYISAIEKQAHKCEELLNAQHQRLLEMLDTEKELLKEKIKEALIQQSQEQKEILEKCLEEERQRNKEALVSAAKLEKEAVKDAVLKVVEEERKNLEKAHAEERELWKTEHAKDQEKVSQEIQKAIQEQRKISQETVKAAIIEEQKRSEKAVEEAVKRTRDELIEYIKEQKRLDQVIRQRSLSSLELFLSCAQKQLSALIATEPVDIE

SEQ ID NO: 10754 - protein, 927 aa, Homo sapiens
MAWLRLQPLTSAFLHFGLVTFVLFLNGLRAEAGGSGDVPSTGQNNESCSGSSDCKEGVILPIWYPENPSLGDKIARVIVYFVALIYMFLGVSIIADRFMASIEVITSQEREVTIKKPNGETSTTTIRVWNETVSNLTLMALGSSAPEILLSLIEVCGHGFIAGDLGPSTIVGSAAFNMFIIIGICVYVIPDGETRKIKHLRVFFITAAWSIFAYIWLYMILAVFSPGVVQVWEGLLTLFFFPVCVLLAWVADKRLLFYKYMHKKYRTDKHRGIIIETEGDHPKGIEMDGKMMNSHFLDGNLVPLEGKEVDESRREMIRILKDLKQKHPEKDLDQLVEMANYYALSHQQKSRAFYRIQATRMMTGAGNILKKHAAEQAKKASSMSEVHTDEPEDFISKVFFDPCSYQCLENCGAVLLTVVRKGGDMSKTMYVDYKTEDGSANAGADYEFTEGTVVLKPGETQKEFSVGIIDDDIFEEDEHFFVRLSNVRIEEEQPEEGMPPAIFNSLPLPRAVLASPCVATVTILDDDHAGIFTFECDTIHVSESIGVMEVKVLRTSGARGTVIVPFRTVEGTAKGGGEDFEDTYGELEFKNDETVKTIRVKIVDEEEYERQENFFIALGEPKWMERGISALLLSPDVTDRKLTMEEEEAKRIAEMGKPVLGEHPKLEVIIEESYEFKTTVDKLIKKTNLALVVGTHSWRDQFMEAITVSAAGDEDEDESGEERLPSCFDYVMHFLTVFWKVLFACVPPTEYCHGWACFAVSILIIGMLTAIIGDLASHFGCTIGLKDSVTAVVFVAFGTSVPDTFASKAAALQDVYADASIGNVTGSNAVNVFLGIGLAWSVAAIYWALQGQEFHVSAGTLAFSVTLFTIFAFVCISVLLYRRRPHLGGELGGPRGCKLATTWLFVSLWLLYILFATLEAYCYIKGF

SEQ ID NO: 10755 - protein, 505 aa, Homo sapiens
MSAEEMVQIRLEDRCYPVSKRKLIEQSDYFRALYRSGMREALSQEAGGPEVQQLRGLSAPGLRLVLDFINAGGAREGWLLGPRGEKGGGVDEDEEMDEVSLLSELVEAASFLQVTSLLQLLLSQVRLNNCLEMYRLAQVYGLPDLQEACLRFMVVHFHEVLCKPQFHLLGSPPQAPGDVSLKQRLREARMTGTPVLVALGDFLGGPLAPHPYQGEPPSMLRYEEMTERWFPLANNLPPDLVNVRGYGSAILDNYLFIVGGYRITSQEISAAHSYNPSTNEWLQVASMNQKRSNFKLVAVNSKLYAIGGQAVSNVECYNPEQDAWNFVAPLPNPLAEFSACECKGKIYVIGGYTTRDRNMNILQYCPSSDMWTLFETCDVHIRKQQMVSVEETIYIVGGCLHELGPNRRSSQSEDMLTVQSYNTVTRQWLYLKENTSKSGLNLTCALHNDGIYIMSRDVTLSTSLEHRVFLKYNIFSDSWEAFRRFPAFGHNLLVSSLYLPNKAET

SEQ ID NO: 10756 - protein, 445 aa, Homo sapiens
MAKRKEENFSSPKNAKRPRQEELEDFDKDGDEDECKGTTLTAAEVGIIESIHLKNFMCHSMLGPFKFGSNVNFVVGNNGSGKSAVLTALIVGLGGRAVATNRGSSLKGFVKDGQNSADISITLRNRGDDAFKASVYGNSILIQQHISIDGSRSYKLKSATGSVVSTRKEELIAILDHFNIQVDNPVSVLTQEMSKQFLQSKNEGDKYKFFMKATQLEQMKEDYSYIMETKERTKEQIHQGEERLTELKRQCVEKEERFQSIAGLSTMKTNLESLKHEMAWAVVNEIEKQLNAIRDNIKIGEDRAARLDRKMEEQQVRLNEAEQKYKDIQDKLEKISEETNARAPECMALKADVVAKKRAYNEAEVLYNRSLNEYKALKKDDEQLCKRIEELKKSTDQSLEPERLERQKKISWLKERVKAFQNQENSVNQEIEQFQQAIEKDKEEH

SEQ ID NO: 10757 - protein, 434 aa, Homo sapiens
MLPARCARLLTPHLLLVLVQLSPARGHRTTGPRFLISDRDPQCNLHCSRTQPKPICASDGRSYESMCEYQRAKCRDPTLGVVHRGRCKDAGQSKCRLERAQALEQAKKPQEAVFVPECGEDGSFTQVQCHTYTGYCWCVTPDGKPISGSSVQNKTPVCSGSVTDKPLSQGNSGRKDDGSKPTPTMETQPVFDGDEITAPTLWIKHLVIKDSKLNNTNIRNSEKVYSCDQERQSALEEAQQNPREGIVIPECAPGGLYKPVQCHQSTGYCWCVLVDTGRPLPGTSTRYVMPSCESDARAKTTEADDPFKDRELPGCPEGKKMEFITSLLDALTTDMVQAINSAAPTGGGRFSEPDPSHTLEERVVHWYFSQLDSNSSNDINKREMKPFKRYVKKKAKPKKCARRFTDYCDLNKDKVISLPELKGCLGVSKEGRLV

SEQ ID NO: 10758 - protein, 877 aa, Homo sapiens
MAQFPTPFGGSLDIWAITVEERAKHDQQFHSLKPISGFITGDQARNFFFQSGLPQPVLAQIWALADMNNDGRMDQVEFSIAMKLIKLKLQGYQLPSALPPVMKQQPVAISSAPAFAAVPPLANGAPPVIQPLPAFAHPAATLPKSSSFSRSGPGSQLNTKLQKAQSFDVASVPPVAEWAVPQSSRLKYRQLFNSHDKTMSGHLTGPQARTILMQSSLPQAQLASIWNLSDIDQDGKLTAEEFILAMHLIDVAMSGQPLPPVLPPEYIPPSFRRVRSGSGISVISSTSVDQRLPEEPVLEDEQQQLEKKLPVTFEDKKRENFERGNLELEKRRQALLEQQRKEQERLAQLERAEQERKERERQEQERKRQLELEKQLEKQRELERQREEERRKEIERREAAKRELERQRQLEWERNRRQELLNQRNKEQEDIVVLKAKKKTLEFELEALNDKKHQLEGKLQDIRCRLTTQRQEIESTNKSRELRIAEITHLQQQLQESQQMLGRLIPEKQILNDQLKQVQQNSLHRDSLVTLKRALEAKELARQHLRDQLDEVEKETRSKLQEIDIFNNQLKELREIHNKQQLQKQKSMEAERLKQKEQERKIIELEKQKEEAQRRAQERDKQWLEHVQQEDEHQRPRKLHEEEKLKREESVKKKDGEEKGKQEAQDKLGRLFHQHQEPAKPAVQAPWSTAEKGPLTISAQENVKVVYYRALYPFESRSHDEITIQPGDIVMVDESQTGEPGWLGGELKGKTGWFPANYAEKIPENEVPAPVKPVTDSTSAPAPKLALRETPAPLAVTSSEPSTTPNNWADFSSTWPTSTNEKPETDNWDAWAAQPSLTVPSAGQLRQRSAFTPATATGSSPSPVLGQHGFWFFRESC

SEQ ID NO: 10759 - protein, 1220 aa, Homo sapiens
MAQFPTPFGGSLDIWAITVEERAKHDQQFHSLKPISGFITGDQARNFFFQSGLPQPVLAQIWALADMNNDGRMDQVEFSIAMKLIKLKLQGYQLPSALPPVMKQQPVAISSAPAFGMGGIASMPPLTAVAPVPMGSIPVVGMSPTLVSSVPTAAVPPLANGAPPVIQPLPAFAHPAATLPKSSSFSRSGPGSQLNTKLQKAQSFDVASVPPVAEWAVPQSSRLKYRQLFNSHDKTMSGHLTGPQARTILMQSSLPQAQLASIWNLSDIDQDGKLTAEEFILAMHLIDVAMSGQPLPPVLPPEYIPPSFRRVRSGSGISVISSTSVDQRLPEEPVLEDEQQQLEKKLPVTFEDKKRENFERGNLELEKRRQALLEQQRKEQERLAQLERAEQERKERERQEQERKRQLELEKQLEKQRELERQREEERRKEIERREAAKRELERQRQLEWERNRRQELLNQRNKEQEDIVVLKAKKKTLEFELEALNDKKHQLEGKLQDIRCRLTTQRQEIESTNKSRELRIAEITHLQQQLQESQQMLGRLIPEKQILNDQLKQVQQNSLHRDSLVTLKRALEAKELARQHLRDQLDEVEKETRSKLQEIDIFNNQLKELREIHNKQQLQKQKSMEAERLKQKEQERKIIELEKQKEEAQRRAQERDKQWLEHVQQEDEHQRPRKLHEEEKLKREESVKKKDGEEKGKQEAQDKLGRLFHQHQEPAKPAVQAPWSTAEKGPLTISAQENVKVVYYRALYPFESRSHDEITIQPGDIVMVKGEWVDESQTGEPGWLGGELKGKTGWFPANYAEKIPENEVPAPVKPVTDSTSAPAPKLALRETPAPLAVTSSEPSTTPNNWADFSSTWPTSTNEKPETDNWDAWAAQPSLTVPSAGQLRQRSAFTPATATGSSPSPVLGQGEKVEGLQAQALYPWRAKKDNHLNFNKNDVITVLEQQDMWWFGEVQGQKGWFPKSYVKLISGPIRKSTSMDSGSSESPASLKRVASPAAKPVVSGEEFIAMYTYESSEQGDLTFQQGDVILVTKKDGDWWTGTVGDKAGVFPSNYVRLKDSEGSGTAGKTGSLGKKPEIAQVIASYTATGPEQLTLAPGQLILIRKKNPGGWWEGELQARGKKRQIGWFPANYVKLLSPGTSKITPTEPPKSTALAAVCQVIGMYDYTAQNDDELAFNKGQIINVLNKEDPDWWKGEVNGQVGLFPSNYVKLTTDMDPSQQ

SEQ ID NO: 10760 - protein, 359 aa, Homo sapiens
MQVPNSTGPDNATLQMLRNPAIAVALPVVYSLVAAVSIPGNLFSLWVLCRRMGPRSPSVIFMINLSVTDLMLASVLPFQIYYHCNRHHWVFGVLLCNVVTVAFYANMYSSILTMTCISVERFLGVLYPLSSKRWRRRRYAVAACAGTWLLLLTALSPLARTDLTYPVHALGIITCFDVLKWTMLPSVAMWAVFLFTIFILLFLIPFVITVACYTATILKLLRTEEAHGREQRRRAVGLAAVVLLAFVTCFAPNNFVLLAHIVSRLFYGKSYYHVYKLTLCLSCLNNCLDPFVYYFASREFQLRLREYLGCRRVPRDTLDTRRESLFSARTTSVRSEAGAHPEGMEGATRPGLQRQESVF

SEQ ID NO: 10761 - protein, 1197 aa, Homo sapiens
MAAAAVTRGTPGENSHHLKIFLPKKLLECLPRCPLLPPERLRWNTNEEIASYLITFEKHDEWLSCAPKTRPQNGSIILYNRKKVKYRKDGYLWKKRKDGKTTREDHMKLKVQGMECLYGCYVHSSIVPTFHRRCYWLLQNPDIVLVHYLNVPALEDCGKGCSPIFCSISSDRREWLKWSREELLGQLKPMFHGIKWSCGNGTEEFSVEHLVQQILDTHPTKPAPRTHACLCSGGLGSGSLTHKCSSTKHRIISPKVEPRALTLTSIPHAHPPEPPPLIAPLPPELPKAHTSPSSSSSSSSSGFAEPLEIRPSPPTSRGGSSRGGTAILLLTGLEQRAGGLTPTRHLAPQADPRPSMSLAVVVGTEPSAPPAPPSPAFDPDRFLNSPQRGQTYGGGQGVSPDFPEAEAAHTPCSALEPAAALEPQAAARGPPPQSVAGGRRGNCFFIQDDDSGEELKGHGAAPPIPSPPPSPPPSPAPLEPSSRVGRGEALFGGPVGASELEPFSLSSFPDLMGELISDEAPSIPAPTPQLSPALSTITDFSPEWSYPEGGVKVLITGPWTEAAEHYSCVFDHIAVPASLVQPGVLRCYCPAHEVGLVSLQVAGREGPLSASVLFEYRARRFLSLPSTQLDWLSLDDNQFRMSILERLEQMEKRMAEIAAAGQVPCQGPDAPPVQDEGQGPGFEARVVVLVESMIPRSTWKGPERLAHGSPFRGMSLLHLAAAQGYARLIETLSQWRSVETGSLDLEQEVDPLNVDHFSCTPLMWACALGHLEAAVLLFRWNRQALSIPDSLGRLPLSVAHSRGHVRLARCLEELQRQEPSVEPPFALSPPSSSPDTGLSSVSSPSELSDGTFSVTSAYSSAPDGSPPPAPLPASEMTMEDMAPGQLSSGVPEAPLLLMDYEATNSKGPLSSLPALPPASDDGAAPEDADSPQAVDVIPVDMISLAKQIIEATPERIKREDFVGLPEAGASMRERTGAVGLSETMSWLASYLENVDHFPSSTPPSELPFERGRLAVPSAPSWAEFLSASTSGKMESDFALLTLSDHEQRELYEAARVIQTAFRKYKGRRLKEQQEVAAAVIQRCYRKYKQFALYKKMTQAAILIQSKFRSYYEQKRFQQSRRAAVLIQQHYRSYRRRPGPPHRTSATLPARNKGSFLTKKQDQAARKIMRFLRRCRHRMRELKQNQELEGLPQPGLAT

SEQ ID NO: 10762 - protein, 739 aa, Homo sapiens
MASVLGSGRGSGGLSSQLKCKSKRRRRRRSKRKDKVSILSTFLAPFKHLSPGITNTEDDDTLSTSSAEVKENRNVGNLAARPPPSGDRARGGAPGAKRKRPLEEGNGGHLCKLQLVWKKLSWSVAPKNALVQLHELRPGLQYRTVSQTGPVHAPVFAVAVEVNGLTFEGTGPTKKKAKMRAAELALRSFVQFPNACQAHLAMGGGPGPGTDFTSDQADFPDTLFQEFEPPAPRPGLAGGRPGDAALLSAAYGRRRLLCRALDLVGPTPATPAAPGERNPVVLLNRLRAGLRYVCLAEPAERRARSFVMAVSVDGRTFEGSGRSKKLARGQAAQAALQELFDIQMPGHAPGRARRTPMPQEFADSISQLVTQKFREVTTDLTPMHARHKALAGIVMTKGLDARQAQVVALSSGTKCISGEHLSDQGLVVNDCHAEVVARRAFLHFLYTQLELHLSKRREDSERSIFVRLKEGGYRLRENILFHLYVSTSPCGDARLHSPYEITTDLHSSKHLVRKFRGHLRTKIESGEGTVPVRGPSAVQTWDGVLLGEQLITMSCTDKIARWNVLGLQGALLSHFVEPVYLQSIVVGSLHHTGHLARVMSHRMEGVGQLPASYRHNRPLLSGVSDAEARQPGKSPPFSMNWVVGSADLEIINATTGRRSCGGPSRLCKHVLSARWARLYGRLSTRTPSPGDTPSMYCEAKLGAHTYQSVKQQLFKAFQKAGLGTWVRKPPEQQQFLLTL

SEQ ID NO: 10763 - protein, 621 aa, Homo sapiens
MVLCPVIGKLLHKRVVLASASPRRQEILSNAGLRFEVVPSKFKEKLDKASFATPYGYAMETAKQKALEVANRLYQKDLRAPDVVIGADTIVTVGGLILEKPVDKQDAYRMLSRLSGREHSVFTGVAIVHCSSKDHQLDTRVSEFYEETKVKFSELSEELLWEYVHSGEPMDKAGGYGIQALGGMLVESVHGDFLNVVGFPLNHFCKQLVKLYYPPRPEDLRRSVKHDSIPAADTFEDLSDVEGGGSEPTQRDAGSRDEKAEAGEAGQATAEAECHRTRETLPPFPTRLLELIEGFMLSKGLLTACKLKVFDLLKDEAPQKAADIASKVDASACGMERLLDICAAMGLLEKTEQGYSNTETANVYLASDGEYSLHGFIMHNNDLTWNLFTYLEFAIREGTNQHHRALGKKAEDLFQDAYYQSPETRLRFMRAMHGMTKLTACQVATAFNLSRFSSACDVGGCTGALARELAREYPRMQVTVFDLPDIIELAAHFQPPGPQAVQIHFAAGDFFRDPLPSAELYVLCRILHDWPDDKVHKLLSRVAESCKPGAGLLLVETLLDEEKRVAQRALMQSLNMLVQTEGKERSLGEYQCLLELHGFHQVQVVHLGGVLDAILATKVAP

SEQ ID NO: 10764 - protein, 1721 aa, Homo sapiens
MAQFPTPFGGSLDIWAITVEERAKHDQQFHSLKPISGFITGDQARNFFFQSGLPQPVLAQIWALADMNNDGRMDQVEFSIAMKLIKLKLQGYQLPSALPPVMKQQPVAISSAPAFGMGGIASMPPLTAVAPVPMGSIPVVGMSPTLVSSVPTAAVPPLANGAPPVIQPLPAFAHPAATLPKSSSFSRSGPGSQLNTKLQKAQSFDVASVPPVAEWAVPQSSRLKYRQLFNSHDKTMSGHLTGPQARTILMQSSLPQAQLASIWNLSDIDQDGKLTAEEFILAMHLIDVAMSGQPLPPVLPPEYIPPSFRRVRSGSGISVISSTSVDQRLPEEPVLEDEQQQLEKKLPVTFEDKKRENFERGNLELEKRRQALLEQQRKEQERLAQLERAEQERKERERQEQERKRQLELEKQLEKQRELERQREEERRKEIERREAAKRELERQRQLEWERNRRQELLNQRNKEQEDIVVLKAKKKTLEFELEALNDKKHQLEGKLQDIRCRLTTQRQEIESTNKSRELRIAEITHLQQQLQESQQMLGRLIPEKQILNDQLKQVQQNSLHRDSLVTLKRALEAKELARQHLRDQLDEVEKETRSKLQEIDIFNNQLKELREIHNKQQLQKQKSMEAERLKQKEQERKIIELEKQKEEAQRRAQERDKQWLEHVQQEDEHQRPRKLHEEEKLKREESVKKKDGEEKGKQEAQDKLGRLFHQHQEPAKPAVQAPWSTAEKGPLTISAQENVKVVYYRALYPFESRSHDEITIQPGDIVMVKGEWVDESQTGEPGWLGGELKGKTGWFPANYAEKIPENEVPAPVKPVTDSTSAPAPKLALRETPAPLAVTSSEPSTTPNNWADFSSTWPTSTNEKPETDNWDAWAAQPSLTVPSAGQLRQRSAFTPATATGSSPSPVLGQGEKVEGLQAQALYPWRAKKDNHLNFNKNDVITVLEQQDMWWFGEVQGQKGWFPKSYVKLISGPIRKSTSMDSGSSESPASLKRVASPAAKPVVSGEEFIAMYTYESSEQGDLTFQQGDVILVTKKDGDWWTGTVGDKAGVFPSNYVRLKDSEGSGTAGKTGSLGKKPEIAQVIASYTATGPEQLTLAPGQLILIRKKNPGGWWEGELQARGKKRQIGWFPANYVKLLSPGTSKITPTEPPKSTALAAVCQVIGMYDYTAQNDDELAFNKGQIINVLNKEDPDWWKGEVNGQVGLFPSNYVKLTTDMDPSQQWCSDLHLLDMLTPTERKRQGYIHELIVTEENYVNDLQLVTEIFQKPLMESELLTEKEVAMIFVNWKELIMCNIKLLKALRVRKKMSGEKMPVKMIGDILSAQLPHMQPYIRFCSRQLNGAALIQQKTDEAPDFKEFVKRLAMDPRCKGMPLSSFILKPMQRVTRYPLIIKNILENTPENHPDHSHLKHALEKAEELCSQVNEGVREKENSDRLEWIQAHVQCEGLSEQLVFNSVTNCLGPRKFLHSGKLYKAKSNKELYGFLFNDFLLLTQITKPLGSSGTDKVFSPKSNLQYKMYKTPIFLNEVLVKLPTDPSGDEPIFHISHIDRVYTLRAESINERTAWVQKIKAASELYIETEKKKREKAYLVRSQRATGIGRLMVNVVEGIELKPCRSHGKSNPYCEVTMGSQCHITKTIQDTLNPKWNSNCQFFIRDLEQEVLCITVFERDQFSPDDFLGRTEIRVADIKKDQGSKGPVTKCLLLHEVPTGEIVVRLDLQLFDEP

SEQ ID NO: 10765 - protein, 323 aa, Homo sapiens
MGNLLKVLTREIENYPHFFLDFENAQPTEGEREIWNQISAVLQDSESILADLQAYKGAGPEIRDAIQNPNDIQLQEKAWNAVCPLVVRLKRFYEFSIRLEKALQSLLESLTCPPYTPTQHLEREQALAKEFAEILHFTLRFDELKMRNPAIQNDFSYYRRTISRNRINNMHLDIENEVNNEMANRMSLFYAEATPMLKTLSNATMHFVSENKTLPIENTTDCLSTMTSVCKVMLETPEYRSRFTSEETLMFCMRVMVGVIILYDHVHPVGAFCKTSKIDMKGCIKVLKEQAPDSVEGLLNALRFTTKHLNDESTSKQIRAMLQ

SEQ ID NO: 10766 - protein, 82 aa, Homo sapiens
MKALCLLLLPVLGLLVSSKTLCSMEEAINERIQEVAGSLSFAVTGCTCGSACGSWDVRAETTCHCQCAGMDWTGARCCRVQP

SEQ ID NO: 10767 - protein, 605 aa, Homo sapiens
MVLCPVIGKLLHKRVVLASASPRRQEILSNAGLRFEVVPSKFKEKLDKASFATPYGYAMETAKQKALEVANRLYQTVGGLILEKPVDKQDAYRMLSRLSGREHSVFTGVAIVHCSSKDHQLDTRVSEFYEETKVKFSELSEELLWEYVHSGEPMDKAGGYGIQALGGMLVESVHGDFLNVVGFPLNHFCKQLVKLYYPPRPEDLRRSVKHDSIPAADTFEDLSDVEGGGSEPTQRDAGSRDEKAEAGEAGQATAEAECHRTRETLPPFPTRLLELIEGFMLSKGLLTACKLKVFDLLKDEAPQKAADIASKVDASACGMERLLDICAAMGLLEKTEQGYSNTETANVYLASDGEYSLHGFIMHNNDLTWNLFTYLEFAIREGTNQHHRALGKKAEDLFQDAYYQSPETRLRFMRAMHGMTKLTACQVATAFNLSRFSSACDVGGCTGALARELAREYPRMQVTVFDLPDIIELAAHFQPPGPQAVQIHFAAGDFFRDPLPSAELYVLCRILHDWPDDKVHKLLSRVAESCKPGAGLLLVETLLDEEKRVAQRALMQSLNMLVQTEGKERSLGEYQCLLELHGFHQVQVVHLGGVLDAILATKVAP

SEQ ID NO: 10768 - protein, 1020 aa, Homo sapiens
MQSCARAWGLRLGRGVGGGRRLAGGSGPCWAPRSRDSSSGGGDSAAAGASRLLERLLPRHDDFARRHIGPGDKDQREMLQTLGLASIDELIEKTVPANIRLKRPLKMEDPVCENEILATLHAISSKNQIWRSYIGMGYYNCSVPQTILRNLLENSGWITQYTPYQPEVSQGRLESLLNYQTMVCDITGLDMANASLLDEGTAAAEALQLCYRHNKRRKFLVDPRCHPQTIAVVQTRAKYTGVLTELKLPCEMDFSGKDVSGVLFQYPDTEGKVEDFTELVERAHQSGSLACCATDLLALCILRPPGEFGVDIALGSSQRFGVPLGYGGPHAAFFAVRESLVRMMPGRMVGVTRDATGKEVYRLALQTREQHIRRDKATSNICTAQALLANMAAMFAIYHGSHGLEHIARRVHNATLILSEGLKRAGHQLQHDLFFDTLKIQCGCSVKEVLGRAAQRQINFRLFEDGTLGISLDETVNEKDLDDLLWIFGCESSAELVAESMGEECRGIPGSVFKRTSPFLTHQVFNSYHSETNIVRYMKKLENKDISLVHSMIPLGSCTMKLNSSSELAPITWKEFANIHPFVPLDQAQGYQQLFRELEKDLCELTGYDQVCFQPNSGAQGEYAGLATIRAYLNQKGEGHRTVCLIPKSAHGTNPASAHMAGMKIQPVEVDKYGNIDAVHLKAMVDKHKENLAAIMITYPSTNGVFEENISDVCDLIHQHGGQVYLDGANMNAQVGICRPGDFGSDVSHLNLHKTFCIPHGGGGPGMGPIGVKKHLAPFLPNHPVISLKRNEDACPVGTVSAAPWGSSSILPISWAYIKMMGGKGLKQATETAILNANYMAKRLETHYRILFRGARGYVGHEFILDTRPFKKSANIEAVDVAKRLQDYGFHAPTMSWPVAGTLMVEPTESEDKAELDRFCDAMISIRQEIADIEEGRIDPRVNPLKMSPHSLTCVTSSHWDRPYSREVAAFPLPFVKPENKFWPTIARIDDIYGDQHLVCTCPPMEVYESPFSEQKRASS

SEQ ID NO: 10769 - protein, 2701 aa, Homo sapiens
MTEKMSSFLYIGDIVSLYAEGSVNGFISTLGLVDDRCVVHPEAGDLANPPKKFRDCLFKVCPMNRYSAQKQYWKAKQAKQGNHTEAALLKKLQHAAELEQKQNESENKKLLGEIVKYSNVIQLLHIKSNKYLTVNKRLPALLEKNAMRVSLDAAGNEGSWFYIHPFWKLRSEGDNIVVGDKVVLMPVNAGQPLHASNIELLDNPGCKEVNAVNCNTSWKITLFMKYSSYREDVLKGGDVVRLFHAEQEKFLTCDEYEKKQHIFLRTTLRQSATSATSSKALWEIEVVHHDPCRGGAGQWNSLFRFKHLATGNYLAAELNPDYRDAQNEGKNVRDGVPPTSKKKRQAGEKIMYTLVSVPHGNDIASLFELDATTLQRADCLVPRNSYVRLRHLCTNTWVTSTSIPIDTDEERPVMLKIGTCQTKEDKEAFAIVSVPLSEVRDLDFANDANKVLATTVKKLENGTITQNERRFVTKLLEDLIFFVADVPNNGQEVLDVVITKPNRERQKLMREQNILAQVFGILKAPFKEKAGEGSMLRLEDLGDQRYAPYKYMLRLCYRVLRHSQQDYRKNQEYIAKNFCVMQSQIGYDILAEDTITALLHNNRKLLEKHITAKEIETFVSLLRRNREPRFLDYLSDLCVSNTTAIPVTQELICKFMLSPGNADILIQTKVVSMQADNPMESSILSDDIDDEEVWLYWIDSNKEPHGKAIRHLAQEAKEGTKADLEVLTYYRYQLNLFARMCLDRQYLAINQISTQLSVDLILRCVSDESLPFDLRASFCRLMLHMHVDRDPQESVVPVRYARLWTEIPTKITIHEYDSITDSSRNDMKRKFALTMEFVEEYLKEVVNQPFPFGDKEKNKLTFEVVHLARNLIYFGFYSFSELLRLTRTLLAILDIVQAPMSSYFERLSKFQDGGNNVMRTIHGVGEMMTQMVLSRGSIFPMSVPDVPPSIHPSKQGSPTEHEDVTVMDTKLKIIEILQFILSVRLDYRISYMLSIYKKEFGEDNDNAETSASGSPDTLLPSAIVPDIDEIAAQAETMFAGRKEKNPVQLDDEGGRTFLRVLIHLIMHDYPPLLSGALQLLFKHFSQRAEVLQAFKQVQLLVSNQDVDNYKQIKADLDQLRLTVEKSELWVEKSSNYENGEIGESQVKGGEEPIEESNILSPVQDGTKKPQIDSNKSNNYRIVKEILIRLSKLCVQNKKCRNQHQRLLKNMGAHSVVLDLLQIPYEKNDEKMNEVMNLAHTFLQNFCRGNPQNQVLLHKHLNLFLTPGLLEAETMRHIFMNNYHLCNEISERVVQHFVHCIETHGRHVEYLRFLQTIVKADGKYVKKCQDMVMTELINGGEDVLIFYNDRASFPILLHMMCSERDRGDESGPLAYHITLVELLAACTEGKNVYTEIKCNSLLPLDDIVRVVTHDDCIPEVKIAYVNFVNHCYVDTEVEMKEIYTSNHIWKLFENFLVDMARVCNTTTDRKHADIFLEKCVTESIMNIVSGFFNSPFSDNSTSLQTHQPVFIQLLQSAFRIYNCTWPNPAQKASVESCIRTLAEVAKNRGIAIPVDLDSQVNTLFMKSHSNMVQRAAMGWRLSARSGPRFKEALGGPAWDYRNIIEKLQDVVASLEHQFSPMMQAEFSVLVDVLYSPELLFPEGSDARIRCGAFMSKLINHTKKLMEKEEKLCIKILQTLREMLEKKDSFVEEGNTLRKILLNRYFKGDYSIGVNGHLSGAYSKTAQVGGSFSGQDSDKMGISMSDIQCLLDKEGASELVIDVIVNTKNDRIFSEGIFLGIALLEGGNTQTQYSFYQQLHEQKKSEKFFKVLYDRMKAAQKEIRSTVTVNTIDLGNKKRDDDNELMTSGPRMRVRDSTLHLKEGMKGQLTEASSATSKAYCVYRREMDPEIDIMCTGPEAGNTEEKSAEEVTMSPAIAIMQPILRFLQLLCENHNRELQNFLRNQNNKTNYNLVCETLQFLDCICGSTTGGLGLLGLYINEKNVALVNQNLESLTEYCQGPCHENQTCIATHESNGIDIIIALILNDINPLGKYRMDLVLQLKNNASKLLLAIMESRHDSENAERILFNMRPRELVDVMKNAYNQGLECDHGDDEGGDDGVSPKDVGHNIYILAHQLARHNKLLQQMLKPGSDPDEGDEALKYYANHTAQIEIVRHDRTMEQIVFPVPNICEYLTRESKCRVFNTTERDEQGSKVNDFFQQTEDLYNEMKWQKKIRNNPALFWFSRHISLWGSISFNLAVFINLAVALFYPFGDDGDEGTLSPLFSVLLWIAVAICTSMLFFFSKPVGIRPFLVSIMLRSIYTIGLGPTLILLGAANLCNKIVFLVSFVGNRGTFTRGYRAVILDMAFLYHVAYVLVCMLGLFVHEFFYSFLLFDLVYREETLLNVIKSVTRNGRSIILTAVLALILVYLFSIIGFLFLKDDFTMEVDRLKNRTPVTGSHQVPTMTLTTMMEACAKENCSPTIPASNTADEEYEDGIERTCDTLLMCIVTVLNQGLRNGGGVGDVLRRPSKDEPLFAARVVYDLLFYFIVIIIVLNLIFGVIIDTFADLRSEKQKKEEILKTTCFICGLERDKFDNKTVSFEEHIKSEHNMWHYLYFIVLVKVKDPTEYTGPESYVAQMIVEKNLDWFPRMRAMSLVSNEGDSEQNEIRSLQEKLESTMSLVKQLSGQLAELKEQMTEQRKNKQRLGFLGSNTPHVNHHMPPH

SEQ ID NO: 10770 - protein, 390 aa, Homo sapiens
MPHLMERMVGSGLLWLALVSCILTQASAVQRVPRDPSTVEDKCEKACRPEEECLALNSTWGCFCRQDLNSSDVHSLQPQLDCGPREIKVKVDKCLLGGLGLGEEVIAYLRDPNCSSILQTEERNWVSVTSPVQASACRNILERNQTHAIYKNTLSLVNDFIIRDTILNINFQCAYPLDMKVSLQAALQPIVSSLNVSVDGNGEFIVRMALFQDQNYTNPYEGDAVELSVESVLYVGAILEQGDTSRFNLVLRNCYATPTEDKADLVKYFIIRNSCSNQRDSTIHVEENGQSSESRFSVQMFMFAGHYDLVFLHCEIHLCDSLNEQCQPSCSRSQVRSEVPAIDLARVLDLGPITRRGAQSPGVMNGTPSTAGFLVAWPMVLLTVLLAWLF

SEQ ID NO: 10771 - protein, 537 aa, Homo sapiens
MPHLMERMVGSGLLWLALVSCILTQASAVQRGYGNPIEASSYGLDLDCGAPGTPEAHVCFDPCQNYTLLDEPFRSTENSAGSQGCDKNMSGWYRFVGEGGVRMSETCVQVHRCQTDAPMWLNGTHPALGDGITNHTACAHWSGNCCFWKTEVLVKACPGGYHVYRLEGTPWCNLRYCTVPRDPSTVEDKCEKACRPEEECLALNSTWGCFCRQDLNSSDVHSLQPQLDCGPREIKVKVDKCLLGGLGLGEEVIAYLRDPNCSSILQTEERNWVSVTSPVQASACRNILERNQTHAIYKNTLSLVNDFIIRDTILNINFQCAYPLDMKVSLQAALQPIVSSLNVSVDGNGEFIVRMALFQDQNYTNPYEGDAVELSVESVLYVGAILEQGDTSRFNLVLRNCYATPTEDKADLVKYFIIRNSCSNQRDSTIHVEENGQSSESRFSVQMFMFAGHYDLVFLHCEIHLCDSLNEQCQPSCSRSQVRSEVPAIDLARVLDLGPITRRGAQSPGVMNGTPSTAGFLVAWPMVLLTVLLAWLF

SEQ ID NO: 10772 - protein, 519 aa, Homo sapiens
MEWKLERTAPRRVRTEEEMLWESIMRVLSKDLKQKRSQDSANVLDSVNATYSDFKSNFAKRLSAEVPVASSPITTRWQQSQTRALSSDSFGEEQSTTYLPEASGSVLKTPPEKETLTLGSRKEQLKTPSKGISETSNSALHFCKAPHAMDRDWKESVASKGQKCLKQLFVTQNVVQQANGKMQLCEQSECVWKGCKDGVRDESFHLKSSGDINDSILQPEVKIHITGLRNDYYLNILDWSFQNLVAIALGSAVYIWNGENHNGIENIDLSLTCNYISSVSWIKEGTCLAVGTSEGEVQLWDVVTKKRLRNMLGHLSVVGALSWNHFILSSGSRLGRVYHHDVRVAQHHVGTLRHKQAVCALKWSPDGRLLSSGCSDGLLTIWPHDPGASAQGQPLKVITQSTAVKAMDWCPWQSGVLAIGGGMKDGRLHILDINAGKSIQTPSTNSQICSLIWLPKTKEIATGQGTPKNDVTVWTCPTVSRSGGFFGHRGRVLHLSLSPDQTRVFSAAADGTASVWNCY

SEQ ID NO: 10773 - protein, 642 aa, Homo sapiens
MSSKRPASPYGEADGEVAMVTSRQKVEEEESDGLPAFHLPLHVSFPNKPHSEEFQPVSLLTQETCGHRTPTSQHNTMEVDGNKVMSSFAPHNSSTSPQKAEEGGRQSGESLSSTALGTPERRKGSLADVVDTLKQRKMEELIKNEPEETPSIEKLLSKDWKDKLLAMGSGNFGEIKGTPESLAEKERQLMGMINQLTSLREQLLAAHDEQKKLAASQIEKQRQQMELAKQQQEQIARQQQQLLQQQHKINLLQQQIQVQGQLPPLMIPVFPPDQRTLAAAAQQGFLLPPGFSYKAGCSDPYPVQLIPTTMAAAAAATPGLGPLQLQQLYAAQLAAMQVSPGGKLPGIPQGNLGAAVSPTSIHTDKSTNSPPPKSKEKTTLESLTQQLAVKQNEEGKFSHAMMDFNLSGDSDGSAGVSESRIYRESRGRGSNEPHIKRPMNAFMVWAKDERRKILQAFPDMHNSNISKILGSRWKAMTNLEKQPYYEEQARLSKQHLEKYPDYKYKPRPKRTCLVDGKKLRIGEYKAIMRNRRQEMRQYFNVGQQAQIPIATAGVVYPGAIAMAGMPSPHLPSEHSSVSSSPEPGMPVIQSTYGVKGEEPHIKEEIQAEDINGEIYDEYDEEEDDPDVDYGSDSENHIAGQAN

SEQ ID NO: 10774 - protein, 1012 aa, Homo sapiens
MEEYEKFCEKSLARIQEASLSTESFLPAQSESISLIRFHGVAILSPLLNIEKRKEMQQEKQKALDVEARKQVNRKKALLTRVQEILDNVQVRKAPNASDFDQWEMETVYSNSEVRNLNVPATFPNSFPSHTEHSTAAKLDKIAGILPLDNEDQCKTDGIDLARDSEGFNSPKQCDSSNISHVENEAFPKTSSATPQETLISDGPFSVNEQQDLPLLAEVIPDPYVMSLQNLMKKSKEYIEREQSRRSLRGSINRIVNESHLDKEHDAVEVADCVKEKGQLTGKHCVSVIPDKPSLNKSNVLLQGASTQASSMSMPVLASFSKVDIPIRTGHPTVLESNSDFKVIPTFVTENNVIKSLTGSYAKLPSPEPSMSPKMHRRRSRTSSACHILINNPINACELSPKGKEQAMDLIIQDTDENTNVPEIMPKLPTDLAGVCSSKVYVGKNTSEVKEDVVLGKSNQVCQSSGNHLENKVTHGLVTVEGQLTSDERGAHIMNSTCAAMPKLHEPYASSQCIASPNFGTVSGLKPASMLEKNCSLQTELNKSYDVKNPSPLLMQNQNTRQQMDTPMVSCGNEQFLDNSFEKVKRRLDLDIDGLQKENCPYVITSGITEQERQHLPEKRYPKGSGFVNKNKMLGTSSKESEELLKSKMLAFEEMRKRLEEQHAQQLSLLIAEQEREQERLQKEIEEQEKMLKEKKAMTAEASELDINNAVELEWRKISDSSLLETMLSQADSLHTSNSNSSGFTNSAMQYSFVSANEAPFYLWGSSTSGLTKLSVTRPFGRAKTRWSQVFSLEIQAKFNKITAVAKGFLTRRLMQTDKLKQLRQTVKDTMEFIRSFQSEAPLKRGIVSAQDASLQERVLAQLRAALYGIHDIFFVMDAAERMSILHHDREVRKEKMLRQMDKMKSPRVALSAATQKSLDRKKYMKAAEMGMPNKKFLVKQNPSETRVLQPNQGQNAPVHRLLSRQGTPKTSVKGVVQNRQKPSQSRVPNRVPVSGVYAGKIQRKRPNVATI

SEQ ID NO: 10775 - protein, 867 aa, Homo sapiens
MRGFNLLLFWGCCVMHSWEGHIRPTRKPNTKGNNCRDSTLCPAYATCTNTVDSYYCACKQGFLSSNGQNHFKDPGVRCKDINECLTSSVCPEHSDCVNSMGSYSCSCQVGFISRNSTCEDVDECADPRACPEHATCNNTVGNYSCFCNPGFESSSGHLSFQGLKASCEDIDECTEMCPINSTCTNTPGSYFCTCHPGFAPSNGQLNFTDQGVECRDIDECRQDPSTCGPNSICTNALGSYSCGCIAGFHPNPEGSQKDGNFSCQRVLFKCKEDVIPDNKQIQQCQEGTAVKPAYVSFCAQINNIFSVLDKVCENKTTVVSLKNTTESFVPVLKQISTWTKFTKEETSSLATVFLESVESMTLASFWKPSANITPAVRTEYLDIESKVINKECSEENVTLDLVAKGDKMKIGCSTIEESESTETTGVAFVSFVGMESVLNERFFKDHQAPLTTSEIKLKMNSRVVGGIMTGEKKDGFSDPIIYTLENIQPKQKFERPICVSWSTDVKGGRWTSFGCVILEASETYTICSCNQMANLAVIMASGELTMDFSLYIISHVGIIISLVCLVLAIATFLLCRSIRNHNTYLHLHLCVCLLLAKTLFLAGIHKTDNKMGCAIIAGFLHYLFLACFFWMLVEAVILFLMVRNLKVVNYFSSRNIKMLHICAFGYGLPMLVVVISASVQPQGYGMHNRCWLNTETGFIWSFLGPVCTVIVVSKYYNSLAKCVLKEEQGDLRDLEFPGTCAAERINSLLLTWTLWILRQRLSSVNAEVSTLKDTRLLTFKAFAQLFILGCSWVLGIFQIGPVAGVMAYLFTIINSLQGAFIFLIHCLLNGQVREEYKRWITGKTKPSSQSQTSRILLSSMPSASKTG

SEQ ID NO: 10776 - protein, 745 aa, Homo sapiens
MRGFNLLLFWGCCVMHSWEGHIRPTRKPNTKGNNCRDSTLCPAYATCTNTVDSYYCACKQGFLSSNGQNHFKDPGVRCKDIDECTEMCPINSTCTNTPGSYFCTCHPGFAPSNGQLNFTDQGVECRDIDECRQDPSTCGPNSICTNALGSYSCGCIAGFHPNPEGSQKDGNFSCQRVLFKCKEDVIPDNKQIQQCQEGTAVKPAYVSFCAQINNIFSVLDKVCENKTTVVSLKNTTESFVPVLKQISTWTKFTKEETSSLATVFLESVESMTLASFWKPSANITPAVRTEYLDIESKVINKECSEENVTLDLVAKGDKMKIGCSTIEESESTETTGVAFVSFVGMESVLNERFFKDHQAPLTTSEIKLKMNSRVVGGIMTGEKKDGFSDPIIYTLENIQPKQKFERPICVSWSTDVKGGRWTSFGCVILEASETYTICSCNQMANLAVIMASGELTMDFSLYIISHVGIIISLVCLVLAIATFLLCRSIRNHNTYLHLHLCVCLLLAKTLFLAGIHKTDNKMGCAIIAGFLHYLFLACFFWMLVEAVILFLMVRNLKVVNYFSSRNIKMLHICAFGYGLPMLVVVISASVQPQGYGMHNRCWLNTETGFIWSFLGPVCTVIVINSLLLTWTLWILRQRLSSVNAEVSTLKDTRLLTFKAFAQLFILGCSWVLGIFQIGPVAGVMAYLFTIINSLQGAFIFLIHCLLNGQVREEYKRWITGKTKPSSQSQTSRILLSSMPSASKTG

SEQ ID NO: 10777 - protein, 948 aa, Homo sapiens
MSAYYRNNWSEEDPDYPDYSGSQNRTQGYLKTQGYPDVPGPLNNPDYPGTRSNPYSVASRTRPDYPGSLAEPNYPRSLSNPDYSGTRSNAYSAASRTSPDHPTSLPEPDYSEFQSHPYHRASSRQPDYPGSQRNPDFAGSSSSGNYAGSRTHPDHFGSLEPDYPGAQSNSDHPGPRANLNHPGSRKNLEHTSFRINPYADSLGKPDYPGADIQPNSPPFFGEPDYPSAEDNQNLPSTWREPDYSDAENGHDYGSSETPKMTRGVLSRTSSIQPSFRHRSDDPVGSLWGENDYPEGIEMASMEMANSYGHSLPGAPGSGYVNPAYVGESGPVHAYGNPPLSECDWHKSPQGQKLIASLIPMTSRDRIKAIRNQPRTMEEKRNLRKIVDKEKSKQTHRILQLNCCIQCLNSISRAYRRSKNSLSEILNSISLWQKTLKIIGGKFGTSVLSYFNFLRWLLKFNIFSFILNFSFIIIPQFTVAKKNTLQFTGLEFFTGVGYFRDTVMYYGFYTNSTIQHGNSGASYNMQLAYIFTIGACLTTCFFSLLFSMAKYFRNNFINPHIYSGGITKLIFCWDFTVTHEKAVKLKQKNLSTEIRENLSELRQENSKLTFNQLLTRFSAYMVAWVVSTGVAIACCAAVYYLAEYNLEFLKTHSNPGAVLLLPFVVSCINLAVPCIYSMFRLVERYEMPRHEVYVLLIRNIFLKISIIGILCYYWLNTVALSGEECWETLIGQDIYRLLLMDFVFSLVNSFLGEFLRRIIGMQLITSLGLQEFDIARNVLELIYAQTLVWIGIFFCPLLPFIQMIMLFIMFYSKNISLMMNFQPPSKAWRASQMMTFFIFLLFFPSFTGVLCTLAITIWRIITYLYWQITEGRKIMIRLLHEQIINEGKDKMFLIEKLIKLQDMEKKANPSSLVLERREVEQQGFLHLGEHDGSLDLRSRRSVQEGNPRA

SEQ ID NO: 10778 - protein, 1189 aa, Homo sapiens
MESTPSFLKGTPTWEKTAPENGIVRQEPGSPPRDGLHHGPLCLGEPAPFWRGVLSTPDSWLPPGFPQGPKDMLPLVEGEGPQNGERKVNWLGSKEGLRWKEAMLTHPLAFCGPACPPRCGPLMPEHSGGHLKSDPVAFRPWHCPFLLETKILERAPFWVPTCLPPYLVSGLPPEHPCDWPLTPHPWVYSGGQPKVPSAFSLGSKGFYYKDPSIPRLAKEPLAAAEPGLFGLNSGGHLQRAGEAERPSLHQRDGEMGAGRQQNPCPLFLGQPDTVPWTSWPACPPGLVHTLGNVWAGPGDGNLGYQLGPPATPRCPSPEPPVTQRGCCSSYPPTKGGGLGPCGKCQEGLEGGASGASEPSEEVNKASGPRACPPSHHTKLKKTWLTRHSEQFECPRGCPEVEERPVARLRALKRAGSPEVQGAMGSPAPKRPPDPFPGTAEQGAGGWQEVRDTSIGNKDVDSGQHDEQKGPQDGQASLQDPGLQDIPCLALPAKLAQCQSCAQAAGEGGGHACHSQQVRRSPLGGELQQEEDTATNSSSEEGPGSGPDSRLSTGLAKHLLSGLGDRLCRLLRREREALAWAQREGQGPAVTEDSPGIPRCCSRCHHGLFNTHWRCPRCSHRLCVACGRVAGTGRAREKAGFQEQSAEECTQEAGHAACSLMLTQFVSSQALAELSTAMHQVWVKFDIRGHCPCQADARVWAPGDAGQQKESTQKTPPTPQPSCNGDTHRTKSIKEETPDSAETPAEDRAGRGPLPCPSLCELLASTAVKLCLGHERIHMAFAPVTPALPSDDRITNILDSIIAQVVERKIQEKALGPGLRAGPGLRKGLGLPLSPVRPRLPPPGALLWLQEPQPCPRRGFHLFQEHWRQGQPVLVSGIQRTLQGNLWGTEALGALGGQVQALSPLGPPQPSSLGSTTFWEGFSWPELRPKSDEGSVLLLHRALGDEDTSRVENLAASLPLPEYCALHGKLNLASYLPPGLALRPLEPQLWAAYGVSPHRGHLGTKNLCVEVADLVSILVHADTPLPAWHRAQKDFLSGLDGEGLWSPGSQVSTVWHVFRAQDAQRIRRFLQMVCPAGAGALEPGAPGSCYLDAGLRRRLREEWGVSCWTLLQAPGEAVLVPAGAPHQVQGLVSTVSVTQHFLSPETSALSAQLCHQGPSLPPDCHLLYAQMDWAVFQAVKVAVGTLQEAK

SEQ ID NO: 10779 - protein, 625 aa, Homo sapiens
MAGIRVTKVDWQRSRNGAAHHTQEYPCPELVVRRGQSFSLTLELSRALDCEEILIFTMETGPRASEALHTKAVFQTSELERGEGWTAAREAQMEKTLTVSLASPPSAVIGRYLLSIRLSSHRKHSNRRLGEFVLLFNPWCAEDDVFLASEEERQEYVLSDSGIIFRGVEKHIRAQGWNYGQFEEDILNICLSILDRSPGHQNNPATDVSCRHNPIYVTRVISAMVNSNNDRGVVQGQWQGKYGGGTSPLHWRGSVAILQKWLKGRYKPVKYGQCWVFAGVLCTVLRCLGIATRVVSNFNSAHDTDQNLSVDKYVDSFGRTLEDLTEDSMWNFHVWNESWFARQDLGPSYNGWQVLDATPQEESEGVFRCGPASVTAIREGDVHLAHDGPFVFAEVNADYITWLWHEDESRERVYSNTKKIGRCISTKAVGSDSRVDITDLYKYPEGSRKERQVYSKAVNRLFGVEASGRRIWIRRAGGRCLWRDDLLEPATKPSIAGKFKVLEPPMLGHDLRLALCLANLTSRAQRVRVNLSGATILYTRKPVAEILHESHAVRLGPQEEKRIPITISYSKYKEDLTEDKKILLAAMCLVTKGEKLLVEKDITLEDFITIKRAYPGASGEGLSPV

SEQ ID NO: 10780 - protein, 318 aa, Homo sapiens
MAAAAAAAAEQQSSNGPVKKSMREKAVERRSVNKEHNSNFKAGYIPIDEDRLHKTGLRGRKGNLAICVIILLFILAVINLIITLVIWAVIRIGPNGCDSMEFHESGLLRFKQVSDMGVIHPLYKSTVGGRRNENLVITGNNQPIVFQQGTTKLSVENNKTSITSDIGMQFFDPRTQNILFSTDYETHEFHLPSGVKSLNVQKASTERITSNATSDLNIKVDGRAIVRGNEGVFIMGKTIEFHMGGNMELKAENSIILNGSVMVSTTRLPSSSSGDQLGSGDWVRYKLCMCADGTLFKVQVTSQNMGCQISDNPCGNTH

SEQ ID NO: 10781 - protein, 296 aa, Homo sapiens
MSVGAMKKGVGRAVGLGGGSGCQATEEDPLPNCGACAPGQGGRRWRLPQPAWVEGSSARLWEQATGTGWMDLEASLLPTGPNASNTSDGPDNLTSAGSPPRTGSISYINIIMPSVFGTICLLGIIGNSTVIFAVVKKSKLHWCNNVPDIFIINLSFFLAFALPFVVITAAYVRILQRMTSSVAPASQRSIRLRTKRVTRTAIAICLVFFVCWAPYYVLQLTQLSISRPTLTFVYLYNAAISLGYANSCLNPFVYIVLCETFRKRLVLSVKPAAQGQLRAVSNAQTADEERTESKGT

SEQ ID NO: 10782 - protein, 270 aa, Homo sapiens
MKPKMKYSTNKISTAKWKNTASKALCFKLGKSQQKAKEVCPMYFMKLRSGLMIKKEACYFRRETTKRPSLKTGRKHKRHLVLAACQQQSTVECFAFGISGVQKYTRALHDSSITGISPITEYLASLSTYNDQSITFALEDESYEIYVEDLKKDEKKDKVLLSYYESQHPSNESGDGVDGKMLMVTLSPTKDFWLHANNKEHSVELHKCEKPLPDQAFFVLHNMHSNCVSFECKTDPGVFIGVKDNHLALIKVDSSENLCTENILFKLSET

SEQ ID NO: 10783 - protein, 334 aa, Homo sapiens
MNEDLKVNLSGLPRDYLDAAAAENISAAVSSRVPAVEPEPELVVNPWDIVLCTSGTLISCENAIVVLIIFHNPSLRAPMFLLIGSLALADLLAGIGLITNFVFAYLLQSEATKLVTIGLIVASFSASVCSLLAITVDRYLSLYYALTYHSERTVTFTYVMLVMLWGTSICLGLLPVMGWNCLRDESTCSVVRPLTKNNAAILSVSFLFMFALMLQLYIQICKIVMRHAHQIALQHHFLATSHYVTTRKGVSTLAIILGTFAACWMPFTLYSLIADYTYPSIYTYATLLPATYNSIINPVIYAFRNQEIQKALCLICCGCIPSSLAQRARSPSDV

SEQ ID NO: 10784 - protein, 535 aa, Homo sapiens
MSVHYTLNLRVFWPLVTGLCTALVCLYHVLRGSGGARAEPADGVDGGFPLLKVAVLLLLSYVLLRCRHAVRQRFLPGSPRLEGHAAFSSRHFREPGLSILLESYYEHEVRLSPHVLGHSKAHVSRIVGELVRAGRARGSPGLIPGGALALAFRGDFIQVGSAYEQHKIRRPDSFDVLVPLRLPPLVALEPRSLGEEPALAPAFRGCFLCALKAPPSPSGASGGHWLRDCKPFADAFCVDVRGRRHLSATLVLRWFQSHLQRSLATVRYSLEGRCRVTLTPGGLEQPPTLHILPCRTDYGCCRLSMAVRLIPAVHLGDGVFLVAPPPPPLPSAPLLELPEGLRAEALWGVNTARQEQKLLSWLQERAAPGACYLKCLQLLKALRDLGARGLDSAAATQWGRILSSYVLKTVLLAVLLRKGAPGQGWDEEHLGRCLEELVQFLRDCLLRRHTLFHCVLGPGGAAAEVGPLPKALREAAPVDLLAAFDGHARELAAARLLSTWQRLPQLLRAYGGPRYLARCPPPRSQRTQGFLEGEP

SEQ ID NO: 10785 - protein, 693 aa, Homo sapiens
MAALGVQSINWQTAFNRQAHHTDKFSSQELILRRGQNFQVLMIMNKGLGSNERLEFIVSTGPYPSESAMTKAVFPLSNGSSGGWSAVLQASNGNTLTISISSPASAPIGRYTMALQIFSQGGISSVKLGTFILLFNPWLNVDSVFMGNHAEREEYVQEDAGIIFVGSTNRIGMIGWNFGQFEEDILSICLSILDRSLNFRRDAATDVASRNDPKYVGRVLSAMINSNDDNGVLAGNWSGTYTGGRDPRSWNGSVEILKNWKKSGFSPVRYGQCWVFAGTLNTALRSLGIPSRVITNFNSAHDTDRNLSVDVYYDPMGNPLDKGSDSVWNFHVWNEGWFVRSDLGPSYGGWQVLDATPQERSQGVFQCGPASVIGVREGDVQLNFDMPFIFAEVNADRITWLYDNTTGKQWKNSVNSHTIGRYISTKAVGSNARMDVTDKYKYPEGSDQERQVFQKALGKLKPNTPFAATSSMGLETEEQEPSIIGKLKVAGMLAVGKEVNLVLLLKNLSRDTKTVTVNMTAWTIIYNGTLVHEVWKDSATMSLDPEEEAEHPIKISYAQYEKYLKSDNMIRITAVCKVPDESEVVVERDIILDNPTLTLEVLNEARVRKPVNVQMLFSNPLDEPVRDCVLMVEGSGLLLGNLKIDVPTLGPKEGSRVRFDILPSRSGTKQLLADFSCNKFPAIKAMLSIDVAE

SEQ ID NO: 10786 - protein, 2073 aa, Homo sapiens
MSVPGTPGAMEPAGEEERPPPAAEGEDDEEEVAAAAQTSGPAHGRSASSLEDADDQEEEMEAMVIGGGCCKEQELTYELQQGYRILGEFLQEKHRGLTAPFLQPLGGVATAEEEVAEGPRSGGRGGRAFPQQPGQGMCLLQMEEKFASGQYGGITEFVADFRLMLETCYRLHGVDHWISKQGQKLEMMLEQKLALLSRHLREKTTIAVTSRGYYGLEDEKGTACTSTRRRSTPRSLAGLTSGVFESIMVQVLRQEEQLRAKEEKRLREQERKEAEEASQKEIEEWERKLLAQAAPTCMETMWEIPAIGHFLCLAQQILNLPEIVFYELERCLLMPQCNAFLSKIMTSLLSPPHRRPTLHRRPTLPYRTWEAALRQKVQQWYTAVGQTENPDNCAEKLGLCPQFFKVLGEVNPLEEKPFHELPFYQKVWLLKGLCDFVYETQKEVQDAVLGQPIHECREVILGYDYLENAYVHFPQFCGADVRIYKQRPFQAPEFPIPPIKIQRVPRIKLEKLKCDYVSTSNGEHRCSRDSLPSSFKKEQENNFDPACCPAKMILDNHDISVEMGVKSNYEIRIRRPCEIKKTDCCKENLEKPRSPGEVTGFGEPLSPGEIRFIENQEKYGEASRIKIEPSPLKENTLKSCQIHVNGSHSDHPEINCHKVVRDILLEQSLQSHKKLKLTKMRAKKKKKKKKKLKDVLNENLQRKREGLHSLAFKSYKPEIQNKLLIIKKKAKHKKHKSGKKSVSKKAITKKRKTVIKSPTVPEFQGKWYHRRQAVKELHSTLIRLLNELLPWEPKLMKAFQRNRSRLKKDYDDFRRQPDHDTFNRELWTTDEGEGDLGKDSPKGEISKSIDSTEPLDILEKDHFDSDDMKLSEIDFPMARSKLLKKELPSKDLPKTLLKTLKRQSKQTDYVDDSTKELSPRKKAKLSTNETTVENLESDVQIDCFSESKHTEPSFPESFASLDSVPVSTLQKGTKPIQALLAKNIGNKVTLTNQLPPSTGRNALAVEKPVLSPPEASPIKPALTCHTNTKGPLQMVYKMPCGQWLPIDLQNSSVKIQVQPMVDPKTGEKIMQQVLILPKNFVIQHKEGKAVAKEVPPLQQKGTEQHCSSFPQTTNINSSLASVFVNSPGTVSTQLPNTAFNKTITPLSNISSARPQPLSPVTSVSNLLTPSVKTSQSEAGKAKNAVSAATFSLPSASPTISSTGQPLSSTTTLNGSTNPGSSFNCFAQQTADSSEAKQELKTVCIRDSQSILVRTRGGNTGVVKVQTNPDQNSPNTVSSSSVFTFAPQLQAFLVPKSTTSSSAFSPVAGTTTTSSLSPFSQTPTSVSIPASFAPSMGKNLKLTLGHTTGSGDLGHVIDKTSHMPSSPLKSSICSSTLLPSTTSSSVSVISISAANFGQNNANIIHTPTKQQQVDYITKSYPVTRSEATAATNGDVISGTPVQKLMLVSAPSILSSGNGTAINMTPALTSTGVSAQKLVFINAPVPSGTSTPTLVAESLKQTLPPPLHKAYVKTPEQPQIVLIPSTVGTPIKINSSPAVSQIKDVKIGLNIGQAIVNTSGTVPAIPSINILQNVTPKGEDKSSKGYILPLSTSGNSVPVSSNFVSQNITPVNESVVSSARAVNVLSVTGANLSLGSFPVTSASASAGAQPPVLVSGNDTSSRIMPILSNRLCSSSLGNTVAISTVKTGHLASSVLISTTQPVVSPKCLTSALQIPVTVALPTPATTSPKIINTVPHSAAVPGATRSVSISKRQSRTSLQFHSPGISTTVPTNVNTNKPQTELSSLSTSPGKITNTSNFASLPNQQALVKTPSYSSAPGGTTIHTASAPSNVTSLVGSQFSEPCIQQKIVINTSTPLAPGTQIMINGTRFIVPPQGLGAGSHVLLISTNPKYGAPLVLNSGQGIQSTPIDNSAQKITLASNNSLSGQPLQHPLRSPTKFINSFGNASSIPTVHTSPQLINTTAKVPVPPPVPTVSLTSVIKSPATLLAKTSLVSAICPSNPPLPSSTSVFHLDPPVKKLLVSPEGAILNTINTPASKVSSLSPSLSQIVVSASRSPASVFPAFQSSGLEKPDRAAS

SEQ ID NO: 10787 - protein, 207 aa, Homo sapiens
MHSFVRTCKKLREEEAARLFYQIASAVAHCHDGGLVLRDLKLRKFIFKDEERTRVKLESLEDAYILRGDDDSLSDKHGCPAYVSPEILNTSGSYSGKAADVWSLGVMLYTMLVGRYPFHDIEPSSLFSKIRRGQFNIPETLSPKAKCLIRSILRREPSERLTSQEILDHPWFSTDFSVSNSAYGAKEVSDQLVPDVNMEENLDPFFN

SEQ ID NO: 10788 - protein, 300 aa, Homo sapiens
MVLLWLTLLLIALPCLLQTKEGGKPWAGAENLTCWIHDVDFLSCSWAVGPGAPADVQYDLYLNVANRRQQYECLHYKTDAQGTRIGCRFDDISRLSSGSQSSHILVRGRSAAFGIPCTDKFVVFSQIEILTPPNMTAKCNKTHSFMHWKMRSHFNRKFRYELQIQKRMQPVITEQVRDRTSFQLLNPGTYTVQIRARERVYEFLSAWSTPQRFECDQEEGANTRAWRTSLLIALGTLLALVCVFVICRRYLVMQRLFPRIPHMKDPIGDSFQNDKLVVWEAGKAGLEECLVTEVQVVQKT

SEQ ID NO: 10789 - protein, 118 aa, Homo sapiens
MPREDAHFIYGYPKKGHGHSYTTAEEAAGIGILTVILGVLLLIGCWYCRRRNGYRALMDKSLHVGTQCALTRRCPQEGFDHRDSKVSLQEKNCEPVVPNAPPAYEKLSAEQSPPPYSP

SEQ ID NO: 10790 - protein, 801 aa, Homo sapiens
MESRAEGGSPAVFDWFFEAACPASLQEDPPILRQFPPDFRDQEAMQMVPKFCFPFDVEREPPSPAVQHFTFALTDLAGNRRFGFCRLRAGTQSCLCILSHLPWFEVFYKLLNTVGDLLAQDQVTEAEELLQNLFQQSLSGPQASVGLELGSGVTVSSGQGIPPPTRGNSKPLSCFVAPDSGRLPSIPENRNLTELVVAVTDENIVGLFAALLAERRVLLTASKLSTLTSCVHASCALLYPMRWEHVLIPTLPPHLLDYCCAPMPYLIGVHASLAERVREKALEDVVVLNVDANTLETTFNDVQALPPDVVSLLRLRLRKVALAPGEGVSRLFLKAQALLFGGYRDALVCSPGQPVTFSEEVFLAQKPGAPLQAFHRRAVHLQLFKQFIEARLEKLNKGEGFSDQFEQEITGCGASSGALRSYQLWADNLKKGGGALLHSVKAKTQPAVKNMYRSAKSGLKGVQSLLMYKDGDSVLQRGGSLRAPALPSRSDRLQQRLPITQHFGKNRPLRPSRRRQLEEGTSEPPGAGTPPLSPEDEGCPWAEEALDSSFLGSGEELDLLSEILDSLSMGAKSAGSLRPSQSLDCCHRGDLDSCFSLPNIPRWQPDDKKLPEPEPQPLSLPSLQNASSLDATSSSKDSRSQLIPSESDQEVTSPSQSSTASADPSIWGDPKPSPLTEPLILHLTPSHKAAEDSTAQENPTPWLSTAPTEPSPPESPQILAPTKPNFDIAWTSQPLDPSSDPSSLEDPRARPPKALLAERAHLQPREEPGALNSPATPTSNCQKSQPSSRPRVADLKKCFEG

SEQ ID NO: 10791 - protein, 457 aa, Homo sapiens
MGNSYAGQLKTTRFEEVLHNSIEASLRSNNLVPRPIFSQLYLEAEQQLAALEGGSRVDNEEEEEEGEGGLETNGPPNPFQLHPLPEGCCTTDGFCQAGKDLRLVSISNEPMDVPAGFLLVGVKSPSLPDHLLVCAVDKRFLPDDNGHNALLGFSGNCVGCGKKGFCYFTEFSNHINLKLTTQPKKQKHLKYYLVRNAQGTLTKGPLICWKGSEFRSRQIPASTCSSSLFPALESTAAFPSEPVPGTNPSILMGAQQAGPASDHPSLNAAMGPAVFNGKDSPKCQQLAKNNLLALPRPSALGILSNSGPPKKRHKGWSPESPSAPDGGCPQGGGNRAKYESAGMSCVPQVGLVGPASVTFPVVASGEPVSVPDNLLKICKAKPVIFKGHGNFPYLCGNLNDVVVSPLLYTCYQNSQSVSRAYEQYGASAIQPISEEMQLLLTVYYLVQLAHQIRNPDV

SEQ ID NO: 10792 - protein, 1537 aa, Homo sapiens
TELHFPSLAGDITQKGYEKKRSKLIGAYLPQPPRVDQALPQERRAPVTPSSASRYHRRRSSGSRDERYRSDVHTEAVQAALAKHKERKMAVPMPSKRRSLVVQTSMDAYTPPDTSSGSEDEGSVQGDSQGTPTSSQGSINMEHWISQAIHGSTTSTTSSSSTQSGGSGAAHRLADVMAQTHIENHSAPPDVTTYTSEHSIQVERPQGSTGSRTAPKYGNAELMETGDGVPVSSRVSAKIQQLVNTLKRPKRPPLREFFVDDFEELLEVQQPDPNQPKPEGAQMLAMRGEQLGVVTNWPPSLEAALQRWGTISPKAPCLTTMDTNGKPLYILTYGKLWTRSMKVAYSILHKLGTKQEPMVRPGDRVALVFPNNDPAAFMAAFYGCLLAEVVPVPIEVPLTRKDAGSQQIGFLLGSCGVTVALTSDACHKGLPKSPTGEIPQFKGWPKLLWFVTESKHLSKPPRDWFPHIKDANNDTAYIEYKTCKDGSVLGVTVTRTALLTHCQALTQACGYTEAETIVNVLDFKKDVGLWHGILTSVMNMMHVISIPYSLMKVNPLSWIQKVCQYKAKVACVKSRDMHWALVAHRDQRDINLSSLRMLIVADGANPWSISSCDAFLNVFQSKGLRQEVICPCASSPEALTVAIRRPTDDSNQPPGRGVLSMHGLTYGVIRVDSEEKLSVLTVQDVGLVMPGAIMCSVKPDGVPQLCRTDEIGELCVCAVATGTSYYGLSGMTKNTFEVFPMTSSGAPISEYPFIRTGLLGFVGPGGLVFVVGKMDGLMVVSGRRHNADDIVATALAVEPMKFVYRGRIAVFSVTVLHDERIVIVAEQRPDSTEEDSFQWMSRVLQAIDSIHQVGVYCLALVPANTLPKTPLGGIHLSETKQLFLEGSLHPCNVLMCPHTCVTNLPKPRQKQPEIGPASVMVGNLVSGKRIAQASGRDLGQIEDNDQARKFLFLSEVLQWRAQTTPDHILYTLLNCRGAIANSLTCVQLHKRAEKIAVMLMERGHLQDGDHVALVYPPGIDLIAAFYGCLYAGCVPITVRPPHPQNIATTLPTVKMIVEVSRSACLMTTQLICKLLRSREAAAAVDVRTWPLILDTDDLPKKRPAQICKPCNPDTLAYLDFSVSTTGMLAGVKMSHAATSAFCRSIKLQCELYPSREVAICLDPYCGLGFVLWCLCSVYSGHQSILIPPSELETNPALWLLAVSQYKVRDTFCSYSVMELCTKGLGSQTESLKARGLDLSRVRTCVVVAEERPRIALTQSFSKLFKDLGLHPRAVSTSFGCRVNLAICLQGTSGPDPTTVYVDMRALRHDRVRLVERGSPHSLPLMESGKILPGVRIIIANPETKGPLGDSHLGEIWVHSAHNASGYFTIYGDESLQSDHFNSRLSFGDTQTIWARTGYLGFLRRTELTDANGERHDALYVVGALDEAMELRGMRYHPIDIETSVIRAHKSVTECAVFTWTNLLVVVVELDGSEQEALDLVPLVTNVVLEEHYLIVGVVVVVDIGVIPINSRGEKQRMHLRDGFLADQLDPIYVAYNM

SEQ ID NO: 10793 - protein, 333 aa, Homo sapiens
MLLLVTSLLLCELPHPAFLLIPEKSDLRTVAPASSLNVRFDSRTMNLSWDCQENTTFSKCFLTDKKNRVVEPRLSNNECSCTFREICLHEGVTFEVHVNTSQRGFQQKLLYPNSGREGTAAQNFSCFIYNADLMNCTWARGPTAPRDVQYFLYIRNSKRRREIRCPYYIQDSGTHVGCHLDNLSGLTSRNYFLVNGTSREIGIQFFDSLLDTKKIERFNPPSNVTVRCNTTHCLVRWKQPRTYQKLSYLDFQYQLDVHRKNTQPGTENLLINVSGDLENRYNFPSSEPRAKHSVKIRAADVRILNWSSWSEAIEFGSLGYSGCSRQFHRSKTN

SEQ ID NO: 10794 - protein, 631 aa, Homo sapiens
MNFNTILEEILIKRSQQKKKTSPLNYKERLFVLTKSMLTYYEGRAEKKYRKGFIDVSKIKCVEIVKNDDGVIPCQNKYPFQVVHDANTLYIFAPSPQSRDLWVKKLKEEIKNNNNIMIKYHPKFWTDGSYQCCRQTEKLAPGCEKYNLFESSIRKALPPAPETKKRRPPPPIPLEEEDNSEEIVVAMYDFQAAEGHDLRLERGQEYLILEKNDVHWWRARDKYGNEGYIPSNYVTGKKSNNLDQYEWYCRNMNRSKAEQLLRSEDKEGGFMVRDSSQPGLYTVSLYTKFGGEGSSGFRHYHIKETTTSPKKYYLAEKHAFGSIPEIIEYHKHNAAGLVTRLRYPVSVKGKNAPTTAGFSYEKWEINPSELTFMRELGSGLFGVVRLGKWRAQYKVAIKAIREGAMCEEDFIEEAKVMMKLTHPKLVQLYGVCTQQKPIYIVTEFMERGCLLNFLRQRQGHFSRDVLLSMCQDVCEGMEYLERNSFIHRDLAARNCLVSEAGVVKVSDFGMARYVLDDQYTSSSGAKFPVKWCPPEVFNYSRFSSKSDVWSFGVLMWEVFTEGRMPFEKYTNYEVVTMVTRGHRLYQPKLASNYVYEVMLRCWQEKPEGRPSFEDLLRTIDELVECEETFGR

SEQ ID NO: 10795 - protein, 410 aa, Homo sapiens
MLLLVTSLLLCELPHPAFLLIPEKSDLRTVAPASSLNVRFDSRTMNLSWDCQENTTFSKCFLTDKKNRVVEPRLSNNECSCTFREICLHEGVTFEVHVNTSQRGFQQKLLYPNSGREGTAAQNFSCFIYNADLMNCTWARGPTAPRDVQYFLYIRNSKRRREIRCPYYIQDSGTHVGCHLDNLSGLTSRNYFLVNGTSREIGIQFFDSLLDTKKIERFNPPSNVTVRCNTTHCLVRWKQPRTYQKLSYLDFQYQLDVHRKNTQPGTENLLINVSGDLENRYNFPSSEPRAKHSVKIRAADVRILNWSSWSEAIEFGSDDGNLGSVYIYVLLIVGTLVCGIVLGFLFKRFLRIQRLFPPVPQIKDKLNDNHEVEDEMGPQRHHRCGWNLYPTPGPSPGSGSSPRLGSESSL

SEQ ID NO: 10796 - protein, 400 aa, Homo sapiens
MLLLVTSLLLCELPHPAFLLIPEKSDLRTVAPASSLNVRFDSRTMNLSWDCQENTTFSKCFLTDKKNRVVEPRLSNNECSCTFREICLHEGVTFEVHVNTSQRGFQQKLLYPNSGREGTAAQNFSCFIYNADLMNCTWARGPTAPRDVQYFLYIRNSKRRREIRCPYYIQDSGTHVGCHLDNLSGLTSRNYFLVNGTSREIGIQFFDSLLDTKKIERFNPPSNVTVRCNTTHCLVRWKQPRTYQKLSYLDFQYQLDVHRKNTQPGTENLLINVSGDLENRYNFPSSEPRAKHSVKIRAADVRILNWSSWSEAIEFGSDDGNLGSVYIYVLLIVGTLVCGIVLGFLFKRFLRIQRLFPPVPQIKDKLNDNHEVEDEIIWEEFTPEEGKGYREEVLTVKEIT

SEQ ID NO: 10797 - protein, 464 aa, Homo sapiens
MDYDFKVKLSSERERVEDLFEYEGCKVGRGTYGHVYKAKRKDGKDDKDYALKQIEGTGISMSACREIALLRELKHPNVISLQKVFLSHADRKVWLLFDYAEHDLWHIIKFHRASKANKKPVQLPRGMVKSLLYQILDGIHYLHANWVLHRDLKPANILVMGEGPERGRVKIADMGFARLFNSPLKPLADLDPVVVTFWYRAPELLLGARHYTKAIDIWAIGCIFAELLTSEPIFHCRQEDIKTSNPYHHDQLDRIFNVMGFPADKDWEDIKKMPEHSTLMKDFRRNTYTNCSLIKYMEKHKVKPDSKAFHLLQKLLTMDPIKRITSEQAMQDPYFLEDPLPTSDVFAGCQIPYPKREFLTEEEPDDKGDKKNQQQQQGNNHTNGTGHPGNQDSSHTQGPPLKKVRVVPPTTTSGGLIMTSDYQRSNPHAAYPNPGPSTSQPQSSMGYSATSQQPPQYSHQTHRY

SEQ ID NO: 10798 - protein, 390 aa, Homo sapiens
MPANFTEGSFDSSGTGQTLDSSPVACTETVTFTEVVEGKEWGSFYYSFKTEQLITLWVLFVFTIVGNSVVLFSTWRRKKKSRMTFFVTQLAITDSFTGLVNILTDINWRFTGDFTAPDLVCRVVRYLQVVLLYASTYVLVSLSIDRYHAIVYPMKFLQGEKQARVLIVIAWSLSFLFSIPTLIIFGKRTLSNGEVQCWALWPDDSYWTPYMTIVAFLVYFIPLTIISIMYGIVIRTIWIKSKTYETVISNCSDGKLCSSYNRGLISKAKIKAIKYSIIIILAFICCWSPYFLFDILDNFNLLPDTQERFYASVIIQNLPALNSAINPLIYCVFSSSISFPCRANSSVYLLACDVSVLWALVLTSEKESCESWRRKGAKITGFQNDVPGEN

SEQ ID NO: 10799 - protein, 687 aa, Homo sapiens
MDQHQHLNKTAESASSEKKKTRRCNGFKMFLAALSFSYIAKALGGIIMKISITQIERRFDISSSLAGLIDGSFEIGNLLVIVFVSYFGSKLHRPKLIGIGCLLMGTGSILTSLPHFFMGYYRYSKETNIDPSENSTSNLPNCLINQMLSLNRTPSEIIERGCVKESGSHMWIYVFMGNMLRGIGETPIVPLGISYIDDFAKEGHSSLYLGTVNVMGMTGLVFAFMLGSLFAKMYVDIGYVDLSTIRITPKDSRWVGAWWLGFLVSGIVSIISSIPFFFLPLNPNKPQKERKVSLFLHVLKTNDKRNQIANLTNRRKYITKNVTGFFQSLKSILTNPLYVIFVIFTLLHMSSYIASLTYIIKMVEQQYGWSASKTNFLLGVLALPAVAIGMFSGGYIIKKFKLSLVGLAKLAFCSATVHLLSQVLYFFLICESKSVAGLTLTYDGNSPVRSHVDVPLSYCNSECNCDESQWEPVCGNNGITYLSPCLAGCKSSSGNKEPIVFYNCSCVEVIGLQNKNYSAHLGECPRDDACTRKSYVYFVIQVLDAFLCAVGLTSYSVLVIRIVQPELKALAIGFHSMIMRSLGGILVPIYFGALIDTTCMKWSTNSCGARGACRIYNSTYLGRAFFGLKVALIFPVLVLLTVFIFVVRKKSHGKDTKVLENERQVMDEANLEFLNDSEHFVPSAEEQ

SEQ ID NO: 10800 - protein, 305 aa, Homo sapiens
MPANFTEGSFDSSGTGQTLDSSPVACTETVTFTEVVEGKEWGSFYYSFKTEQLITLWVLFVFTIVGNSVVLFSTWRRKKKSRMTFFVTQLAITEKQARVLIVIAWSLSFLFSIPTLIIFGKRTLSNGEVQCWALWPDDSYWTPYMTIVAFLVYFIPLTIISIMYGIVIRTIWIKSKTYETVISNCSDGKLCSSYNRGLISKAKIKAIKYSIIIILAFICCWSPYFLFDILDNFNLLPDTQERFYASVIIQNLPALNSAINPLIYCVFSSSISFPCREQRSQDSRMTFRERTERHEMQILSKPEFI

SEQ ID NO: 10801 - protein, 158 aa, Homo sapiens
MPANFTEGSFDSSGTGQTLDSSPVACTETVTFTEVVEGKEWGSFYYSFKTEQLITLWVLFVFTIVGNSVVLFSTWRRKKKSRMTFFVTQLAITGCAALRLYLRPGVPQHRQIPCHRLPHEVPSRRKASQGPHCDRLEPVFSVLHSHPDHIWEEDTVQR

SEQ ID NO: 10802 - protein, 226 aa, Homo sapiens
MFIMGLGDPIPEELYEMLSDHSIRSFDDLQRLLHGDPGEEDGAELDLNMTRSHSGGELESLARGRRSLGSLTIAEPAMIAECKTRTEVFEISRRLIDRTNANFLVWPPCVEVQRCSGCCNNRNVQCRPTQVQLRPVQVRKIEIVRKKPIFKKATVTLEDHLACKCETVAAARPVTRSPGGSQEQRAKTPQTRVTIRTVRVRRPPKGKHRKFKHTHDKTALKETLGA

SEQ ID NO: 10803 - protein, 143 aa, Homo sapiens
MPANFTEGSFDSSGTGQTLDSSPVACTETVTFTEVVEGKEWGSFYYSFKTEQLITLWVLFVFTIVGNSVVLFSTWRRKKKSRMTFFVTQLAITDSFTGLVNILTDINWRFTGDFTAPDLVCRVVRYLQVMVMKLFHIQKMNME

SEQ ID NO: 10804 - protein, 1332 aa, Homo sapiens
MESRDPAQPMSPGEATQSGARPADRYGLLKHSREFLDFFWDIAKPEQETRLAATEKLLEYLRGRPKGSEMKYALKRLITGLGVGRETARPCYSLALAQLLQSFEDLPLCSILQQIQEKYDLHQVKKAMLRPALFANLFGVLALFQSGRLVKDQEALMKSVKLLQALAQYQNHLQEQPRKALVDILSEVSKATLQEILPEVLKADLNIILSSPEQLELFLLAQQKVPSKLKKLVGSVNLFSDENVPRLVNVLKMAASSVKKDRKLPAIALDLLRLALKEDKFPRFWKEVVEQGLLKMQFWPASYLCFRLLGAALPLLTKEQLHLVMQGDVIRHYGEHVCTAKLPKQFKFAPEMDDYVGTFLEGCQDDPERQLAVLVAFSSVTNQGLPVTPTFWRVVRFLSPPALQGYVAWLRAMFLQPDLDSLVDFSTNNQKKAQDSSLHMPERAVFRLRKWIIFRLVSIVDSLHLEMEEALTEQVARFCLFHSFFVTKKPTSQIPETKHPFSFPLENQAREAVSSAFFSLLQTLSTQFKQAPGQTQGGQPWTYHLVQFADLLLNHSHNVTTVTPFTAQQRQAWDRMLQTLKELEAHSAEARAAAFQHLLLLVGIHLLKSPAESCDLLGDIQTCIRKSLGEKPRRSRTKTIDPQEPPWVEVLVEILLALLAQPSHLMRQVARSVFGHICSHLTPRALQLILDVLNPETSEDENDRVVVTDDSDERRLKGAEDKSEEGEDNRSSESEEESEGEESEEEERDGDVDQGFREQLMTVLQAGKALGGEDSENEEELGDEAMMALDQSLASLFAEQKLRIQARRDEKNKLQKEKALRRDFQIRVLDLVEVLVTKQPENALVLELLEPLLSIIRRSLRSSSSKQEQDLLHKTARIFTHHLCRARRYCHDLGERAGALHAQVERLVQQAGRQPDSPTALYHFNASLYLLRVLKGNTAEGCVHETQEKQKAGTDPSHMPTGPQAASCLDLNLVTRVYSTALSSFLTKRNSPLTVPMFLSLFSRHPVLCQSLLPILVQHITGPVRPRHQACLLLQKTLSMREVRSCFEDPEWKQLMGQVLAKVTENLRVLGEAQTKAQHQQALSSLELLNVLFRTCKHEKLTLDLTVLLGVLQGQQQSLQQGAHSTGSSRLHDLYWQAMKTLGVQRPKLEKKDAKEIPSATQSPISKKRKKKGFLPETKKRKKRKSEDGTPAEDGTPAATGGSQPPSMGRKKRNRTKAKVPAQANGTPTTKSPAPGAPTRSPSTPAKSPKLQKKNQKPSQVNGAPGSPTEPAGQKQHQKALPKKGVLGKSPLSALARKKARLSLVIRSPSLLQSGAKKKAQTLRFTISSSKK

SEQ ID NO: 10805 - protein, 292 aa, Homo sapiens
MEELTAFVSKSFDQKSKDGNGGGGGGGGKKDSITYREVLESGLARSRELGTSDSSLQDITEGGGHCPVHLFKDHVDNDKEKLKEFGTARVAEGIYECKEKREDVKSEDEDGQTKLKQRRSRTNFTLEQLNELERLFDETHYPDAFMREELSQRLGLSEARVQVWFQNRRAKCRKQENQMHKGVILGTANHLDACRVAPYVNMGALRMPFQQVQAQLQLEGVAHAHPHLHPHLAAHAPYLMFPPPPFGLPIASLAESASAAAVVAAAAKSNSKNSSIADLRLKARKHAEALGL

SEQ ID NO: 10806 - protein, 354 aa, Homo sapiens
MIQPEKLLLVTVGKTATLHCTVTSLLPVGPVLWFRGVGPGRELIYNQKEGHFPRVTTVSDLTKRNNMDFSIRISSITPADVGTYYCVKFRKGSPENVEFKSGPGTEMALGAKPSAPVVLGPAARTTPEHTVSFTCESHGFSPRDITLKWFKNGNELSDFQTNVDPTGQSVAYSIRSTARVVLDPWDVRSQVICEVAHVTLQGDPLRGTANLSEAIRVPPTLEVTQQPMRVGNQVNVTCQVRKFYPQSLQLTWSENGNVCQRETASTLTENKDGTYNWTSWFLVNISDQRDDVVLTCQVKHDGQLAVSKRLALEVTVHQKDQSSDATPGPASSLTALLLIAVLLGPIYVPWKQKT

SEQ ID NO: 10807 - protein, 398 aa, Homo sapiens
MPVPASWPHLPSPFLLMTLLLGRLTGVAGEDELQVIQPEKSVSVAAGESATLRCAMTSLIPVGPIMWFRGAGAGRELIYNQKEGHFPRVTTVSELTKRNNLDFSISISNITPADAGTYYCVKFRKGSPDDVEFKSGAGTELSVRAKPSAPVVSGPAVRATPEHTVSFTCESHGFSPRDITLKWFKNGNELSDFQTNVDPAGDSVSYSIHSTARVVLTRGDVHSQVICEIAHITLQGDPLRGTANLSEAIRVPPTLEVTQQPMRAENQANVTCQVSNFYPRGLQLTWLENGNVSRTETASTLIENKDGTYNWMSWLLVNTCAHRDDVVLTCQVEHDGQQAVSKSYALEISAHQKEHGSDITHEAALAPTAPLLVALLLGPKLLLVVGVSAIYICWKQKA

SEQ ID NO: 10808 - protein, 798 aa, Homo sapiens
MLMLMLVAAVTMWLRPLVTAQLCRSRTVRTGKVFNLIQDVQGDRLYFHPTTTRLIKHPCEKNIALYLGKQVFFTMDNFETSLLPFTIPTSMQVGVPEVTSAHFAGSLLLLVVDQKVYIYDYENNSWSMSLGIKHPVTHVSGDNCCYTGSLFCVHVSNLVFAYFRGDQISQTYIYYSNTGGFSFWKYHYDRQAEIIGSLGGIFHFFSLSQVAMLVVNQGKGMFKYSDHPLNRSFGLSFDYNGTLDILIAPGQRGILLLWFENSLLFSHNAGQLVDTVRVKKGDQTLFSSIFEAKITIHNIAVTENELAVITREDNLYYGNLGIVPSSIIKFADQYIWSEDVALMFRSPGTLEILTPLRDTAFPAFDFQKCLVNIQALLMDPELHVGKCKIEFLTGEFIYRMYTIDMHSQLELTASLIPQPGTSLIPLVMVSNPHSLGFQATFYENGYTSDGNTKYKLDIFLKQQQHWGRTDSNFTSSLKKATMSTLTVDIANKEISCVDIKPLSTLISVGCDLDKKIVIQNKVSACSMGILDPLTLQDNYSFIIEKEFYDPGFQGQQSSEDLHVFYSYQQLGCPLLVYYDTLWKPVVELWRKDSFQEVIDAEYVLLEVNGQFSYSYSLTAQSAMCTSQPQNWTTMIKEFGGPFFWNRENYVSCHDPNNNAPLRWPDVQYQILGGRTANQIIFGHNGFYVFYISIVDPYYSYCQLETIFSIYVYGAFPVQLVSAGVVILLIISSILGSVWLAYKTPKLLRTARGRRIKKCATQLCRRCKTVCQFRASATARAGTEPPGRHRTPHGGRSDH

SEQ ID NO: 10809 - protein, 285 aa, Homo sapiens
MPEFQKSSVRIKNPTRVEEIICGLIKGGAAKLQIITDFDMTLSRFSYKGKRCPTCHNIIDNCKLVTDECRKKLLQLKEKYYAIEVDPVLTVEEKYPYMVEWYTKSHGLLVQQALPKAKLKEIVAESDVMLKEGYENFFDKLQQHSIPVFIFSAGIGDVLEEVIRQAGVYHPNVKVVSNFMDFDETGVLKGFKGELIHVFNKHDGALRNTEYFNQLKDNSNIILLGDSQGDLRMADGVANVEHILKIGYLNDRVDELLEKYMDSYDIVLVQDESLEVANSILQKIL

SEQ ID NO: 10810 - protein, 185 aa, Homo sapiens
MPRLFFFHLLGVCLLLNQFSRAVADSWMEEVIKLCGRELVRAQIAICGMSTWSKRSLSQEDAPQTPRPVAEIVPSFINKDTETINMMSEFVANLPQELKLTLSEMQPALPQLQQHVPVLKDSSLLFEEFKKLIRNRQSEAADSSPSELKYLGLDTHSRKKRQLYSALANKCCHVGCTKRSLARFC

SEQ ID NO: 10811 - protein, 2961 aa, Homo sapiens
MGNAPSHSSEDEAAAAGGEGWGPHQDWAAVSGTTPGPGVAAPALPPAAALLEPARLREAAAALLPTPPCESLVSRHRGALFRWLEERLGRGEESVTLEQFRELLEARGAGCSSEQFEEAFAQFDAEGDGTVDAENMLEALKNSSGANLQGELSHIIRQLQACSLVPGFTDIFSESKEGLDIHSSMILRFLHRNRLSSAVMPYPMLEHCNNMCTMRSSVLKESLDQLVQKEKESPGDLTRSPEMDKLKSVAKCYAYIETSSNSADIDKMTNGETSSYWQSDGSACSHWIRLKMKPDVVLRHLSIAVAATDQSYMPQQVTVAVGRNASDLQEVRDVHIPSNVTGYVTLLENANVSQLYVQINIKRCLSDGCDTRIHGLRAVGFQRVKKSGVSVSDASAIWYWSLLTSLVTASMETNPAFVQTVLHNTQKALRHMPPLSLSPGSTDFSTFLSPNVLEEVDSFLIRITSCCSTPEVELTLLAFALARGSVAKVMSSLCTITDHLDTQYDASSLILSMASVRQNLLLKYGKPLQLTLQACDVKGKEDKSGPENLLVEPWTRDGFLTETGKTRASTIFSTGTESAFQVTQIRIMVRRGGIGAQCGLVFAYNSSSDKFCAEEHFKRFEKYDKWKLQELRQFVKSRIGCSSDDLGEDDPIGWFELEEEWDEADVKLQQCRVAKYLMVKFLCTRQESAERLGVQGLTISGYLRPARAEAEQSVTCAHCRKDTEESVCGATLLLRTLQFIQQLAHDLVQQKESGLKYKSFLDFAGLDLQIFWNFYSKLKQNPREECVSAQTLLLQLLQSCFSVLQGDVLAASEEEKAPIQSPKGVEAAKELYTHLCDVVDKVDGDSVPMEILKQEVRNTLLNGAAIFFPNRQTRRNHLFTMMNVTEQEHKQSLQLTFRSLCTYFSDKDPGGLLLLPEKNDLAKMNISEVLAVMDTLVSVAARECELLMLSGAPGEVGSVLFSLFWSVQGSLLSWCYLQLKSTDSGAKDLAVDLIEKYVGQFLASMRAILESLFSQYSGKTIVERLCNSVFSMAARQLVIFLLDFCTLDIPHCVLLREFSVLTELLKKLCSGPEGGLRKLDVETWQQEQPVVLHTWTKESAHNYENNCHEVSVFVSPGATYFEVEFDDRCETEKRYDYLEFTDARGRKTRYDTKVGTDKWPKKVTFKAGPRLQFLFHSDSSHNEWGYKFTVTACGLPDVAVSWGLDLQLLVSRLMGRLASQCMALKSVRQLGSNMVVPQAKMALVLSSPLWKPVFRHQVCPELELEASWPTHPHRNSKEVKNIPDDPCRHFLLDFAQSEPAQNFCGPYSELFKGFIQACRKQAPKTDIVAGSTIDQAVNATFAALVYRTPDLYEKLQKYVNSGGKIALSEEFAQVYSLADGIRIWMLEMKQKSLMSLGNEAEEKHSSEATEVNPESLAKECIEKSLLLLKFLPTGISSKESCEKLETADETSHLQPLNKRQRTSSVVEEHFQASVSPTEAAPPATGDQSPGLGTQPKLPSSSGLPAADVSPATAEEPLSPSTPTRRPPFTRGRLRLLSFRSMEEARLVPTVKEKYPVLKDVMDFIKDQSLSHRSVVKVLSLRKAQAQSILEVLKITQHCAESLGQPHCFHPPFILFLLELLTCQKDFTNYFGHLEGCGADLHKEIRDTYYQLVLFLVKAVKGFSSLNDRSLLPALSCVQTALLHLLDMGWEPNDLAFFVDIQLPDLLMKMSQENISVHDSVISQWSEEDELADAKQNSEWMDECQDGMFEAWYEKIAQEDPEKQRKMHMFIARYCDLLNVDISCDGCDEIAPWHRYRCLQCSDMDLCKTCFLGGVKPEGHGDDHEMVNMEFTCDHCQGLIIGRRMNCNVCDDFDLCYGCYAAKKYSYGHLPTHSITAHPMVTIRISDRQRLIQPYIHNYSWLLFAALALYSAHLASAEDVDGEKLDPQTRSSATTLRSQCMQLVGDCLMKAHQGKGLKALALLGVLPDGDSSLEDQALPVTVPTGASEEQLEKKAVQGAELSEAGNGKRAVHEEIRPVDFKQRNKADKGVSLSKDPSCQTQISDSPADASPPTGLPDAEDSEVSSQKPIEEKAVTPSPEQVFAECSQKRILGLLAAMLPPLKSGPTVPLIDLEHVLPLMFQVVISNAGHLNETYHLTLGLLGQLIIRLLPAEVDAAVIKVLSAKHNLFAAGDSSIVPDGWKTTHLLFSLGAVCLDSRVGLDWACSMAEILRSLNSAPLWRDVIATFTDHCIKQLPFQLKHTNIFTLLVLVGFPQVLCVGTRCVYMDNANEPHNVIILKHFTEKNRAVIVDVKTRKRKTVKDYQLVQKGGGQECGDSRAQLSQYSQHFAFIASHLLQSSMDSHCPEAVEATWVLSLALKGLYKTLKAHGFEEIRATFLQTDLLKLLVKKCSKGTGFSKTWLLRDLEILSIMLYSSKKEINALAEHGDLELDERGDREEEVERPVSSPGDPEQKKLDPLEGLDEPTRICFLMAHDALNAPLHILRAIYELQMKKTDYFFLEVQKRFDGDELTTDERIRSLAQRWQPSKSLRLEEQSAKAVDTDMIILPCLSRPARCDQATAESNPVTQKLISSTESELQQSYAKQRRSKSAALLHKELNCKSKRAVRDYLFRVNEATAVLYARHVLASLLAEWPSHVPVSEDILELSGPAHMTYILDMFMQLEEKHEWEKILQKVLQGCREDMLGTMALAACQFMEEPGMEVQVRESKHPYNNNTNFEDKVHIPGAIYLSIKFDSQCNTEEGCDELAMSSSSDFQQDRHSFSGSQQKWKDFELPGDTLYYRFTSDMSNTEWGYRFTVTAGHLGRFQTGFEILKQMLSEERVVPHLPLAKIWEWLVGVACRQTGHQRLKAIHLLLRIVRCCGHSDLCDLALLKPLWQLFTHMEYGLFEDVTQPGILLPLHRALTELFFVTENRAQELGVLQDYLLALTTDDHLLRCAAQALQNIAAISLAINYPNKATRLWNVEC

SEQ ID NO: 10812 - protein, 213 aa, Homo sapiens
MPRLLRLSLLWLGLLLVRFSRELSDISSARKLCGRYLVKEIEKLCGHANWSQFRFEEETPFSRLIAQASEKVEAYSPYQFESPQTASPARGRGTNPVSTSWEEAVNSWEMQSLPEYKDKKGYSPLGKTREFSSSHNINVYIHENAKFQKKRRNKIKTLSNLFWGHHPQRKRRGYSEKCCLTGCTKEELSIACLPYIDFKRLKEKRSSLVTKIY

SEQ ID NO: 10813 - protein, 1132 aa, Homo sapiens
MGMACLTMTEMEGTSTSSIYQNGDISGNANSMKQIDPVLQVYLYHSLGKSEADYLTFPSGEYVAEEICIAASKACGITPVYHNMFALMSETERIWYPPNHVFHIDESTRHNVLYRIRFYFPRWYCSGSNRAYRHGISRGAEAPLLDDFVMSYLFAQWRHDFVHGWIKVPVTHETQEECLGMAVLDMMRIAKENDQTPLAIYNSISYKTFLPKCIRAKIQDYHILTRKRIRYRFRRFIQQFSQCKATARNLKLKYLINLETLQSAFYTEKFEVKEPGSGPSGEEIFATIIITGNGGIQWSRGKHKESETLTEQDLQLYCDFPNIIDVSIKQANQEGSNESRVVTIHKQDGKNLEIELSSLREALSFVSLIDGYYRLTADAHHYLCKEVAPPAVLENIQSNCHGPISMDFAISKLKKAGNQTGLYVLRCSPKDFNKYFLTFAVERENVIEYKHCLITKNENEEYNLSGTKKNFSSLKDLLNCYQMETVRSDNIIFQFTKCCPPKPKDKSNLLVFRTNGVSDVPTSPTLQRPTHMNQMVFHKIRNEDLIFNESLGQGTFTKIFKGVRREVGDYGQLHETEVLLKVLDKAHRNYSESFFEAASMMSKLSHKHLVLNYGVCVCGDENILVQEFVKFGSLDTYLKKNKNCINILWKLEVAKQLAWAMHFLEENTLIHGNVCAKNILLIREEDRKTGNPPFIKLSDPGISITVLPKDILQERIPWVPPECIENPKNLNLATDKWSFGTTLWEICSGGDKPLSALDSQRKLQFYEDRHQLPAPKWAELANLINNCMDYEPDFRPSFRAIIRDLNSLFTPDYELLTENDMLPNMRIGALGFSGAFEDRDPTQFEERHLKFLQQLGKGNFGSVEMCRYDPLQDNTGEVVAVKKLQHSTEEHLRDFEREIEILKSLQHDNIVKYKGVCYSAGRRNLKLIMEYLPYGSLRDYLQKHKERIDHIKLLQYTSQICKGMEYLGTKRYIHRDLATRNILVENENRVKIGDFGLTKVLPQDKEYYKVKEPGESPIFWYAPESLTESKFSVASDVWSFGVVLYELFTYIEKSKSPPAEFMRMIGNDKQGQMIVFHLIELLKNNGRLPRPDGCPDEIYMIMTECWNNNVNQRPSFRDLALRVDQIRDNMAG

SEQ ID NO: 10814 - protein, 1188 aa, Homo sapiens
MLNGAGLDKALKMSLPRRSRIRSSVGPVRSSLGYKKAEDEMSRATSVGDQLEAPARTIYLNQPHLNKFRDNQISTAKYSVLTFLPRFLYEQIRRAANAFFLFIALLQQIPDVSPTGRYTTLVPLIIILTIAGIKEIVEDFKRHKADNAVNKKKTIVLRNGMWHTIMWKEVAVGDIVKVVNGQYLPADVVLLSSSEPQAMCYVETANLDGETNLKIRQGLSHTADMQTREVLMKLSGTIECEGPNRHLYDFTGNLNLDGKSLVALGPDQILLRGTQLRNTQWVFGIVVYTGHDTKLMQNSTKAPLKRSNVEKVTNVQILVLFGILLVMALVSSAGALYWNRSHGEKNWYIKKMDTTSDNFGYNLLTFIILYNNLIPISLLVTLEVVKYTQALFINWDTDMYYIGNDTPAMARTSNLNEELGQVKYLFSDKTGTLTCNIMNFKKCSIAGVTYGHFPELAREPSSDDFCRMPPPCSDSCDFDDPRLLKNIEDRHPTAPCIQEFLTLLAVCHTVVPEKDGDNIIYQASSPDEAALVKGAKKLGFVFTARTPFSVIIEAMGQEQTFGILNVLEFSSDRKRMSVIVRTPSGRLRLYCKGADNVIFERLSKDSKYMEETLCHLEYFATEGLRTLCVAYADLSENEYEEWLKVYQEASTILKDRAQRLEECYEIIEKNLLLLGATAIEDRLQAGVPETIATLLKAEIKIWVLTGDKQETAINIGYSCRLVSQNMALILLKEDSLDATRAAITQHCTDLGNLLGKENDVALIIDGHTLKYALSFEVRRSFLDLALSCKAVICCRVSPLQKSEIVDVVKKRVKAITLAIGDGANDVGMIQTAHVGVGISGNEGMQATNNSDYAIAQFSYLEKLLLVHGAWSYNRVTKCILYCFYKNVVLYIIELWFAFVNGFSGQILFERWCIGLYNVIFTALPPFTLGIFERSCTQESMLRFPQLYKITQNGEGFNTKVFWGHCINALVHSLILFWFPMKALEHDTVLTSGHATDYLFVGNIVYTYVVVTVCLKAGLETTAWTKFSHLAVWGSMLTWLVFFGIYSTIWPTIPIAPDMRGQATMVLSSAHFWLGLFLVPTACLIEDVAWRAAKHTCKKTLLEEVQELETKSRVLGKAVLRDSNGKRLNERDRLIKRLGRKTPPTLFRGSSLQQGVPHGYAFSQEEHGAVSQEEVIRAYDTTKKKSRKK

SEQ ID NO: 10815 - protein, 1164 aa, Homo sapiens
MPTMRRTVSEIRSRAEGYEKTDDVSEKTSLADQEEVRTIFINQPQLTKFCNNHVSTAKYNIITFLPRFLYSQFRRAANSFFLFIALLQQIPDVSPTGRYTTLVPLLFILAVAAIKEIIEDIKRHKADNAVNKKQTQVLRNGAWEIVHWEKVAVGEIVKVTNGEHLPADLISLSSSEPQAMCYIETSNLDGETNLKIRQGLPATSDIKDVDSLMRISGRIECESPNRHLYDFVGNIRLDGHGTVPLGADQILLRGAQLRNTQWVHGIVVYTGHDTKLMQNSTSPPLKLSNVERITNVQILILFCILIAMSLVCSVGSAIWNRRHSGKDWYLNLNYGGASNFGLNFLTFIILFNNLIPISLLVTLEVVKFTQAYFINWDLDMHYEPTDTAAMARTSNLNEELGQVKYIFSDKTGTLTCNVMQFKKCTIAGVAYGHVPEPEDYGCSPDEWQNSQFGDEKTFSDSSLLENLQNNHPTAPIICEFLTMMAVCHTAVPEREGDKIIYQAASPDEGALVRAAKQLNFVFTGRTPDSVIIDSLGQEERYELLNVLEFTSARKRMSVIVRTPSGKLRLYCKGADTVIYDRLAETSKYKEITLKHLEQFATEGLRTLCFAVAEISESDFQEWRAVYQRASTSVQNRLLKLEESYELIEKNLQLLGATAIEDKLQDQVPETIETLMKADIKIWILTGDKQETAINIGHSCKLLKKNMGMIVINEGSLDGTRETLSRHCTTLGDALRKENDFALIIDGKTLKYALTFGVRQYFLDLALSCKAVICCRVSPLQKSEVVEMVKKQVKVVTLAIGDGANDVSMIQTAHVGVGISGNEGLQAANSSDYSIAQFKYLKNLLMIHGAWNYNRVSKCILYCFYKNIVLYIIEIWFAFVNGFSGQILFERWCIGLYNVMFTAMPPLTLGIFERSCRKENMLKYPELYKTSQNALDFNTKVFWVHCLNGLFHSVILFWFPLKALQYGTAFGNGKTSDYLLLGNFVYTFVVITVCLKAGLETSYWTWFSHIAIWGSIALWVVFFGIYSSLWPAIPMAPDMSGEAAMLFSSGVFWMGLLFIPVASLLLDVVYKVIKRTAFKTLVDEVQELEAKSQDPGAVVLGKSLTERAQLLKNVFKKNHVNLYRSESLQQNLLHGYAFSQDENGIVSQSEVIRAYDTTKQRPDEW

SEQ ID NO: 10816 - protein, 529 aa, Homo sapiens
MAPEMDQFYRSTMAIYKSIMEQFNPALENLVYLGNNYLRAFHALSEAAEVYFSAIQKIGERALQSPTSQILGEILVQMSDTQRHLNSDLEVVVQTFHGGLLQHMEKNTKLDMQFIKDSRQHYELEYRHRAANLEKCMSELWRMERKRDKNVREMKESVNRLHAQMQAFVSESQRAAELEEKRRYRFLAEKHLLLSNTFLQFFGRARGMLQNRVLLWKEQSEASRSPSRAHSPGLLGPALGPPYPSGRLTPTCLDMPPRPLGEFSSPRSRHGSGSYGTEPDARPASQLEPDRRSLPRTPSASSLYSGSAQSSRSNSFGERPGGGGGARRVRALVSHSEGANHTLLRFSAGDVVEVLVPEAQNGWLYGKLEGSSASGWFPEAYVKALEEGPVNPMTPVTPMTSMTSMSPMTPMNPGNELPSRSYPLRGSHSLDDLLDRPGNSIAPSEYWDGQSRSRTPSRVPSRAPSPAPPPLPSSRRSSMGSTAVATDVKKLMSSEQYPPQELFPRGTNPFATVKLRPTITNDRSAPLIR

SEQ ID NO: 10817 - protein, 310 aa, Homo sapiens
MATESTPSEIIERERKKLLEILQHDPDSILDTLTSRRLISEEEYETLENVTDLLKKSRKLLILVQKKGEATCQHFLKCLFSTFPQSAAICGLRHEVLKHENTVPPQSMGASSNSEDAFSPGIKQPEAPEITVFFSEKEHLDLETSEFFRDKKTSYRETALSARKNEKEYDTPEVTLSYSVEKVGCEVPATITYIKDGQRYEELDDSLYLGKEEYLGSVDTPEDAEATVEEEVYDDPEHVGYDGEEDFENSETTEFSGEEPSYEGSETSLSLEEEQEKSIEGWSRTHGLKRSSHVGLPKCWDYRREPPCLA

SEQ ID NO: 10818 - protein, 2108 aa, Homo sapiens
MATNIEQIFRSFVVSKFREIQQELSSGRNEGQLNGETNTPIEGNQAGDAAASARSLPNEEIVQKIEEVLSGVLDTELRYKPDLKEGSRKSRCVSVQTDPTDEIPTKKSKKHKKHKNKKKKKKKEKEKKYKRQPEESESKTKSHDDGNIDLESDSFLKFDSEPSAVALELPTRAFGPSETNESPAVVLEPPVVSMEVSEPHILETLKPATKTAELSVVSTSVISEQSEQSVAVMPEPSMTKILDSFAAAPVPTTTLVLKSSEPVVTMSVEYQMKSVLKSVESTSPEPSKIMLVEPPVAKVLEPSETLVVSSETPTEVYPEPSTSTTMDFPESSAIEALRLPEQPVDVPSEIADSSMTRPQELPELPKTTALELQESSVASAMELPGPPATSMPELQGPPVTPVLELPGPSATPVPELPGPLSTPVPELPGPPATAVPELPGPSVTPVPQLSQELPGLPAPSMGLEPPQEVPEPPVMAQELPGLPLVTAAVELPEQPAVTVAMELTEQPVTTTELEQPVGMTTVEHPGHPEVTTATGLLGQPEATMVLELPGQPVATTALELPGQPSVTGVPELPGLPSATRALELSGQPVATGALELPGPLMAAGALEFSGQSGAAGALELLGQPLATGVLELPGQPGAPELPGQPVATVALEISVQSVVTTSELSTMTVSQSLEVPSTTALESYNTVAQELPTTLVGETSVTVGVDPLMAPESHILASNTMETHILASNTMDSQMLASNTMDSQMLASNTMDSQMLASSTMDSQMLATSSMDSQMLATSSMDSQMLATSTMDSQMLATSSMDSQMLATSSMDSQMLATSSMDSQMLATSSMDSQMLATSTMDSQMLATSTMDSQMLATSSMDSQMLASGTMDSQMLASGTMDAQMLASGTMDAQMLASSTQDSAMLGSKSPDPYRLAQDPYRLAQDPYRLGHDPYRLGHDAYRLGQDPYRLGHDPYRLTPDPYRMSPRPYRIAPRSYRIAPRPYRLAPRPLMLASRRSMMMSYAAERSMMSSYERSMMSYERSMMSPMAERSMMSAYERSMMSAYERSMMSPMAERSMMSAYERSMMSAYERSMMSPMADRSMMSMGADRSMMSSYSAADRSMMSSYSAADRSMMSSYTADRSMMSMAADSYTDSYTDTYTEAYMVPPLPPEEPPTMPPLPPEEPPMTPPLPPEEPPEGPALPTEQSALTAENTWPTEVPSSPSEESVSQPEPPVSQSEISEPSAVPTDYSVSASDPSVLVSEAAVTVPEPPPEPESSITLTPVESAVVAEEHEVVPERPVTCMVSETPAMSAEPTVLASEPPVMSETAETFDSMRASGHVASEVSTSLLVPAVTTPVLAESILEPPAMAAPESSAMAVLESSAVTVLESSTVTVLESSTVTVLEPSVVTVPEPPVVAEPDYVTIPVPVVSALEPSVPVLEPAVSVLQPSMIVSEPSVSVQESTVTVSEPAVTVSEQTQVIPTEVAIESTPMILESSIMSSHVMKGINLSSGDQNLAPEIGMQEIALHSGEEPHAEEHLKGDFYESEHGINIDLNINNHLIAKEMEHNTVCAAGTSPVGEIGEEKILPTSETKQRTVLDTYPGVSEADAGETLSSTGPFALEPDATGTSKGIEFTTASTLSLVNKYDVDLSLTTQDTEHDMVISTSPSGGSEADIEGPLPAKDIHLDLPSNNNLVSKDTEEPLPVKESDQTLAALLSPKESSGGEKEVPPPPKETLPDSGFSANIEDINEADLVRPLLPKDMERLTSLRAGIEGPLLASDVGRDRSAASPVVSSMPERASESSSEEKDDYEIFVKVKDTHEKSKKNKNRDKGEKEKKRDSSLRSRSKRSKSSEHKSRKRTSESRSRARKRSSKSKSHRSQTRSRSRSRRRRRSSRSRSKSRGRRSVSKEKRKRSPKHRSKSRERKRKRSSSRDNRKTVRARSRTPSRRSRSHTPSRRRRSRSVGRRRSFSISPSRRSRTPSRRSRTPSRRSRTPSRRSRTPSRRSRTPSRRSRTPSRRRRSRSVVRRRSFSISPVRLRRSRTPLRRRFSRSPIRRKRSRSSERGRSPKRLTDLDKAQLLEIAKANAAAMCAKAGVPLPPNLKPAPPPTIEEKVAKKSGGATIEELTEF

SEQ ID NO: 10819 - protein, 454 aa, Homo sapiens
MATNIEQIFRSFVVSKFREIQQELSSGRNEGQLNGETNTPIEGNQAGDAAASARSLPNEEIVQKIEEVLSGVLDTELRYKPDKAQLLEIAKANAAAMCAKAGVPLPPNLKPAPPPTIEEKVAKKSGGATIEELTEKCKQIAQSKEDDDVIVNKPHVSDEEEEEPPFYHHPFKLSEPKPIFFNLNIAAAKPTPPKSQVTLTKEFPVSSGSQHRKKEADSVYGEWVPVEKNGEENKDDDNVFSSNLPSEPVDISTAMSERALAQKRLSENAFDLEAMSMLNRAQERIDAWAQLNSIPGQFTGSTGVQVLTQEQLANTGAQAWIKKDQFLRAAPVTGGMGAVLMRKMGWREGEGLGKNKEGNKEPILVDFKTDRKGLVAVGERAQKRSGNFSAAMKDLSGKHPVSALMEICNKRRWQPPEFLLVHDSGPDHRKHFLFRVLRNGALTRPNCMFFLNRY

SEQ ID NO: 10820 - protein, 373 aa, Homo sapiens
MATQAHSLSYAGCNFLRQRLVLSTLSGRPVKIRKIRARDDNPGLRDFEASFIRLLDKITNGSRIEINQTGTTLYYQPGLLYGGSVEHDCSVLRGIGYYLESLLCLAPFMKHPLKIVLRGVTNDQVDPSVDVLKATALPLLKQFGIDGESFELKIVRRGMPPGGGGEVVFSCPVRKVLKPIQLTDPGKIKRIRGMAYSVRVSPQMANRIVDSARSILNKFIPDIYIYTDHMKGVNSGKSPGFGLSLVAETTSGTFLSAELASNPQGQGAAVLPEDLGRNCARLLLEEIYRGGCVDSTNQSLALLLMTLGQQDVSKVLLGPLSPYTIEFLRHLKSFFQIMFKIETKPCGEELKGGDKVLMTCVGIGFSNLSKTLK

SEQ ID NO: 10821 - protein, 890 aa, Homo sapiens
MDSERQVKDTDDIESPKRSIRDSGYIDCWDSERSDSLSPPRHGRDDSFDSLDSFGSRSRQTPSPDVVLRGSSDGRGSDSESDLPHRKLPDVKKDDMSARRTSHGEPKSAVPFNQYLPNKSNQTAYVPAPLRKKKAEREEYRKSWSTATSPLGGERPFRSTSMFDMRCEEEAAVQPHSRARQEQLQLINNQLREEDDKWQDDLARWKSRRRSVSQDLIKKEEERKKMEKLLAGEDGTSERRKSIKTYREIVQEKERRERELHEAYKNARSQEEAEGILQQYIERFTISEAVLERLEMPKILERSHSTEPNLSSFLNDPNPMKYLRQQSLPPPKFTATVETTIARASVLDTSMSAGSGSPSKTVTPKAVPMLTPKPYSQPKNSQDVLKTFKVDGKVSVNGETVHREEEKERECPTVAPAHSLTKSQMFEGVARVHGSPLELKQDNGSIEINIKKPNSVPQELAATTEKTEPNSQEDKNDGGKSRKGNIELASSEPQHFTTTVTRCSPTVAFVEFPSSPQLKNDVSEEKDQKKPENEMSGKVELVLSQKVVKPKSPEPEATLTFPFLDKMPEANQLHLPNLNSQVDSPSSEKSPVMTPFKFWAWDPEEERRRQEKWQQEQERLLQERYQKEQDKLKEEWEKAQKEVEEEERRYYEEERKIIEDTVVPFTVSSSSADQLSTSSSMTEGSGTMNKIDLGNCQDEKQDRRWKKSFQGDDSDLLLKTRESDRLEEKGSLTEGALAHSGNPVSKGVHEDHQLDTEAGAPHCGTNPQLAQDPSQNQQTSNPTHSSEDVKPKTLPLDKSINHQIESPSERRKSISGKKLCSSCGLPLGKGAAMIIETLNLYFHIQCFRCGICKGQLGDAVSGTDVRIRNGLLNCNDCYMRSRSAGQPTTL

SEQ ID NO: 10822 - protein, 656 aa, Homo sapiens
MEPAMEPETLEARINRATNPLNKELDWASINGFCEQLNEDFEGPPLATRLLAHKIQSPQEWEAIQALTVRRGEATIRPPPCDDTKVLETCMKSCGKRFHDEVGKFRFLNELIKVVSPKYLGSRTSEKVKNKILELLYSWTVGLPEEVKIAEAYQMLKKQGIVKSDPKLPDDTTFPLPPPRPKNVIFEDEEKSKMLARLLKSSHPEDLRAANKLIKEMVQEDQKRMEKISKRVNAIEEVNNNVKLLTEMVMSHSQGGAAAGSSEDLMKELYQRCERMRPTLFRLASDTEDNDEALAEILQANDNLTQVINLYKQLVRGEEVNGDATAGSIPGSTSALLDLSGLDLPPAGTTYPAMPTRPGEQASPEQPSASVSLLDDELMSLGLSDPTPPSGPSLDGTGWNSFQSSDATEPPAPALAQAPSMESRPPAQTSLPASSGLDDLDLLGKTLLQQSLPPESQQVRWEKQQPTPRLTLRDLQNKSSSCSSPSSSATSLLHTVSPEPPRPPQQPVPTELSLASITVPLESIKPSNILPVTVYDQHGFRILFHFARDPLPGRSDVLVVVVSMLSTAPQPIRNIVFQSAVPKVMKVKLQPPSGTELPAFNPIVHPSAITQVLLLANPQKEKVRLRYKLTFTMGDQTYNEMGDVDQFPPPETWGSL

SEQ ID NO: 10823 - protein, 448 aa, Homo sapiens
MGSEDHGAQNPSCKIMTFRPTMEEFKDFNKYVAYIESQGAHRAGLAKIIPPKEWKPRQTYDDIDDVVIPAPIQQVVTGQSGLFTQYNIQKKAMTVGEYRRLANSEKYCTPRHQDFDDLERKYWKNLTFVSPIYGADISGSLYDDDVAQWNIGSLRTILDMVERECGTIIEGVNTPYLYFGMWKTTFAWHTEDMDLYSINYLHFGEPKSWYAIPPEHGKRLERLAIGFFPGSSQGCDAFLRHKMTLISPIILKKYGIPFSRITQEAGEFMITFPYGYHAGFNHGFNCAESTNFATLRWIDYGKVATQCTCRKDMVKISMDVFVRILQPERYELWKQGKDLTVLDHTRPTALTSPELSSWSASRASLKAKLLRRTPPCVSPHRPSQPGIWCPPGGEAKASAASWLLTTRGHGDTEAGPGLGGDPLHAQSEGQASCVSTSRLRMATQDPCR

SEQ ID NO: 10824 - protein, 534 aa, Homo sapiens
MVLGSDMAAYQQEEQMQLPRADAIRSRLIDTFSLIEHLQGLSQAVPRHTIRELLDPSRQKKLVLGDQHQLVRFSIKPQRIEQISHAQRLLSRLHVRCSQRPPLSLWAGWVLECPLFKNFIIFLVFLNTIILMVEIELLESTNTKLWPLKLTLEVAAWFILLIFILEILLKWLSNFSVFWKSAWNVFDFVVTMLSLLPEVVVLVGVTGQSVWLQLLRICRVLRSLKLLAQFRQIQIIILVLVRALKSMTFLLMLLLIFFYIFAVTGVYVFSEYTRSPRQDLEYHVFFSDLPNSLVTVFILFTLDHWYALLQDVWKVPEVSRIFSSIYFILWLLLGSIIFRSIIVAMMVTNFQNIRKELNEEMARREVQLKADMFKRQIIQRRKNMSHEALTSSHSKIEDRGASQQRESLDLSEVSEVESNYGATEEDLITSASKTEETLSKKREYQSSSCVSSTSSSYSSSSESRFSESIGRLDWETLVHENLPGLMEMDQDDRVWPRDSLFRYFELLEKLQYNLEERKKLQEFAVQALMNLEDK

SEQ ID NO: 10825 - protein, 467 aa, Homo sapiens
MAPIWSPPGRVSGCHLSSGPAPGSAVGPWLGTPHPSLPLPLAPHKPPPPGLPGSAGQTSLPAQRECVFPGDAAVHQELCGLGFEECLGSIPQAHQCYLTNGPKRRKCSPRRRGRAPAWLCGGSPPCHQGLGHEHPSSGPSTNCSPRPTAQWSVEDEEEAVHEQCQHERDRQLQAQDEEGGGHVPERPKQEMLLSLKPSEAPELDEDEGFGDWSQRPEQRQQHEGAQGALDSGEPPQCRSPEGEQEDRPGLHAYEKEDSDEVHLEELSLSKEGPGPEDTVQDNLGAAGAEEEQEEHQKCQQPRTPSPLVLEGTIEQSSPPLSPTTKLIDRTESLNRSIEKSNSVKKSQPDLPISKIDQWLEQYTQAIETAGRTPKLARQASIELPSMAVASTKSRWETGEVQAQSAAKTPSCKDIVAGDMSKKSLWEQKGGSKTSSTIKSTPSGKRYKFVATGHGKYEKVLVEGGPAP

SEQ ID NO: 10826 - protein, 342 aa, Homo sapiens
MGDREECLSTPQPPMSVVKSIELVLPEDRIYLAGSSIKGQVILTLNSTLVDPIVKVELVGRGYVEWSEEAGASCDYSRNVICNNKADYVHKTKTFPVEDNWLSAGSHTFDFHFNLPPRLPSTFTSKFGHVFYFVQASCMGREHILAKKRMYLLVQGTSTFHKETPFQNPLFVEAEEKVSYNCCRQGTVCLQIQMERNTFTPGEKVVFTTEINNQTSKCIKTVVFALYAHIQYEGFTPSAERRSRLDSSELLRQEANTPVTRFNTTKVVSTFNLPLLLSVSSSTQDGEIMHTRYELVTTVHLPWSLTSLKAKVPIIITSASVDSAICQLSEDGVLPVNPDHQN

SEQ ID NO: 10827 - protein, 718 aa, Homo sapiens
MLNSTGELEFSNEEDPEIISQLTSLPLSGGKSSAGVPEKTGYPDSVYVMAANIFQGIRIEKSAQKVLIKYGNEPLRSLSESEDQSFQRLSYELAFSALKYQDILETILIDSCIFPSTTIPDHLSSLIIVMLYDFQDRKFQTRVLSDNEEPISEVQEVENLLNSFKIKLAAALARCRIKHDALSIYHILPETVRKQELRASTLPLYAWINTCKISPEEVYNNLKRRGYNKVKSVLHIDDKVFAVDQHCYDVLIFPSHLKNDLINIDLFKDYKLIFQDKSRSLAVHSVKALLNMDDDVLMVNTGSWYTVSHMSILTNNNTSKVFVCGVQSQAKDPDLKTLFTKIGCKNIEILHEKFINIESKDHRLQKVKVILLLPRCSGLGVSNPVEFILNEHEDTEFLKDHSQGGISVDKLHVLAQQQYEQLTHAMKFTKAQAVVYCTCSVFPEENEAVVKKALEFQDLGNKGQPYRLSPPVLPLCSLKEIQLSTDKFFRMEPSEITNGCFLSILTRERDPSETVSVNDVLARAAAKGLLDGIELGKSSKREKKKKKSKTSLTKGATTDNGIQMKIAEFLNRETKASANLSETVTKPPLPQKNTAQVGASSQTRKPNKLAPHPAVPAFVKNTCPSRPRERQTHFLRPRPEDRMVALKPIKIVLPPVFMPFSSPQGIRSRMPTQHLYCRWVAPKALVPTCLPTHSLSRKEEKPKDDTPSSLLRPPRRWL

SEQ ID NO: 10828 - protein, 824 aa, Homo sapiens
MPVAEAPQVAGGQGDGGDGEEAEPEGMFKACEDSKRKARGYLRLVPLFVLLALLVLASAGVLLWYFLGYKAEVMVSQVYSGSLRVLNRHFSQDLTRRESSAFRSETAKAQKMLKELITSTRLGTYYNSSSVYSFGEGPLTCFFWFILQIPEHRRLMLSPEVVQALLVEELLSTVNSSAAVPYRAEYEVDPEGLVILEASVKDIAALNSTLGCYRYSYVGQGQVLRLKGPDHLASSCLWHLQGPKDLMLKLRLEWTLAECRDRLAMYDVAGPLEKRLITSVYGCSRQEPVVEVLASGAIMAVVWKKGLHSYYDPFVLSVQPVVFQACEVNLTLDNRLDSQGVLSTPYFPSYYSPQTHCSWHLTVPSLDYGLALWFDAYALRRQKYDLPCTQGQWTIQNRRLCGLRILQPYAERIPVVATAGITINFTSQISLTGPGVRVHYGLYNQSDPCPGEFLCSVNGLCVPACDGVKDCPNGLDERNCVCRATFQCKEDSTCISLPKVCDGQPDCLNGSDEEQCQEGVPCGTFTFQCEDRSCVKKPNPQCDGRPDCRDGSDEEHCDCGLQGPSSRIVGGAVSSEGEWPWQASLQVRGRHICGGALIADRWVITAAHCFQEDSMASTVLWTVFLGKVWQNSRWPGEVSFKVSRLLLHPYHEEDSHDYDVALLQLDHPVVRSAAVRPVCLPARSHFFEPGLHCWITGWGALREGALRADAVALFYGWRNQGSETCCCPISNALQKVDVQLIPQDLCSEVYRYQVTPRMLCAGYRKGKKDACQGDSGGPLVCKALSGRWFLAGLVSWGLGCGRPNYFGVYTRITGVISWIQQVVT

SEQ ID NO: 10829 - protein, 524 aa, Homo sapiens
MTAEDSTAAMSSDSAAGSSAKVPEGVAGAPNEAALLALMERTGYSMVQENGQRKYGGPPPGWEGPHPQRGCEVFVGKIPRDVYEDELVPVFEAVGRIYELRLMMDFDGKNRGYAFVMYCHKHEAKRAVRELNNYEIRPGRLLGVCCSVDNCRLFIGGIPKMKKREEILEEIAKVTEGVLDVIVYASAADKMKNRGFAFVEYESHRAAAMARRKLMPGRIQLWGHQIAVDWAEPEIDVDEDVMETVKILYVRNLMIETTEDTIKKSFGQFNPGCVERVKKIRDYAFVHFTSREDAVHAMNNLNGTELEGSCLEVTLAKPVDKEQYSRYQKAARGGGAAEAAQQPSYVYSCDPYTLAYYGYPYNALIGPNRDYFVKVAIPAIGAQYSMFPAAPAPKMIEDGKIHTVEHMISPIAVQPDPASAAAAAAAAAAAAAAVIPTVSTPPPFQGRPITPVYTVAPNVQRIPTAGIYGASYVPFAAPATATIATLQKNAAAAAAMYGGYAGYIPQAFPAAAIQVPIPDVYQTY

SEQ ID NO: 10830 - protein, 280 aa, Homo sapiens
MELGHGAGTTTFTRAHLNDKEGQQDLDPWKAAYSSLDTSKFKNQGLSSPQPLPLGASAQGSSLGQCHLKEIPPPPPTAASRDSLGMDPQSRSLKNAGSRSSSRENRATSGEGAQPCQGTDDGPSLGAQDQRSTPTNQKGSIIPNNIRHKFGSNVVDQLVSEEQAQKAIDEVFEGQKRASSWPSRTQNPVEISSVFSDYYDLGYNMRSNLFRGAAEETKSLMKASYTPEVIEKSVRDLEHWHGRKTDDLGRWHQKNAMNLNLQKALEEKYGENSKSKSSKY

SEQ ID NO: 10831 - protein, 309 aa, Homo sapiens
MLLILLSVALLALSSAQSLNEDVSQEESPSVISGKPEGRRPQGGNQPQRTPPPPGKPEGRPPQGGNQSQGPPPRPGKPEGPPPQGGNQSQGPPPRPGKPEGQPPQGGNQSQGPPPRPGKPEGPPPQGGNQSQGPPPRPGKPEGPPPQGGNQSQGPPPRPGKPEGPPPQGGNQSQGPPPHPGKPEGPPPQGGNQSQGPPPRPGKPEGPPPQGGNQSQGPPPRPGKPEGPPSQGGNKPQGPPPHPGKPQGPPPQEGNKPQRPPPPGRPQGPPPPGGNPQQPLPPPAGKPQGPPPPPQGGRPHRPPQGQPPQ

SEQ ID NO: 10832 - protein, 1332 aa, Homo sapiens
MSDMDYPLQGPGLLSVPNLPEISSIRRVPLPPELVEQFGHMQCNCMMGVFPPISRAWLTIDSDIFMWNYEDGGDLAYFDGLSETILAVGLVKPKAGIFQPHVRHLLVLATPVDIVILGLSYANLQTGSGVLNDSLSGGMQLLPDPLYSLPTDNTYLLTITSTDNGRIFLAGKDGCLYEVAYQAEAGWFSQRCRKINHSKSSLSFLVPSLLQFTFSEDDPILQIAIDNSRNILYTRSEKGVIQVYDLGQDGQGMSRVASVSQNAIVSAAGNIARTIDRSVFKPIVQIAVIENSESLDCQLLAVTHAGVRLYFSTCPFRQPLARPNTLTLVHVRLPPGFSASSTVEKPSKVHRALYSKGILLMAASENEDNDILWCVNHDTFPFQKPMMETQMTAGVDGHSWALSAIDELKVDKIITPLNKDHIPITDSPVVVQQHMLPPKKFVLLSAQGSLMFHKLRPVDQLRHLLVSNVGGDGEEIERFFKLHQEDQACATCLILACSTAACDREVSAWATRAFFRYGGEAQMRFPTTLPPPSNVGPILGSPVYSSSPVPSGSPYPNPSFLGTPSHGIQPPAMSTPVCALGNPATQATNMSCVTGPEIVYSGKHNGICIYFSRIMGNIWDASLVVERIFKSGNREITAIESSVPCQLLESVLQELKGLQEFLDRNSQFAGGPLGNPNTTAKVQQRLIGFMRPENGNPQQMQQELQRKFHEAQLSEKISLQAIQQLVRKSYQALALWKLLCEHQFTIIVAELQKELQEQLKITTFKDLVIRDKELTGALIASLINCYIRDNAAVDGISLHLQDICPLLYSTDDAICSKANELLQRSRQVQNKTEKERMLRESLKEYQKISNQVDLSNVCAQYRQVRFYEGVVELSLTAAEKKDPQGLGLHFYKHGEPEEDIVGLQAFQERLNSYKCITDTLQELVNQSKAAPQSPSVPKKPGPPVLSSDPNMLSNEEAGHHFEQMLKLSQRSKDELFSIALYNWLIQVDLADKLLQVASPFLEPHLVRMAKVDQNRVRYMDLLWRYYEKNRSFSNAARVLSRLADMHSTEISLQQRLEYIARAILSAKSSTAISSIAADGEFLHELEEKMEVARIQLQIQETLQRQYSHHSSVQDAVSQLDSELMDITKLYGEFADPFKLAECKLAIIHCAGYSDPILVQTLWQDIIEKELSDSVTLSSSDRMHALSLKIVLLGKIYAGTPRFFPLDFIVQFLEQQVCTLNWDVGFVIQTMNEIGVPLPRLLEVYDQLFKSRDPFWNRMKKPLHLLDCIHVLLIRYVENPSQVLNCERRRFTNLCLDAVCGYLVELQSMSSSVAVQAITGNFKSLQAKLERLH

SEQ ID NO: 10833 - protein, 166 aa, Homo sapiens
MLLILLSVALLAFSSAQDLDEDVSQEDVPLVISDGGDSEQFIDEERQGPPLGGQQSQPSAGDGNQNDGPQQGPPQQGGQQQQGPPPPQGKPQGPPQQGGHPPPPQGRPQGPPQQGGHPRPPRGRPQGPPQQGGHQQGPPPPPPGKPQGPPPQGGRPQGPPQGQSPQ

SEQ ID NO: 10834 - protein, 538 aa, Homo sapiens
MPGSGPSERMTWPGPALSAGPPTRPLSSAPGIPPIPPLTRTHSLMAMSLPGSRRTSAGSRRRTSPPVSVRDAYGTSSLSSSSNSGSYKGSDSSPTPRRSMKYTLCSDNHGIKPPTPEQYLTPLQQKEVCIRHLKARLKDTQDRLQDRDTEIDDLKTQLSRMQEDWIEEECHRVEAQLALKEARKEIKQLKQVIDTVKNNLIDKDKGLQKYFVDINIQNKKLETLLHSMEVAQNGMAKEDGTGESAGGSPARSLTRSSTYTKLSDPAVCGDRQPGDPSSGSAEDGADSGFAAADDTLSRTDALEASSLLSSGVDCGTEETSLHSSFGLGPRFPASNTYEKLLCGMEAGVQASCMQERAIQTDFVQYQPDLDTILEKVTQAQVCGTDPESGDRCPELDAHPSGPRDPNSAVVVTVGDELEAPEPITRGPTPQRPGANPNPGQSVSVVCPMEEEEEAAVAEKEPKSYWSRHYIVDLLAVVVPAVPTVAWLCRSQRRQGQPIYNISSLLRGCCTVALHSIRRISCRSLSQPSPSPAGGGSQL

SEQ ID NO: 10835 - protein, 1216 aa, Homo sapiens
MTDDNSDDKIEDELQTFFTSDKDGNTHAYNPKSPPTQNSSASSVNWNSANPDDMVVDYETDPAVVTGENISLSLQGVEVFGHEKSSSDFISKQVLDMHKDSICQCPALVGTEKPKYLQHSCHSLEAVEGQSVEPSLPFVWKPNDNLNCAGYCDALELNQTFDMTVDKVNCTFISHHAIGKSQSFHTAGSLPPTGRRSGSTSSLSYSTWTSSHSDKTHARETTYDRESFENPQVTPSEAQDMTYTAFSDVVMQSEVFVSDIGNQCACSSGKVTSEYTDGSQQRLVGEKETQALTPVSDGMEVPNDSALQEFFCLSHDESNSEPHSQSSYRHKEMGQNLRETVSYCLIDDECPLMVPAFDKSEAQVLNPEHKVTETEDTQMVSKGKDLGTQNHTSELILSSPPGQKVGSSFGLTWDANDMVISTDKTMCMSTPVLEPTKVTFSVSPIEATEKCKKVEKGNRGLKNIPDSKEAPVNLCKPSLGKSTIKTNTPIGCKVRKTEIISYPRPNFKNVKAKVMSRAVLQPKDAALSKVTPRPQQTSASSPSSVNSRQQTVLSRTPRSDLNADKKAEILINKTHKQQFNKLITSQAVHVTTHSKNASHRVPRTTSAVKSNQEDVDKASSSNSACETGSVSALFQKIKGILPVKMESAECLEMTYVPNIDRISPEKKGEKENGTSMEKQELKQEIMNETFEYGSLFLGSASKTTTTSGRNISKPDSCGLRQIAAPKAKVGPPVSCLRRNSDNRNPSADRAVSPQRIRRVSSSAGNAAVIKYEEKPPKPAFQNGSSGSFYLKPLVSRAHVHLMKTPPKGPSRKNLFTALNAVEKSRQKNPRSLCIQPQTAPDALPPEKTLELTQYKTKCENQSGFILQLKQLLACGNTKFEALTVVIQHLLSEREEALKQHKTLSQELVNLRGELVTASTTCEKLEKARNELQTVYEAFVQQHQAEKTERENRLKEFYTREYEKLRDTYIEEAEKYKMQLQEQFDNLNAAHETSKLEIEASHSEKLELLKKAYEASLSEIKKGHEIEKKSLEDLLSEKQESLEKQINDLKSENDALNEKLKSEEQKRRAREKANLKNPQIMYLEQELESLKAVLEIKNEKLHQQDIKLMKMEKLVDNNTALVDKLKRFQQENEELKARMDKHMAISRQLSTEQAVLQESLEKESKVNKRLSMENEELLWKLHNGDLCSPKRSPTSSAIPLQSPRNSGSFPSPSISPR

SEQ ID NO: 10836 - protein, 400 aa, Homo sapiens
MIRNWLTIFILFPLKLVEKCESSVSLTVPPVVKLENGSSTNVSLTLRPPLNATLVITFEITFRSKNITILELPDEVVVPPGVTNSSFQVTSQNVGQLTVYLHGNHSNQTGPRIRFLVIRSSAISIINQVIGWIYFVAWSISFYPQVIMNWRRKSVIGLSFDFVALNLTGFVAYSVFNIGLLWVPYIKEQFLLKYPNGVNPVNSNDVFFSLHAVVLTLIIIVQCCLYERGGQRVSWPAIGFLVLAWLFAFVTMIVAAVGVTTWLQFLFCFSYIKLAVTLVKYFPQAYMNFYYKSTEGWSIGNVLLDFTGGSFSLLQMFLQSYNNDQWTLIFGDPTKFGLGVFSIVFDVVFFIQHFCLYRKRPGLQAARTGSGSRLRQDWAPSLQPKALPQTTSVSASSLKG

SEQ ID NO: 10837 - protein, 494 aa, Homo sapiens
MAMSLPGSRRTSAGSRRRTSPPVSVRDAYGTSSLSSSSNSGSYKGSDSSPTPRRSMKYTLCSDNHGIKPPTPEQYLTPLQQKEVCIRHLKARLKDTQDRLQDRDTEIDDLKTQLSRMQEDWIEEECHRVEAQLALKEARKEIKQLKQVIDTVKNNLIDKDKGLQKYFVDINIQNKKLETLLHSMEVAQNGMAKEDGTGESAGGSPARSLTRSSTYTKLSDPAVCGDRQPGDPSSGSAEDGADSGFAAADDTLSRTDALEASSLLSSGVDCGTEETSLHSSFGLGPRFPASNTYEKLLCGMEAGVQASCMQERAIQTDFVQYQPDLDTILEKVTQAQVCGTDPESGDRCPELDAHPSGPRDPNSAVVVTVGDELEAPEPITRGPTPQRPGANPNPGQSVSVVCPMEEEEEAAVAEKEPKSYWSRHYIVDLLAVVVPAVPTVAWLCRSQRRQGQPIYNISSLLRGCCTVALHSIRRISCRSLSQPSPSPAGGGSQL

SEQ ID NO: 10838 - protein, 1338 aa, Homo sapiens
MFLMPTSSELNSGQNFLTQWMTNPSRAGVILNRGFPILEADKEKRAAVDISTSFPIKGTHFSDSFSFINEEDSLLEEQKLESNNPYKPQSDKSETHTAFPCIKKGPQVAACHSAPGHQEENKNDFIPDLASEFKEGAYKDPLFKKLEQLKEVQQKKQEQLKRQQLEQLQRLMEEQEKLLTMVSGQCTLPGLSLLPDDQSQKHRSPGNTTTGERATCCFPSYVYPDPTQEETYPSNILSHEQSNFCRTAHGDFVLTSKRASPNLFSEAQYQEAPVEKNNLKEENRNHPTGESILCWEKVTEQIQEANDKNLQKHDDSSEVANIEERPIKAAIGERKQTFEDYLEEQIQLEEQELKQKQLKEAEGPLPIKAKPKQPFLKRGEGLARFTNAKSKFQKGKESKLVTNQSTSEDQPLFKMDRQQLQRKTALKNKELCADNPILKKDSKARTKSGSVTLSQKPKMLKCSNRKSLSPSGLKIQTGKKCDGQFRDQIKFENKVTSNNKENVTECPKPCDTGCTGWNKTQGKDRLPLSTGPASRLAAKSPIRETMKESESSLDVSLQKKLETWEREKEKENLELDEFLFLEQAADEISFSSNSSFVLKILERDQQICKGHRMSSTPVKAVPQKTNPADPISHCNRSEDLDHTAREKESECEVAPKQLHSLSSADELREQPCKIRKAVQKSTSENQTEWNARDDEGVPNSDSSTDSEEQLDVTIKPSTEDRERGISSREDSPQVCDDKGPFKDTRTQEDKRRDVDLDLSDKDYSSDESIMESIKHKVSEPSRSSSLSLSKMDFDDERTWTDLEENLCNHDVVLGNESTYGTPQTCYPNNEIGILDKTIKRKIAPVKRGEDLSKSRRSRSPPTSELMMKFFPSLKPKPKSDSHLGNELKLNISQDQPPGDNARSQVLREKIIELETEIEKFKAENASLAKLRIERESALEKLRKEIADFEQQKAKELARIEEFKKEEMRKLQKERKVFEKYTTAARTFPDKKEREEIQTLKQQIADLREDLKRKETKWSSTHSRLRSQIQMLVRENTDLREEIKVMERFRLDAWKRAEAIESSLEVEKKDKLANTSVRFQNSQISSGTQVEKYKKNYLPMQGNPPRRSKSAPPRDLGNLDKGQAASPREPLEPLNFPDPEYKEEEEDQDIQGEISHPDGKVEKVYKNGCRVILFPNGTRKEVSADGKTITVTFFNGDVKQVMPDQRVIYYYAAAQTTHTTYPEGLEVLHFSSGQIEKHYPDGRKEITFPDQTVKNLFPDGQEESIFPDGTIVRVQRDGNKLIEFNNGQRELHTAQFKRREYPDGTVKTVYANGHQETKYRSGRIRVKDKEGNVLMDTEL

SEQ ID NO: 10839 - protein, 1086 aa, Homo sapiens
MAGNHRLGLEAGDTDDPPRITQNPVINGNVALSDGHNTAEEDMEDDTSWRSEATFQFTVERFSRLSESVLSPPCFVRNLPWKIMVMPRFYPDRPHQKSVGFFLQCNAESDSTSWSCHAQAVLKIINYRDDEKSFSRRISHLFFHKENDWGFSNFMAWSEVTDPEKGFIDDDKVTFEVFVQADAPHGVAWDSKKHTGYVGLKNQGATCYMNSLLQTLFFTNQLRKAVYMMPTEGDDSSKSVPLALQRVFYELQHSDKPVGTKKLTKSFGWETLDSFMQHDVQELCRVLLDNVENKMKGTCVEGTIPKLFRGKMVSYIQCKEVDYRSDRREDYYDIQLSIKGKKNIFESFVDYVAVEQLDGDNKYDAGEHGLQEAEKGVKFLTLPPVLHLQLMRFMYDPQTDQNIKINDRFEFPEQLPLDEFLQKTDPKDPANYILHAVLVHSGDNHGGHYVVYLNPKGDGKWCKFDDDVVSRCTKEEAIEHNYGGHDDDLSVRHCTNAYMLVYIRESKLSEVLQAVTDHDIPQQLVERLQEEKRIEAQKRKERQEAHLYMQVQIVAEDQFCGHQGNDMYDEEKVKYTVFKVLKNSSLAEFVQSLSQTMGFPQDQIRLWPMQARSNGTKRPAMLDNEADGNKTMIELSDNENPWTIFLETVDPELAASGATLPKFDKDHDVMLFLKMYDPKTRSLNYCGHIYTPISCKIRDLLPVMCDRAGFIQDTSLILYEEVKPNLTERIQDYDVSLDKALDELMDGDIIVFQKDDPENDNSELPTAKEYFRDLYHRVDVIFCDKTIPNDPGFVVTLSNRMNYFQVAKTVAQRLNTDPMLLQFFKSQGYRDGPGNPLRHNYEGTLRDLLQFFKPRQPKKLYYQQLKMKITDFENRRSFKCIWLNSQFREEEITLYPDKHGCVRDLLEECKKAVELGEKASGKLRLLEIVSYKIIGVHQEDELLECLSPATSRTFRIEEIPLDQVDIDKENEMLVTVAHFHKEVFGTFGIPFLLRIHQGEHFREVMKRIQSLLDIQEKEFEKFKFAIVMMGRHQYINEDEYEVNLKDFEPQPGNMSHPRPWLGLDHFNKAPKRSRYTYLEKAIKIHN

SEQ ID NO: 10840 - protein, 1148 aa, Homo sapiens
MDIRKFFGVIPSGKKLVSETVKKNEKTKSDEETLKAKKGIKEIKVNSSRKEDDFKQKQPSKKKRIIYDSDSESEETLQVKNAKKPPEKLPVSSKPGKISRQDPVTYISETDEEDDFMCKKAASKSKENGRSTNSHLGTSNMKKNEENTKTKNKPLSPIKLTPTSVLDYFGTGSVQRSNKKMVASKRKELSQNTDESGLNDEAIAKQLQLDEDAELERQLHEDEEFARTLAMLDEEPKTKKARKDTEAGETFSSVQANLSKAEKHKYPHKVKTAQVSDERKSYSPRKQSKYESSKESQQHSKSSADKIGEVSSPKASSKLAIMKRKEESSYKEIEPVASKRKENAIKLKGETKTPKKTKSSPAKKESVSPEDSEKKRTNYQAYRSYLNREGPKALGSKEIPKGAENCLEGLIFVITGVLESIERDEAKSLIERYGGKVTGNVSKKTNYLVMGRDSGQSKSDKAAALGTKIIDEDGLLNLIRTMPGKKSKYEIAVETEMKKESKLERTPQKNVQGKRKISPSKKESESKKSRPTSKRDSLAKTIKKETDVFWKSLDFKEQVAEETSGDSKARNLADDSSENKVENLLWVDKYKPTSLKTIIGQQGDQSCANKLLRWLRNWQKSSSEDKKHAAKFGKFSGKDDGSSFKAALLSGPPGVGKTTTASLVCQELGYSYVELNASDTRSKSSLKAIVAESLNNTSIKGFYSNGAASSVSTKHALIMDEVDGMAGNEDRGGIQELIGLIKHTKIPIICMCNDRNHPKIRSLVHYCFDLRFQRPRVEQIKGAMMSIAFKEGLKIPPPAMNEIILGANQDIRQVLHNLSMWCARSKALTYDQAKADSHRAKKDIKMGPFDVARKVFAAGEETAHMSLVDKSDLFFHDYSIAPLFVQENYIHVKPVAAGGDMKKHLMLLSRAADSICDGDLVDSQIRSKQNWSLLPAQAIYASVLPGELMRGYMTQFPTFPSWLGKHSSTGKHDRIVQDLALHMSLRTYSSKRTVNMDYLSLLRDALVQPLTSQGVDGVQDVVALMDTYYLMKEDFENIMEISSWGGKPSPFSKLDPKVKAAFTRAYNKEAHLTPYSLQAIKASRHSTSPSLDSEYNEELNEDDSQSDEKDQDAIETDAMIKKKTKSSKPSKPEKDKEPRKGKGKSSKK

SEQ ID NO: 10841 - protein, 231 aa, Homo sapiens
MNKQRGTFSEVSLAQDPKRQQRKPKGNKSSISGTEQEIFQVELNLQNPSLNHQGIDKIYDCQGLLPPPEKLTAEVLGIICIVLMATVLKTIVLIPFLEQNNSSPNTRTQKTRHCGHCPEEWITYSNSCYYIGKERRTWEESLLACTSKNSSLLSIDNEEEMKFLASILPSSWIGVFRNSSHHPWVTINGLAFKHKIKDSDNAELNCAVLQVNRLKSAQCGSSMIYHCKHKL

SEQ ID NO: 10842 - protein, 231 aa, Homo sapiens
MNKQRGTFSEVSLAQDPKRQQRKPKGNKSSISGTEQEIFQVELNLQNPSLNHQGIDKIYDCQGLLPPPEKLTAEVLGIICIVLMATVLKTIVLIPFLEQNNFSPNTRTQKARHCGHCPEEWITYSNSCYYIGKERRTWEESLLACTSKNSSLLSIDNEEEMKFLASILPSSWIGVFRNSSHHPWVTINGLAFKHKIKDSDNAELNCAVLQVNRLKSAQCGSSMIYHCKHKL

SEQ ID NO: 10843 - protein, 182 aa, Homo sapiens
MSQCKKRNRAITARRQHLKSVMLQIAATELEKEESRREAEKQNYLAEHCPPLHIPGSMSEVQELCKQLHAKIDAAEEEKYDMEVRVQKTSKELEDMNQKLFDLRGKFKRPPLRRVRMSADAMLKALLGSKHKVCMDLRANLKQVKKEDTEKERDLRDVGDWRKNIEEKSGMEGRKKMFESES

SEQ ID NO: 10844 - protein, 1086 aa, Homo sapiens
MLEARPPRTQGSDAAGAAAGRGLRALLLSLTAAAGIWGSMGERSAYQRLAGGEEGPQRLGGGRMQPEEGTGWLLELLSEVQLQQYFLRLRDDLNVTRLSHFEYVKNEDLEKIGMGRPGQRRLWEAVKRRKALCKRKSWMSKVFSGKRLEAEFPPHHSQSTFRKTSPAPGGPAGEGPLQSLTCLIGEKDLRLLEKLGDGSFGVVRRGEWDAPSGKTVSVAVKCLKPDVLSQPEAMDDFIREVNAMHSLDHRNLIRLYGVVLTPPMKMVTELAPLGSLLDRLRKHQGHFLLGTLSRYAVQVAEGMGYLESKRFIHRDLAARNLLLATRDLVKIGDFGLMRALPQNDDHYVMQEHRKVPFAWCAPESLKTRTFSHASDTWMFGVTLWEMFTYGQEPWIGLNGSQILHKIDKEGERLPRPEDCPQDIYNVMVQCWAHKPEDRPTFVALRDFLLEAQPTDMRALQDFEEPDKLHIQMNDVITVIEGRAENYWWRGQNTRTLCVGPFPRNVVTSVAGLSAQDISQPLQNSFIHTGHGDSDPRHCWGFPDRIDELYLGNPMDPPDLLSVELSTSRPPQHLGGVKREPPPRPPQPAFFTQKPTYDPVSEDQDPLSSDFKRLGLRKPGLPRGLWLAKPSARVPGTKASRGSGAEVTLIDFGEEPVVPALRPCAPSLAQLAMDACSLLDETPPQSPTRALPRPLHPTPVVDWDARPLPPPPAYDDVAQDEDDFEICSINSTLVGAGVPAGPSQGQTNYAFVPEQARPPPPLEDNLFLPPQGGGKPPSSAQTAEIFQALQQECMRQLQAPAGSPAPSPSPGGDDKPQVPPRVPIPPRPTRPHVQLSPAPPGEEETSQWPGPASPPRVPPREPLSPQGSRTPSPLVPPGSSPLPPRLSSSPGKTMPTTQSFASDPKYATPQVIQAPGPRAGPCILPIVRDGKKVSSTHYYLLPERPSYLERYQRFLREAQSPEEPTPLPVPLLLPPPSTPAPAAPTATVRPMPQAALDPKANFSTNNSNPGARPPPPRATARLPQRGCPGDGPEAGRPADKIQMVEQLFGLGLRPRGECHKVLEMFDWNLEQAGCHLLGSWGPAHHKR

SEQ ID NO: 10845 - protein, 497 aa, Homo sapiens
MTKSNGEEPKMGGRMERFQQGVRKRTLLAKKKVQNITKEDVKSYLFRNAFVLLTVTAVIVGTILGFTLRPYRMSYREVKYFSFPGELLMRMLQMLVLPLIISSLVTGMAALDSKASGKMGMRAVVYYMTTTIIAVVIGIIIVIIIHPGKGTKENMHREGKIVRVTAADAFLDLIRNMFPPNLVEACFKQFKTNYEKRSFKVPIQANETLVGAVINNVSEAMETLTRITEELVPVPGSVNGVNALGLVVFSMCFGFVIGNMKEQGQALREFFDSLNEAIMRLVAVIMWYAPVGILFLIAGKIVEMEDMGVIGGQLAMYTVTVIVGLLIHAVIVLPLLYFLVTRKNPWVFIGGLLQALITALGTSSSSATLPITFKCLEENNGVDKRVTRFVLPVGATINMDGTALYEALAAIFIAQVNNFELNFGQIITIRDRLRTTTNVLGDSLGAGIVEHLSRHELKNRDVEMGNSVIEENEMKKPYQLIAQDNETEKPIDSETKM

SEQ ID NO: 10846 - protein, 404 aa, Homo sapiens
MVQLAPAAAMDEVTFRSDTVLSDVHLYTPNHRHLMVRLNSVGQPVFLSQFKLLWSQDSWTDSGAKGGSHRDVHTKEPPSAETGSTGSPPGSGHGNEGFSLQAGTDTTGQEVAEAQLDEDGDLDVVRRPRAASDSNPAGPLRDKVHPMILAQEEDDVLGEEAQGSPHDIIRIEHTMATPLEDVGKQVWRGALLLADYILFRQDLFRGCTALELGAGTGLASIIAATMARTVYCTDVGADLLSMCQRNIALNSHLAATGGGIVRVKELDWLKDDLCTDPKVPFSWSQEEISDLYDHTTILFAAEVFYDDDLTDAVFKTLSRLAHRLKNACTAILSVEKRLNFTLRHLDVTCEAYDHFRSCLHALEQLADGKLRFVVEPVEASFPQLLVYERLQQLELWKIIAEPVT

SEQ ID NO: 10847 - protein, 503 aa, Homo sapiens
MLSQLAMLQGSLLLVVATMSVAQQTRQEADRGCETLVVQHGHCSYTFLLPKSEPCPPGPEVSRDSNTLQRESLANPLHLGKLPTQQVKQLEQALQNNTQWLKKLERAIKTILRSKLEQVQQQMAQNQTAPMLELGTSLLNQTTAQIRKLTDMEAQLLNQTSRMDAQMPETFLSTNKLENQLLLQRQKLQQLQGQNSALEKRLQALETKQQEELASILSKKAKLLNTLSRQSAALTNIERGLRGVRHNSSLLQDQQHSLRQLLVLLRHLVQERANASAPAFIMAGEQVFQDCAEIQRSGASASGVYTIQVSNATKPRKVFCDLQSSGGRWTLIQRRENGTVNFQRNWKDYKQGFGDPAGEHWLGNEVVHQLTRRAAYSLRVELQDWEGHEAYAQYEHFHLGSENQLYRLSVVGYSGSAGRQSSLVLQNTSFSTLDSDNDHCLCKCAQVMSGGWWFDACGLSNLNGVYYHAPDNKYKMDGIRWHYFKGPSYSLRASRMMIRPLDI

SEQ ID NO: 10848 - protein, 757 aa, Homo sapiens
MNVIYFPLHIFVVYSRAYTSLVLVGCTNLCAVLFARCLDDHLVSLRMSGSRKEFDVKQILKIRWRWFGHQASSPNSTVDSQQGEFWNRGQTGANGGRKFLDPCSLQLPLASIGYRRSSQLDFQNSPSWPMASTSEVPAFEFTAEDCGGAHWLDRPEVDDGTSEEENESDSSSCRTSNSSQTLSSCHTMEPCTSDEFFQALNHAEQTFKKMENYLRHKQLCDVILVAGDRRIPAHRLVLSSVSDYFAAMFTNDVREARQEEIKMEGVEPNSLWSLIQYAYTGRLELKEDNIECLLSTACLLQLSQVVEACCKFLMKQLHPSNCLGIRSFADAQGCTDLHKVAHNYTMEHFMEVIRNQEFVLLPASEIAKLLASDDMNIPNEETILNALLTWVRHDLEQRRKDLSKLLAYIRLPLLAPQFLADMENNVLFRDDIECQKLIMEAMKYHLLPERRPMLQSPRTKPRKSTVGTLFAVGGMDSTKGATSIEKYDLRTNMWTPVANMNGRRLQFGVAVLDDKLYVVGGRDGLKTLNTVECYNPKTKTWSVMPPMSTHRHGLGVAVLEGPMYAVGGHDGWSYLNTVERWDPQARQWNFVATMSTPRSTVGVAVLSGKLYAVGGRDGSSCLKSVECFDPHTNKWTLCAQMSKRRGGVGVTTWNGLLYAIGGHDAPASNLTSRLSDCVERYDPKTDMWTAVASMSISRDAVGVCLLGDKLYAVGGYDGQAYLNTVEAYDPQTNEWTQVWHSCFIITLTLFLLKQFLW

SEQ ID NO: 10849 - protein, 296 aa, Homo sapiens
MTKTALLKLFVAIVITFILILPEYFKTPKERTLELSCLEVCLQSNFTYSLSSLNFSFVTFLQPVRETQIIMRIFLNPSNFRNFTRTCQDITGEFKMCSSCLVCESKGNMDFISQEQTSKVLIRRGSMEVKANDFHSPCQHFNFSVAPLVDHLEEYNTTCHLKNHTGRSTIMEDEPSKEKSINYTCRIMEYPNDCIHISLHLEMDIKNITCSMKITWYILVLLVFIFLIILTIRKILEGQRRVQKWQSHRDKPTSVLLRGSDSEKLRALNVQVLSAETTQRLPLDQVQEVLPPIPEL

SEQ ID NO: 10850 - protein, 1039 aa, Homo sapiens
MHQKTPEIYSVELSGTKDIVKTDKGDGKEKYRGLKNNCLELKKKNHKEEFQKELHLDDHKLSNRELEEKYGTDIIMGLSSTRAAELLARDGPNSLTPPKQTPEIVKFLKQMVGGFSILLWVGAFLCWIAYGIQYSSDKSASLNNVYLGCVLGLVVILTGIFAYYQEAKSTNIMSSFNKMIPQQALVIRDSEKKTIPSEQLVVGDIVEVKGGDQIPADIRVLSSQGCRVDNSSLTGESEPQPRSSEFTHENPLETKNICFYSTTCLEGTVTGMVINTGDRTIIGHIASLASGVGNEKTPIAIEIEHFVHIVAGVAVSIGILFFIIAVSLKYQVLDSIIFLIGIIVANVPEGLLATVTVTLSLTAKRMAKKNCLVKNLEAVETLGSTSIICSDKTGTLTQNRMTVAHLWFDNQIFVADTSEDHSNQVFDQSSRTWASLSKIITLCNRAEFKPGQENVPIMKKAVIGDASETALLKFSEVILGDVMEIRKRNRKVAEIPFNSTNKFQLSIHEMDDPHGKRFLMVMKGAPERILEKCSTIMINGEEHPLDKSTAKTFHTAYMELGGLGERVLGFCHLYLPADEFPETYSFDIDAMNFPTSNLCFVGLLSMIDPPRSTVPDAVTKCRSAGIKVIMVTGDHPITAKAIAKSVGIISANSETVEDIAHRLNIAVEQVNKRDAKAAVVTGMELKDMSSEQLDEILANYQEIVFARTSPQQKLIIVEGCQRQDAVVAVTGDGVNDSPALKKADIGIAMGIAGSDAAKNAADMVLLDDNFASIVTGVEEGRLIFDNLKKTIAYSLTKNIAELCPFLIYIIVGLPLPIGTITILFIDLGTDIIPSIALAYEKAESDIMNRKPRHKNKDRLVNQPLAVYSYLHIGLMQALGAFLVYFTVYAQEGFLPRTLINLRVEWEKDYVNDLKDSYGQEWTRYQREYLEWTGYTAFFVGILVQQIADLIIRKTRRNSIFQQGLFRNKVIWVGITSQIIIGLILSYGLGSVTALSFTMLRAQYWFVAVPHAILIWVYDEVRKLFIRLYPGSWWDKNMYY

SEQ ID NO: 10851 - protein, 796 aa, Homo sapiens
MTKDKEPIVKSFHFVCLMIIIVGTRIQFSDGNEFAVDKSKRGLIHVPKDLPLKTKVLDMSQNYIAELQVSDMSFLSELTVLRLSHNRIQLLDLSVFKFNQDLEYLDLSHNQLQKISCHPIVSFRHLDLSFNDFKALPICKEFGNLSQLNFLGLSAMKLQKLDLLPIAHLHLSYILLDLRNYYIKENETESLQILNAKTLHLVFHPTSLFAIQVNISVNTLGCLQLTNIKLNDDNCQVFIKFLSELTRGSTLLNFTLNHIETTWKCLVRVFQFLWPKPVEYLNIYNLTIIESIREEDFTYSKTTLKALTIEHITNQVFLFSQTALYTVFSEMNIMMLTISDTPFIHMLCPHAPSTFKFLNFTQNVFTDSIFEKCSTLVKLETLILQKNGLKDLFKVGLMTKDMPSLEILDVSWNSLESGRHKENCTWVESIVVLNLSSNMLTDSVFRCLPPRIKVLDLHSNKIKSVPKQVVKLEALQELNVAFNSLTDLPGCGSFSSLSVLIIDHNSVSHPSADFFQSCQKMRSIKAGDNPFQCTCELREFVKNIDQVSSEVLEGWPDSYKCDYPESYRGSPLKDFHMSELSCNITLLIVTIGATMLVLAVTVTSLCIYLDLPWYLRMVCQWTQTRRRARNIPLEELQRNLQFHAFISYSEHDSAWVKSELVPYLEKEDIQICLHERNFVPGKSIVENIINCIEKSYKSIFVLSPNFVQSEWCHYELYFAHHNLFHEGSNNLILILLEPIPQNSIPNKYHKLKALMTQRTYLQWPKEKSKRGLFWANIRAAFNMKLTLVTENNDVKS

SEQ ID NO: 10852 - protein, 401 aa, Homo sapiens
MLHLHGWQTMQGRKMGHPPVSPSAPAPAGTTAIPGLIPDLVAGTPWPRWALIAGALAAGVLLVSCLLCAACCCCRRHRKKPRDKESVGLGSARGTTTTHLVQPDVDGLESSPGDAQQWGCLQLSLEFDFGSQEIRVGLRQAADLRPGGTVDPYARVSVSTQAGHRHETKVHRGTLCPVFDETCCFHIPQAELPGATLQVQLFNFKRFSGHEPLGELRLPLGTVDLQHVLEHWYLLGPPAATQPEQVGELCFSLRYVPSSGRLTVVVLEARGLRPGLAEPYVKVQLMLNQRKWKKRKTATKKGTAAPYFNEAFTFLVPFSQVQNVDLVLAVWDRSLPLRTEPVGKVHLGARASGQPLQHWADMLAHARRPIAQRHPLRPAREVDRMLALQPRLRLRLPLPHS

SEQ ID NO: 10853 - protein, 930 aa, Homo sapiens
MNGRSCSMSLHRTSGTPQGPRMVSGHHIPAIRAHSGTPGPSPCGSTSSPTMASLANNLHLKMPSGGGMAPQNNVAESRIHLPALSPRRQMLTNGKPRFQVTQAGGMSGSHTLKPKQQEFGSPFPPNPGKGALGFGPQCKSIGKGSCNNLVVTSSPMMVQRLGLISPPASQVSTACNQISPSLQRAMNAANLNIPPSDTRSLISRESLASTTLSLTESQSASSMKQEWSQGYRALPSLSNHGSQNGLDLGDLLSLPPGTSMSSNSVSNSLPSYLFGTESSHSPYPSPRHSSTRSHSARSKKRALSLSPLSDGIGIDFNTIIRTSPTSLVAYINGSRASPANLSPQPEVYGHFLGVRGSCIPQPRPVPGSQKGVLVAPGGLALPAYGEDGALEHERMQQLEHGGLQPGLVNHMVVQHGLPGPDSQSAGLFKTERLEEFPGSTVDLPPAPPLPPLPPPPGPPPPYHAHAHLHHPELGPHAQQLALPQATLDDDGEMDGIGGKHCCRWIDCSALYDQQEELVRHIEKVHIDQRKGEDFTCFWAGCPRRYKPFNARYKLLIHMRVHSGEKPNKCTFEGCEKAFSRLENLKIHLRSHTGEKPYLCQHPGCQKAFSNSSDRAKHQRTHLDTKPYACQIPGCTKRYTDPSSLRKHVKAHSSKEQQARKKLRSSTELHPDLLTDCLTVQSLQPATSPRDAAAEGTVGRSPGPGPDLYSAPIFSSNYSSRSGTAAGAVPPPHPVSHPSPGHNVQGSPHNPSSQLPPLTAVDAGAERFAPSAPSPHHISPRRVPAPSSILQRTQPPYTQQPSGSHLKSYQPETNSSFQPNGIHVHGFYGQLQKFCPPHYPDSQRIVPPVSSCSVVPSFEDCLVPTSMGQASFDVFHRAFSTHSGITVYDLPSSSSSLFGESLRSGAEDATFLQISTVDRCPSQLSSVYTEG

SEQ ID NO: 10854 - protein, 396 aa, Homo sapiens
MGEAPSPAPALWDWDYLDRCFARHRVCISFGLWICASSCWIAAHALLLYLRCAQKPRQDQSALCAACCLLTSLCDTVGALLARQLTIQVFTGAYLAAIDLVNFMFILFPVCGSKFKSNSDREARERKRRRQLRASVFALALPLSLGPCWALWVAVPKASATIRGPQRRLLASLLQENTEILGYLLGSVAAFGSWASRIPPLSRICRGKTFPSIHLWTRLLSALAGLLYASAIVAHDQHPEYLLRATPWFLTSLGRAALDLAIIFLSCVMKSKMRQALGFAKEARESPDTQALLTCAEKEEENQENLDWVPLTTLSHCKSLRTMTAISRYMELTIEPVQQAAVPPGCQVTGRRAPEMRPCRTPRRTLPFRSSGPGCLPAAPLRSPPSTPTWSGTLKM

SEQ ID NO: 10855 - protein, 399 aa, Homo sapiens
GKPWWAPAVGRKMGHPPVSPSAPAPAGTTAIPGLIPDLVAGTPWPRWALIAGALAAGVLLVSCLLCAACCCCRRHRKKPRDKESVGLGSARGTTTTHLVQPDVDGLESSPGDAQQWGCLQLSLEFDFGSQEIRVGLRQAADLRPGGTVDPYARVSVSTQAGHRHETKVHRGTLCPVFDETCCFHIPQAELPGATLQVQLFNFKRFSGHEPLGELRLPLGTVDLQHVLEHWYLLGPPAATQPEQVGELCFSLRYVPSSGRLTVVVLEARGLRPGLAEPYVKVQLMLNQRKWKKRKTATKKGTAAPYFNEAFTFLVPFSQVQNVDLVLAVWDRSLPLRTEPVGKVHLGARASGQPLQHWADMLAHARRPIAQRHPLRPAREVDRMLALQPRLRLRLPLPHS

SEQ ID NO: 10856 - protein, 122 aa, Homo sapiens
MHDSNNVEKDITPSELPANPGCLHSKEHSIKATLIWRLFFLIMFLTIIVCGMVAALSAIRANCHQEPSVCLQAACPESWIGFQRKCFYFSDDTKNWTSSQRFCDSQDADLAQVESFQELVRK

SEQ ID NO: 10857 - protein, 1724 aa, Homo sapiens
MVMGIFANCIFCLKVKYLPQQQKKKLQTDIKENGGKFSFSLNPQCTHIILDNADVLSQYQLNSIQKNHVHIANPDFIWKSIREKRLLDVKNYDPYKPLDITPPPDQKASSSEVKTEGLCPDSATEEEDTVELTEFGMQNVEIPHLPQDFEVAKYNTLEKVGMEGGQEAVVVELQCSRDSRDCPFLISSHFLLDDGMETRRQFAIKKTSEDASEYFENYIEELKKQGFLLREHFTPEATQLASEQLQALLLEEVMNSSTLSQEVSDLVEMIWAEALGHLEHMLLKPVNRISLNDVSKAEGILLLVKAALKNGETAEQLQKMMTEFYRLIPHKGTMPKEVNLGLLAKKADLCQLIRDMVNVCETNLSKPNPPSLAKYRALRCKIEHVEQNTEEFLRVRKEVLQNHHSKSPVDVLQIFRVGRVNETTEFLSKLGNVRPLLHGSPVQNIVGILCRGLLLPKVVEDRGVQRTDVGNLGSGIYFSDSLSTSIKYSHPGETDGTRLLLICDVALGKCMDLHEKDFSLTEAPPGYDSVHGVSQTASVTTDFEDDEFVVYKTNQVKMKYIIKFSMPGDQIKDFHPSDHTELEEYRPEFSNFSKVEDYQLPDAKTSSSTKAGLQDASGNLVPLEDVHIKGRIIDTVAQVIVFQTYTNKSHVPIEAKYIFPLDDKAAVCGFEAFINGKHIVGEIKEKEEAQQEYLEAVTQGHGAYLMSQDAPDVFTVSVGNLPPKAKVLIKITYITELSILGTVGVFFMPATVAPWQQDKALNENLQDTVEKICIKEIGTKQSFSLTMSIEMPYVIEFIFSDTHELKQKRTDCKAVISTMEGSSLDSSGFSLHIGLSAAYLPRMWVEKHPEKESEACMLVFQPDLDVDLPDLASESEVIICLDCSSSMEGVTFLQAKQIALHALSLVGEKQKVNIIQFGTGYKELFSYPKHITSNTMAAEFIMSATPTMGNTDFWKTLRYLSLLYPARGSRNILLVSDGHLQDESLTLQLVKRSRPHTRLFACGIGSTANRHVLRILSQCGAGVFEYFNAKSKHSWRKQIEDQMTRLCSPSCHSVSVKWQQLNPDVPEALQAPAQVPSLFLNDRLLVYGFIPHCTQATLCALIQEKEFRTMVSTTELQKTTGTMIHKLAARALIRDYEDGILHENETSHEMKKQTLKSLIIKLSKENSLITQFTSFVAVEKRDENESPFPDIPKVSELIAKEDVDFLPYMSWQGEPQEAVRNQSLLASSEWPELRLSKRKHRKIPFSKRKMELSQPEVSEDFEEDGLGVLPAFTSNLERGGVEKLLDLSWTESCKPTATEPLFKKVSPWETSTSSFFPILAPAVGSYLPPTARAHSPASLSFASYRQVASFGSAAPPRQFDASQFSQGPVPGTCADWIPQSASCPTGPPQNPPSSPYCGIVFSGSSLSSAQSAPLQHPGGFTTRPSAGTFPELDSPQLHFSLPTDPDPIRGFGSYHPSASSPFHFQPSAASLTANLRLPMASALPEALCSQSRTTPVDLCLLEESVGSLEGSRCPVFAFQSSDTESDELSEVLQDSCFLQIKCDTKDDSILCFLEVKEEDEIVCIQHWQDAVPWTELLSLQTEDGFWKLTPELGLILNLNTNGLHSFLKQKGIQSLGVKGRECLLDLIATMLVLQFIRTRLEKEGIVFKSLMKMDDASISRNIPWAFEAIKQASEWVRRTEGQYPSICPRLELGNDWDSATKQLLGLQPISTVSPLHRVLHYSQG

SEQ ID NO: 10858 - protein, 572 aa, Homo sapiens
MECLYYFLGFLLLAARLPLDAAKRFHDVLGNERPSAYMREHNQLNGWSSDENDWNEKLYPVWKRGDMRWKNSWKGGRVQAVLTSDSPALVGSNITFAVNLIFPRCQKEDANGNIVYEKNCRNEAGLSADPYVYNWTAWSEDSDGENGTGQSHHNVFPDGKPFPHHPGWRRWNFIYVFHTLGQYFQKLGRCSVRVSVNTANVTLGPQLMEVTVYRRHGRAYVPIAQVKDVYVVTDQIPVFVTMFQKNDRNSSDETFLKDLPIMFDVLIHDPSHFLNYSTINYKWSFGDNTGLFVSTNHTVNHTYVLNGTFSLNLTVKAAAPGPCPPPPPPPRPSKPTPSLATTLKSYDSNTPGPAGDNPLELSRIPDENCQINRYGHFQATITIVEGILEVNIIQMTDVLMPVPWPESSLIDFVVTCQGSIPTEVCTIISDPTCEITQNTVCSPVDVDEMCLLTVRRTFNGSGTYCVNLTLGDDTSLALTSTLISVPDRDPASPLRMANSALISVGCLAIFVTVISLLVYKKHKEYNPIENSPGNVVRSKGLSVFLNRAKAVFFPGNQEKDPLLKNQEFKGVS

SEQ ID NO: 10859 - protein, 356 aa, Homo sapiens
MRPTLLWSLLLLLGVFAAAAAAPPAQLTLETYQEWCNDSAATHDPLSQLPAPQHPKIRLYNAEQVLSWEPVALSNSTRPVVYQVQFKYTDSKWFTADIMSIGVNCTQITATECDFTAASPSAGFPMDFNVTLRLRAELGALHSAWVTMPWFQHYRNVTVGPPENIEVTPGEGSLIIRFSSPFDIADTSTAFFCYYVHYWEKGGIQQVKGPFRSNSISLDNLKPSRVYCLQVQAQLLWNKSNIFRVGHLSNISCYETMADASTELQQVILISVGTFSLLSVLAGACFFLVLKYRGLIKYWFHTPPSIPLQIEEYLKDPTQPILEALDKDSSPKDDVWDSVSIISFPEKEQEDVLQTL

SEQ ID NO: 10860 - protein, 358 aa, Homo sapiens
MEQWDHFHNQQEDTDSCSESVKFDARSMTALLPPNPKNSPSLQEKLKSFKAALIALYLLVFAVLIPLIGIVAAQLLKWETKNCSVSSTNANDITQSLTGKGNDSEEEMRFQEVFMEHMSNMEKRIQHILDMEANLMDTEHFQNFSMTTDQRFNDILLQLSTLFSSVQGHGNAIDEISKSLISLNTTLLDLQLNIENLNGKIQENTFKQQEEISKLEERVYNVSAEIMAMKEEQVHLEQEIKGEVKVLNNITNDLRLKDWEHSQTLRNITLIQGPPGPPGEKGDRGPTGESGPRGFPGPIGPPGLKGDRGAIGFPGSRGLPGYAGRPGNSGPKGQKGEKGSGNTLRPVQLTDHIRAGPS

SEQ ID NO: 10861 - protein, 749 aa, Homo sapiens
MQTSETGSDTGSTVTLQTSVASQAAVPTQVVQQVPVQQQVQQVQTVQQVQHVYPAQVQYVEGSDTVYTNGAIRTTTYPYTETQMYSQNTGGNYFDTQGSSAQVTTVVSSHSMVGTGGIQMGVTGGQLISSSGGTYLIGNSMENSGHSVTHTTRASPATIEMAIETLQKSDGLSTHRSSLLNSHLQWLLDNYETAEGVSLPRSTLYNHYLRHCQEHKLDPVNAASFGKLIRSIFMGLRTRRLGTRGNSKYHYYGIRVKPDSPLNRLQEDMQYMAMRQQPMQQKQRYKPMQKVDGVADGFTGSGQQTGTSVEQTVIAQSQHHQQFLDASRALPEFGEVEISSLPDGTTFEDIKSLQSLYREHCEAILDVVVNLQFSLIEKLWQTFWRYSPSTPTDGTTITESSNLSEIESRLPKAKLITLCKHESILKWMCNCDHGMYQALVEILIPDVLRPIPSALTQAIRNFAKSLEGWLSNAMNNIPQRMIQTKVAAVSAFAQTLRRYTSLNHLAQAARAVLQNTSQINQMLSDLNRVDFANVQEQASWVCQCDDNMVQRLETDFKMTLQQQSTLEQWAAWLDNVMMQALKPYEGRPSFPKAARQFLLKWSFYSSMVIRDLTLRSAASFGSFHLIRLLYDEYMFYLVEHRVAQATGETPIAVMGEFGDLNAVSPGNLDKDEGSEVESEMDEELDDSSEPQAKREKTELSQAFPVGCMQPVLETGVQPSLLNPIHSEHIVTSTQTIRQCSATGNTYTAV

SEQ ID NO: 10862 - protein, 347 aa, Homo sapiens
MGARGAPSRRRQAGRRLRYLPTGSFPFLLLLLLLCIQLGGGQKKKENLLAEKVEQLMEWSSRRSIFRMNGDKFRKFIKAPPRNYSMIVMFTALQPQRQCSVCRQANEEYQILANSWRYSSAFCNKLFFSMVDYDEGTDVFQQLNMNSAPTFMHFPPKGRPKRADTFDLQRIGFAAEQLAKWIADRTDVHIRVFRPPNYSGTIALALLVSLVGGLLYLRRNNLEFIYNKTGWAMVSLCIVFAMTSGQMWNHIRGPPYAHKNPHNGQVSYIHGSSQAQFVAESHIILVLNAAITMGMVLLNEAATSKGDVGKRRIICLVGLGLVVFFFSFLLSIFRSKYHGYPYSFLIK

SEQ ID NO: 10863 - protein, 3041 aa, Homo sapiens
METEAEPARPHGVAMETTPGLGLRSPGAPLAQNPAELLCEAGAAVAAARWDLQKHSLLIVIGDIGTESQLRAVRAHLEQGILSWNIDLSSFDLNQQLRLFITRHLAHFSSEVKGQRTLCHQSEILETIILVNPSADSISSEVHHLLSSSSAYKLLILSGQSLEPGGDLILQSGTYSYENFAQVLHNPEISQLLSNRDPGIQAFLTVSCLGEGDWSHLGLSSSQETLHLRLNPEPTLPTMDGVAEFSEYVSETVDVPSPFDLLEPPTSGGFLKLSKPCCYIFPGGRGDSALFAVNGFNILVDGGSDRKSCFWKLVRHLDRIDSVLLTHIGADNLPGINGLLQRKVAELEEEQSQGSSSYSDWVKNLISPELGVVFFNVPEKLRLPDASRKAKRSIEEACLTLQHLNRLGIQAEPLYRVVSNTIEPLTLFHKMGVGRLDMYVLNPVKDSKEMQFLMQKWAGNSKAKTGIVLPNGKEAEISVPYLTSITALVVWLPANPTEKIVRVLFPGNAPQNKILEGLEKLRHLDFLRYPVATQKDLASGAVPTNLKPSKIKQRADSKESLKATTKTAVSKLAKREEVVEEGAKEARSELAKELAKTEKKAKESSEKPPEKPAKPERVKTESSEALKAEKRKLIKDKVGKKHLKEKISKLEEKKDKEKKEIKKERKELKKDEGRKEEKKDAKKEEKRKDTKPELKKISKPDLKPFTPEVRKTLYKAKVPGRVKIDRSRAIRGEKELSSEPQTPPAQKGTVPLPTISGHRELVLSSPEDLTQDFEEMKREERALLAEQRDTGLGDKPFPLDTAEEGPPSTAIQGTPPSVPGLGQEEHVMKEKELVPEVPEEQGSKDRGLDSGAETEEEKDTWEEKKQREAERLPDRTEAREESEPEVKEDVIEKAELEEMEEVHPSDEEEEDATKAEGFYQKHMQEPLKVTPRSREAFGGRELGLQGKAPEKETSLFLSSLTTPAGATEHVSYIQDETIPGYSETEQTISDEEIHDEPEERPAPPRFHTSTYDLPGPEGAGPFEASQPADSAVPATSGKVYGTPETELTYPTNIVAAPLAEEEHVSSATSITECDKLSSFATSVAEDQSVASLTAPQTEETGKSSLLLDTVTSIPSSRTEATQGLDYVPSAGTISPTSSLEEDKGFKSPPCEDFSVTGESEKRGEIIGKGLSGERAVEEEEEETANVEMSEKLCSQYGTPVFSAPGHALHPGEPALGEAEERCLSPDDSTVKMASPPPSGPPSATHTPFHQSPVEEKSEPQDFQEADSWGDTKRTPGVGKEDAAEETVKPGPEEGTLEKEEKVPPPRSPQAQEAPVNIDEGLTGCTIQLLPAQDKAIVFEIMEAGEPTGPILGAEALPGGLRTLPQEPGKPQKDEVLRYPDRSLSPEDAESLSVLSVPSPDTANQEPTPKSPCGLTEQYLHKDRWPEVSPEDTQSLSLSEESPSKETSLDVSSKQLSPESLGTLQFGELNLGKEEMGHLMQAEDTSHHTAPMSVPEPHAATASPPTDGTTRYSAQTDITDDSLDRKSPASSFSHSTPSGNGKYLPGAITSPDEHILTPDSSFSKSPESLPGPALEDIAIKWEDKVPGLKDRTSEQKKEPEPKDEVLQQKDKTLEHKEVVEPKDTAIYQKDEALHVKNEAVKQQDKALEQKGRDLEQKDTALEQKDKALEPKDKDLEEKDKALEQKDKIPEEKDKALEQKDTALEQKDKALEPKDKDLEQKDRVLEQKEKIPEEKDKALDQKVRSVEHKAPEDTVAEMKDRDLEQTDKAPEQKHQAQEQKDKVSEKKDQALEQKYWALGQKDEALEQNIQALEENHQTQEQESLVQEDKTRKPKMLEEKSPEKVKAMEEKLEALLEKTKALGLEESLVQEGRAREQEEKYWRGQDVVQEWQETSPTREEPAGEQKELAPAWEDTSPEQDNRYWRGREDVALEQDTYWRELSCERKVWFPHELDGQGARPHYTEERESTFLDEGPDDEQEVPLREHATRSPWASDFKDFQESSPQKGLEVERWLAESPVGLPPEEEDKLTRSPFEIISPPASPPEMVGQRVPSAPGQESPIPDPKLMPHMKNEPTTPSWLADIPPWVPKDRPLPPAPLSPAPGPPTPAPESHTPAPFSWGTAEYDSVVAAVQEGAAELEGGPYSPLGKDYRKAEGEREEEGRAEAPDKSSHSSKVPEASKSHATTEPEQTEPEQREPTPYPDERSFQYADIYEQMMLTGLGPACPTREPPLGAAGDWPPCLSTKEAAAGRNTSAEKELSSPISPKSLQSDTPTFSYAALAGPTVPPRPEPGPSMEPSLTPPAVPPRAPILSKGPSPPLNGNILSCSPDRRSPSPKESGRSHWDDSTSDSELEKGAREQPEKEAQSPSPPHPIPMGSPTLWPETEAHVSPPLDSHLGPARPSLDFPASAFGFSSLQPAPPQLPSPAEPRSAPCGSLAFSGDRALALAPGPPTRTRHDEYLEVTKAPSLDSSLPQLPSPSSPGAPLLSNLPRPASPALSEGSSSEATTPVISSVAERFSPSLEAAEQESGELDPGMEPAAHSLWDLTPLSPAPPASLDLALAPAPSLPGDMGDGILPCHLECSEAATEKPSPFQVPSEDCAANGPTETSPNPPGPAPAKAENEEAAACPAWERGAWPEGAERSSRPDTLLSPEQPVCPAGGSGGPPSSASPEVEAGPQGCATEPRPHRGELSPSFLNPPLPPSIDDRDLSTEEVRLVGRGGRRRVGGPGTTGGPCPVTDETPPTSASDSGSSQSDSDVPPETEECPSITAEAALDSDEDGDFLPVDKAGGVSGTHHPRPGHDPPPLPQPDPRPSPPRPDVCMADPEGLSSESGRVERLREKEKVQGRVGRRAPGKAKPASPARRLDLRGKRSPTPGKGPADRASRAPPRPRSTTSQVTPAEEKDGHSPMSKGLVNGLKAGPMALSSKGSSGAPVYVDLAYIPNHCSGKTADLDFFRRVRASYYVVSGNDPANGEPSRAVLDALLEGKAQWGENLQVTLIPTHDTEVTREWYQQTHEQQQQLNVLVLASSSTVVMQDESFPACKIEF

SEQ ID NO: 10864 - protein, 1927 aa, Homo sapiens
MPGEQMDPTGSQLDSDFSQQDTPCLIIEDSQPESQVLEDDSGSHFSMLSRHLPNLQTHKENPVLDVVSNPEQTAGEERGDGNSGFNEHLKENKVADPVDSSNLDTCGSISQVIEQLPQPNRTSSVLGMSVESAPAVEEEKGEELEQKEKEKEEDTSGNTTHSLGAEDTASSQLGFGVLELSQSQDVEENTVPYEVDKEQLQSVTTNSGYTRLSDVDANTAIKHEEQSNEDIPIAEQSSKDIPVTAQPSKDVHVVKEQNPPPARSEDMPFSPKASVAAMEAKEQLSAQELMESGLQIQKSPEPEVLSTQEDLFDQSNKTVSSDGCSTPSREEGGCSLASTPATTLHLLQLSGQRSLVQDSLSTNSSDLVAPSPDAFRSTPFIVPSSPTEQEGRQDKPMDTSVLSEEGGEPFQKKLQSGEPVELENPPLLPESTVSPQASTPISQSTPVFPPGSLPIPSQPQFSHDIFIPSPSLEEQSNDGKKDGDMHSSSLTVECSKTSEIEPKNSPEDLGLSLTGDSCKLMLSTSEYSQSPKMESLSSHRIDEDGENTQIEDTEPMSPVLNSKFVPAENDSILMNPAQDGEVQLSQNDDKTKGDDTDTRDDISILATGCKGREETVAEDVCIDLTCDSGSQAVPSPATRSEALSSVLDQEEAMEIKEHHPEEGSSGSEVEEIPETPCESQGEELKEENMESVPLHLSLTETQSQGLCLQKEMPKKECSEAMEVETSVISIDSPQKLAILDQELEHKEQEAWEEATSEDSSVVIVDVKEPSPRVDVSCEPLEGVEKCSDSQSWEDIAPEIEPCAENRLDTKEEKSVEYEGDLKSGTAETEPVEQDSSQPSLPLVRADDPLRLDQELQQPQTQEKTSNSLTEDSKMANAKQLSSDAEAQKLGKPSAHASQSFCESSSETPFHFTLPKEGDIIPPLTGATPPLIGHLKLEPKRHSTPIGISNYPESTIATSDVMSESMVETHDPILGSGKGDSGAAPDVDDKLCLRMKLVSPETEASEESLQFNLEKPATGERKNGSTAVAESVASPQKTMSVLSCICEARQENEARSEDPPTTPIRGNLLHFPSSQGEEEKEKLEGDHTIRQSQQPMKPISPVKDPVSPASQKMVIQGPSSPQGEAMVTDVLEDQKEGRSTNKENPSKALIERPSQNNIGIQTMECSLRVPETVSAATQTIKNVCEQGTSTVDQNFGKQDATVQTERGSGEKPVSAPGDDTESLHSQGEEEFDMPQPPHGHVLHRHMRTIREVRTLVTRVITDVYYVDGTEVERKVTEETEEPIVECQECETEVSPSQTGGSSGDLGDISSFSSKASSLHRTSSGTSLSAMHSSGSSGKGAGPLRGKTSGTEPADFALPSSRGGPGKLRETAVPGPLGIEDISPNLSPDDKSFSRVVPRVPDSTRRTDVGAGALRRSDSPEIPFQAAAGPSDGLDASSPGNSFVGLRVVAKWSSNGYFYSGKITRDVGAGKYKLLFDDGYECDVLGKDILLCDPIPLDTEVTALSEDEYFSAGVVKGHRKESGELYYSIEKEGQRKWYKRMAVILSLEQGNRLREQYGLGPYEAVTPLTKAADISLDNLVEGKRKRRSNVSSPATPTASSSSSTTPTRKITESPRASMGVLSGKRKLITSEEERSPAKRGRKSATVKPGAVGAGEFVSPCESGDNTGEPSALEEQRGPLPLNKTLFLGYAFLLTMATTSDKLASRSKLPDGPTGSSEEEEEFLEIPPFNKQYTESQLRAGAGYILEDFNEAQCNTAYQCLLIADQHCRTRKYFLCLASGIPCVSHVWVHDSCHANQLQNYRNYLLPAGYSLEEQRILDWQPRENPFQNLKVLLVSDQQQNFLELWSEILMTGGAASVKQHHSSAHNKDIALGVFDVVVTDPSCPASVLKCAEALQLPVVSQEWVIQCLIVGERIGFKQHPKYKHDYVSH

SEQ ID NO: 10865 - protein, 361 aa, Homo sapiens
MWVLTPAAFAGKLLSVFRQPLSSLWRSLVPLFCWLRATFWLLATKRRKQQLVLRGPDETKEEEEDPPLPTTPTSVNYHFTRQCNYKCGFCFHTAKTSFVLPLEEAKRGLLLLKEAGMEKINFSGGEPFLQDRGEYLGKLVRFCKVELRLPSVSIVSNGSLIRERWFQNYGEYLDILAISCDSFDEEVNVLIGRGQGKKNHVENLQKLRRWCRDYRVAFKINSVINRFNVEEDMTEQIKALNPVRWKVFQCLLIEGENCGEDALREAERFVIGDEEFERFLERHKEVSCLVPESNQKMKDSYLILDEYMRFLNCRKGRKDPSKSILDVGVEEAIKFSGFDEKMFLKRGGKYIWSKADLKLDW

SEQ ID NO: 10866 - protein, 2090 aa, Homo sapiens
MDEVEQDQHEARLKELFDSFDTTGTGSLGQEELTDLCHMLSLEEVAPVLQQTLLQDNLLGRVHFDQFKEALILILSRTLSNEEHFQEPDCSLEAQPKYVRGGKRYGRRSLPEFQESVEEFPEVTVIEPLDEEARPSHIPAGDCSEHWKTQRSEEYEAEGQLRFWNPDDLNASQSGSSPPQDWIEEKLQEVCEDLGITRDGHLNRKKLVSICEQYGLQNVDGEMLEEVFHNLDPDGTMSVEDFFYGLFKNGKSLTPSASTPYRQLKRHLSMQSFDESGRRTTTSSAMTSTIGFRVFSCLDDGMGHASVERILDTWQEEGIENSQEILKALDFSLDGNINLTELTLALENELLVTKNSIHQAALASFKAEIRHLLERVDQVVREKEKLRSDLDKAEKLKSLMASEVDDHHAAIERRNEYNLRKLDEEYKERIAALKNELRKEREQILQQAGKQRLELEQEIEKAKTEENYIRDRLALSLKENSRLENELLENAEKLAEYENLTNKLQRNLENVLAEKFGDLDPSSAEFFLQEERLTQMRNEYERQCRVLQDQVDELQSELEEYRAQGRVLRLPLKNSPSEEVEANSGGIEPEHGLGSEECNPLNMSIEAELVIEQMKEQHHRDICCLRLELEDKVRHYEKQLDETVVSCKKAQENMKQRHENETHTLEKQISDLKNEIAELQGQAAVLKEAHHEATCRHEEEKKQLQVKLEEEKTHLQEKLRLQHEMELKARLTQAQASFEREREGLQSSAWTEEKVRGLTQELEQFHQEQLTSLVEKHTLEKEELRKELLEKHQRELQEGREKMETECNRRTSQIEAQFQSDCQKVTERCESALQSLEGRYRQELKDLQEQQREEKSQWEFEKDELTQECAEAQELLKETLKREKTTSLVLTQEREMLEKTYKEHLNSMVVERQQLLQDLEDLRNVSETQQSLLSDQILELKSSHKRELREREEVLCQAGASEQLASQRLERLEMEHDQERQEMMSKLLAMENIHKATCETADRERAEMSTEISRLQSKIKEMQQATSPLSMLQSGCQVIGEEEVEGDGALSLLQQGEQLLEENGDVLLSLQRAHEQAVKENVKMATEISRLQQRLQKLEPGLVMSSCLDEPATEFFGNTAEQTEQFLQQNRTKQVEGVTRRHVLSDLEDDEVRDLGSTGTSSVQRQEVKIEESEASVEGFSELENSEETRTESWELKNQISQLQEQLMMLCADCDRASEKKQDLLFDVSVLKKKLKMLERIPEASPKYKLLYEDVSRENDCLQEELRMMETRYDEALENNKELTAEVFRLQDELKKMEEVTETFLSLEKSYDEVKIENEGLNVLVLRLQGKIEKLQESVVQRCDCCLWEASLENLEIEPDGNILQLNQTLEECVPRVRSVHHVIEECKQENQYLEGNTQLLEKVKAHEIAWLHGTIQTHQERPRVQNQVILEENTTLLGFQDKHFQHQATIAELELEKTKLQELTRKLKERVTILVKQKDVLSHGEKEEELKAMMHDLQITCSEMQQKVELLRYESEKLQQENSILRNEITTLNEEDSISNLKLGTLNGSQEEMWQKTETVKQENAAVQKMVENLKKQISELKIKNQQLDLENTELSQKNSQNQEKLQELNQRLTEMLCQKEKEPGNSALEEREQEKFNLKEELERCKVQSSTLVSSLEAELSEVKIQTHIVQQENHLLKDELEKMKQLHRCPDLSDFQQKISSVLSYNEKLLKEKEALSEELNSCVDKLAKSSLLEHRIATMKQEQKSWEHQSASLKSQLVASQEKVQNLEDTVQNVNLQMSRMKSDLRVTQQEKEALKQEVMSLHKQLQNAGGKSWAPEIATHPSGLHNQQKRLSWDKLDHLMNEEQQLLWQENERLQTMVQNTKAELTHSREKVRQLESNLLPKHQKHLNPSGTMNPTEQEKLSLKRECDQFQKEQSPANRKVSQMNSLEQELETIHLENEGLKKKQVKLDEQLMEMQHLRSTATPSPSPHAWDLQLLQQQACPMVPREQFLQLQRQLLQAERINQHLQEELENRTSETNTPQGNQEQLVTVMEERMIEVEQKLKLVKRLLQEKVNQLKEQVSLPGHLCSPTSHSSFNSSFTSLYCH

SEQ ID NO: 10867 - protein, 1977 aa, Homo sapiens
MPGEQMDPTGSQLDSDFSQQDTPCLIIEDSQPESQVLEDDSGSHFSMLSRHLPNLQTHKENPVLDVVSNPEQTAGEERGDGNSGFNEHLKENKVADPVDSSNLDTCGSISQVIEQLPQPNRTSSVLGMSVESAPAVEEEKGEELEQKEKEKEEDTSGNTTHSLGAEDTASSQLGFGVLELSQSQDVEENTVPYEVDKEQLQSVTTNSGYTRLSDVDANTAIKHEEQSNEDIPIAEQSSKDIPVTAQPSKDVHVVKEQNPPPARSEDMPFSPKASVAAMEAKEQLSAQELMESGLQIQKSPEPEVLSTQEDLFDQSNKTVSSDGCSTPSREEGGCSLASTPATTLHLLQLSGQRSLVQDSLSTNSSDLVAPSPDAFRSTPFIVPSSPTEQEGRQDKPMDTSVLSEEGGEPFQKKLQSGEPVELENPPLLPESTVSPQASTPISQSTPVFPPGSLPIPSQPQFSHDIFIPSPSLEEQSNDGKKDGDMHSSSLTVECSKTSEIEPKNSPEDLGLSLTGDSCKLMLSTSEYSQSPKMESLSSHRIDEDGENTQIEDTEPMSPVLNSKFVPAENDSILMNPAQDGEVQLSQNDDKTKGDDTDTRDDISILATGCKGREETVAEDVCIDLTCDSGSQAVPSPATRSEALSSVLDQEEAMEIKEHHPEEGSSGSEVEEIPETPCESQGEELKEENMESVPLHLSLTETQSQGLCLQKEMPKKECSEAMEVETSVISIDSPQKLAILDQELEHKEQEAWEEATSEDSSVVIVDVKEPSPRVDVSCEPLEGVEKCSDSQSWEDIAPEIEPCAENRLDTKEEKSVEYEGDLKSGTAETEPVEQDSSQPSLPLVRADDPLRLDQELQQPQTQEKTSNSLTEDSKMANAKQLSSDAEAQKLGKPSAHASQSFCESSSETPFHFTLPKEGDIIPPLTGATPPLIGHLKLEPKRHSTPIGISNYPESTIATSDVMSESMVETHDPILGSGKGDSGAAPDVDDKLCLRMKLVSPETEASEESLQFNLEKPATGERKNGSTAVAESVASPQKTMSVLSCICEARQENEARSEDPPTTPIRGNLLHFPSSQGEEEKEKLEGDHTIRQSQQPMKPISPVKDPVSPASQKMVIQGPSSPQGEAMVTDVLEDQKEGRSTNKENPSKALIERPSQNNIGIQTMECSLRVPETVSAATQTIKNVCEQGTSTVDQNFGKQDATVQTERGSGEKPVSAPGDDTESLHSQGEEEFDMPQPPHGHVLHRHMRTIREVRTLVTRVITDVYYVDGTEVERKVTEETEEPIVECQECETEVSPSQTGGSSGDLGDISSFSSKASSLHRTSSGTSLSAMHSSGSSGKGAGPLRGKTSGTEPADFALPSSRGGPGKLSPRKGVSQTGTPVCEEDGDAGLGIRQGGKAPVTPRGRGRRGRPPSRTTGTRETAVPGPLGIEDISPNLSPDDKSFSRVVPRVPDSTRRTDVGAGALRRSDSPEIPFQAAAGPSDGLDASSPGNSFVGLRVVAKWSSNGYFYSGKITRDVGAGKYKLLFDDGYECDVLGKDILLCDPIPLDTEVTALSEDEYFSAGVVKGHRKESGELYYSIEKEGQRKWYKRMAVILSLEQGNRLREQYGLGPYEAVTPLTKAADISLDNLVEGKRKRRSNVSSPATPTASSSSSTTPTRKITESPRASMGVLSGKRKLITSEEERSPAKRGRKSATVKPGAVGAGEFVSPCESGDNTGEPSALEEQRGPLPLNKTLFLGYAFLLTMATTSDKLASRSKLPDGPTGSSEEEEEFLEIPPFNKQYTESQLRAGAGYILEDFNEAQCNTAYQCLLIADQHCRTRKYFLCLASGIPCVSHVWVHDSCHANQLQNYRNYLLPAGYSLEEQRILDWQPRENPFQNLKVLLVSDQQQNFLELWSEILMTGGAASVKQHHSSAHNKDIALGVFDVVVTDPSCPASVLKCAEALQLPVVSQEWVIQCLIVGERIGFKQHPKYKHDYVSH

SEQ ID NO: 10868 - protein, 690 aa, Homo sapiens
MAPWPELGDAQPNPDKYLEGAAGQQPTAPDKSKETNKTDNTEAPVTKIELLPSYSTATLIDEPTEVDDPWNLPTLQDSGIKWSERDTKGKILCFFQGIGRLILLLGFLYFFVCSLDILSSAFQLVGGKMAGQFFSNSSIMSNPLLGLVIGVLVTVLVQSSSTSTSIVVSMVSSSLLTVRAAIPIIMGANIGTSITNTIVALMQVGDRSEFRRAFAGATVHDFFNWLSVLVLLPVEVATHYLEIITQLIVESFHFKNGEDAPDLLKVITKPFTKLIVQLDKKVISQIAMNDEKAKNKSLVKIWCKTFTNKTQINVTVPSTANCTSPSLCWTDGIQNWTMKNVTYKENIAKCQHIFVNFHLPDLAVGTILLILSLLVLCGCLIMIVKILGSVLKGQVATVIKKTINTDFPFPFAWLTGYLAILVGAGMTFIVQSSSVFTSALTPLIGIGVITIERAYPLTLGSNIGTTTTAILAALASPGNALRSSLQIALCHFFFNISGILLWYPIPFTRLPIRMAKGLGNISAKYRWFAVFYLIIFFFLIPLTVFGLSLAGWRVLVGVGVPVVFIIILVLCLRLLQSRCPRVLPKKLQNWNFLPLWMRSLKPWDAVVSKFTGCFQMRCCCCCRVCCRACCLLCDCPKCCRCSKCCEDLEEAQEGQDVPVKAPETFDNITISREAQGEVPASDSKTECTAL

SEQ ID NO: 10869 - protein, 2404 aa, Homo sapiens
MAENLLDGPPNPKRAKLSSPGFSANDSTDFGSLFDLENDLPDELIPNGGELGLLNSGNLVPDAASKHKQLSELLRGGSGSSINPGIGNVSASSPVQQGLGGQAQGQPNSANMASLSAMGKSPLSQGDSSAPSLPKQAASTSGPTPAASQALNPQAQKQVGLATSSPATSQTGPGICMNANFNQTHPGLLNSNSGHSLINQASQGQAQVMNGSLGAAGRGRGAGMPYPTPAMQGASSSVLAETLTQVSPQMTGHAGLNTAQAGGMAKMGITGNTSPFGQPFSQAGGQPMGATGVNPQLASKQSMVNSLPTFPTDIKNTSVTNVPNMSQMQTSVGIVPTQAIATGPTADPEKRKLIQQQLVLLLHAHKCQRREQANGEVRACSLPHCRTMKNVLNHMTHCQAGKACQAILGSPASGIQNTIGSVGTGQQNATSLSNPNPIDPSSMQRAYAALGLPYMNQPQTQLQPQVPGQQPAQPQTHQQMRTLNPLGNNPMNIPAGGITTDQQPPNLISESALPTSLGATNPLMNDGSNSGNIGTLSTIPTAAPPSSTGVRKGWHEHVTQDLRSHLVHKLVQAIFPTPDPAALKDRRMENLVAYAKKVEGDMYESANSRDEYYHLLAEKIYKIQKELEEKRRSRLHKQGILGNQPALPAPGAQPPVIPQAQPVRPPNGPLSLPVNRMQVSQGMNSFNPMSLGNVQLPQAPMGPRAASPMNHSVQMNSMGSVPGMAISPSRMPQPPNMMGAHTNNMMAQAPAQSQFLPQNQFPSSSGAMSVGMGQPPAQTGVSQGQVPGAALPNPLNMLGPQASQLPCPPVTQSPLHPTPPPASTAAGMPSLQHTTPPGMTPPQPAAPTQPSTPVSSSGQTPTPTPGSVPSATQTQSTPTVQAAAQAQVTPQPQTPVQPPSVATPQSSQQQPTPVHAQPPGTPLSQAAASIDNRVPTPSSVASAETNSQQPGPDVPVLEMKTETQAEDTEPDPGESKGEPRSEMMEEDLQGASQVKEETDIAEQKSEPMEVDEKKPEVKVEVKEEEESSSNGTASQSTSPSQPRKKIFKPEELRQALMPTLEALYRQDPESLPFRQPVDPQLLGIPDYFDIVKNPMDLSTIKRKLDTGQYQEPWQYVDDVWLMFNNAWLYNRKTSRVYKFCSKLAEVFEQEIDPVMQSLGYCCGRKYEFSPQTLCCYGKQLCTIPRDAAYYSYQNRYHFCEKCFTEIQGENVTLGDDPSQPQTTISKDQFEKKKNDTLDPEPFVDCKECGRKMHQICVLHYDIIWPSGFVCDNCLKKTGRPRKENKFSAKRLQTTRLGNHLEDRVNKFLRRQNHPEAGEVFVRVVASSDKTVEVKPGMKSRFVDSGEMSESFPYRTKALFAFEEIDGVDVCFFGMHVQEYGSDCPPPNTRRVYISYLDSIHFFRPRCLRTAVYHEILIGYLEYVKKLGYVTGHIWACPPSEGDDYIFHCHPPDQKIPKPKRLQEWYKKMLDKAFAERIIHDYKDIFKQATEDRLTSAKELPYFEGDFWPNVLEESIKELEQEEEERKKEESTAASETTEGSQGDSKNAKKKNNKKTNKNKSSISRANKKKPSMPNVSNDLSQKLYATMEKHKEVFFVIHLHAGPVINTLPPIVDPDPLLSCDLMDGRDAFLTLARDKHWEFSSLRRSKWSTLCMLVELHTQGQDRFVYTCNECKHHVETRWHCTVCEDYDLCINCYNTKSHAHKMVKWGLGLDDEGSSQGEPQSKSPQESRRLSIQRCIQSLVHACQCRNANCSLPSCQKMKRVVQHTKGCKRKTNGGCPVCKQLIALCCYHAKHCQENKCPVPFCLNIKHKLRQQQIQHRLQQAQLMRRRMATMNTRNVPQQSLPSPTSAPPGTPTQQPSTPQTPQPPAQPQPSPVSMSPAGFPSVARTQPPTTVSTGKPTSQVPAPPPPAQPPPAAVEAARQIEREAQQQQHLYRVNINNSMPPGRTGMGTPGSQMAPVSLNVPRPNQVSGPVMPSMPPGQWQQAPLPQQQPMPGLPRPVISMQAQAAVAGPRMPSVQPPRSISPSALQDLLRTLKSPSSPQQQQQVLNILKSNPQLMAAFIKQRTAKYVANQPGMQPQPGLQSQPGMQPQPGMHQQPSLQNLNAMQAGVPRPGVPPQQQAMGGLNPQGQALNIMNPGHNPNMASMNPQYREMLRRQLLQQQQQQQQQQQQQQQQQQGSAGMAGGMAGHGQFQQPQGPGGYPPAMQQQQRMQQHLPLQGSSMGQMAAQMGQLGQMGQPGLGADSTPNIQQALQQRILQQQQMKQQIGSPGQPNPMSPQQHMLSGQPQASHLPGQQIATSLSNQVRSPAPVQSPRPQSQPPHSSPSPRIQPQPSPHHVSPQTGSPHPGLAVTMASSIDQGHLGNPEQSAMLPQLNTPSRSALSSELSLVGDTTGDTLEKFVEGL

SEQ ID NO: 10870 - protein, 312 aa, Homo sapiens
MDRSTNLDIEELKMTREQYILATQQNNLPRTENAQLYPVGIYGWRKRCLYFFVLLLLVTMIVNLAMTIWILKVMNFTVDGMGNLRVTKKGIRLEGISEFLLPLYVKEIHSRKDSPLVLQSDRNVTVNARNHMGQLTGQLTIGADAVEAQCKRFEVRASEDGRVLFSADEDEITIGAEKLKVTGTEGAVFGHSVETPHIRAEPSQDLRLESPTRSLIMEAPRGVQVSAAAGDFKATCRKELHLQSTEGEIFLNAETIKLGNLPTGSFSSSSPSSSSSRQTVYELCVCPNGKLYLSPAGVGSTCQSSSNICLWS

SEQ ID NO: 10871 - protein, 545 aa, Homo sapiens
MLKQSERRRSWSYRPWNTTENEGSQHRRSICSLGARSGSQASIHGWTEGNYNYYIEEDEDGEEEDQWKDDLAEEDQQAGEVTTAKPEGPSDPPALLSTLNVNVGGHSYQLDYCELAGFPKTRLGRLATSTSRSRQLSLCDDYEEQTDEYFFDRDPAVFQLVYNFYLSGVLLVLDGLCPRRFLEELGYWGVRLKYTPRCCRICFEERRDELSERLKIQHELRAQAQVEEAEELFRDMRFYGPQRRRLWNLMEKPFSSVAAKAIGVASSTFVLVSVVALALNTVEEMQQHSGQGEGGPDLRPILEHVEMLCMGFFTLEYLLRLASTPDLRRFARSALNLVDLVAILPLYLQLLLECFTGEGHQRGQTVGSVGKVGQVLRVMRLMRIFRILKLARHSTGLRAFGFTLRQCYQQVGCLLLFIAMGIFTFSAAVYSVEHDVPSTNFTTIPHSWWWAAVSISTVGYGDMYPETHLGRFFAFLCIAFGIILNGMPISILYNKFSDYYSKLKAYEYTTIRRERGEVNFMQRARKKIAECLLGSNPQLTPRQEN

SEQ ID NO: 10872 - protein, 845 aa, Homo sapiens
MGTSALWALWLLLALCWAPRESGATGTGRKAKCEPSQFQCTNGRCITLLWKCDGDEDCVDGSDEKNCVKKTCAESDFVCNNGQCVPSRWKCDGDPDCEDGSDESPEQCHMRTCRIHEISCGAHSTQCIPVSWRCDGENDCDSGEDEENCGNITCSPDEFTCSSGRCISRNFVCNGQDDCSDGSDELDCAPPTCGAHEFQCSTSSCIPISWVCDDDADCSDQSDESLEQCGRQPVIHTKCPASEIQCGSGECIHKKWRCDGDPDCKDGSDEVNCPSRTCRPDQFECEDGSCIHGSRQCNGIRDCVDGSDEVNCKNVNQCLGPGKFKCRSGECIDISKVCNQEQDCRDWSDEPLKECHINECLVNNGGCSHICKDLVIGYECDCAAGFELIDRKTCGDIDECQNPGICSQICINLKGGYKCECSRGYQMDLATGVCKAVGKEPSLIFTNRRDIRKIGLERKEYIQLVEQLRNTVALDADIAAQKLFWADLSQKAIFSASIDDKVGRHVKMIDNVYNPAAIAVDWVYKTIYWTDAASKTISVATLDGTKRKFLFNSDLREPASIAVDPLSGFVYWSDWGEPAKIEKAGMNGFDRRPLVTADIQWPNGITLDLIKSRLYWLDSKLHMLSSVDLNGQDRRIVLKSLEFLAHPLALTIFEDRVYWIDGENEAVYGANKFTGSELATLVNNLNDAQDIIVYHELVQPSGKNWCEEDMENGGCEYLCLPAPQINDHSPKYTCSCPSGYNVEENGRDCQRINVTTAVSEVSVPPKGTSAAWAILPLLLLVMAAVGGYLMWRNWQHKNMKSMNFDNPVYLKTTEEDLSIDIGRHSASVGHTYPAISVVSTDDDLA

SEQ ID NO: 10873 - protein, 873 aa, Homo sapiens
MGTSALWALWLLLALCWAPRESGATGTGRKAKCEPSQFQCTNGRCITLLWKCDGDEDCVDGSDEKNCVKKTCAESDFVCNNGQCVPSRWKCDGDPDCEDGSDESPEQCHMRTCRIHEISCGAHSTQCIPVSWRCDGENDCDSGEDEENCGNITCSPDEFTCSSGRCISRNFVCNGQDDCSDGSDELDCAPPTCGAHEFQCSTSSCIPISWVCDDDADCSDQSDESLEQCGRQPVIHTKCPASEIQCGSGECIHKKWRCDGDPDCKDGSDEVNCPSRTCRPDQFECEDGSCIHGSRQCNGIRDCVDGSDEVNCKNVNQCLGPGKFKCRSGECIDISKVCNQEQDCRDWSDEPLKECHINECLVNNGGCSHICKDLVIGYECDCAAGFELIDRKTCGDIDECQNPGICSQICINLKGGYKCECSRGYQMDLATGVCKAVGKEPSLIFTNRRDIRKIGLERKEYIQLVEQLRNTVALDADIAAQKLFWADLSQKAIFSASIDDKVGRHVKMIDNVYNPAAIAVDWVYKTIYWTDAASKTISVATLDGTKRKFLFNSDLREPASIAVDPLSGFVYWSDWGEPAKIEKAGMNGFDRRPLVTADIQWPNGITLDLIKSRLYWLDSKLHMLSSVDLNGQDRRIVLKSLEFLAHPLALTIFEDRVYWIDGENEAVYGANKFTGSELATLVNNLNDAQDIIVYHELVQPSGKNWCEEDMENGGCEYLCLPAPQINDHSPKYTCSCPSGYNVEENGRDCQSTATTVTYSETKDTNTTEISATSGLVPGGINVTTAVSEVSVPPKGTSAAWAILPLLLLVMAAVGGYLMWRNWQHKNMKSMNFDNPVYLKTTEEDLSIDIGRHSASVGHTYPAISVVSTDDDLA

SEQ ID NO: 10874 - protein, 460 aa, Homo sapiens
MGSNSGQAGRHIYKSLADDGPFDSVEPPKRPTSRLIMHSMAMFGREFCYAVEAAYVTPVLLSVGLPSSLYSIVWFLSPILGFLLQPVVGSASDHCRSRWGRRRPYILTLGVMMLVGMALYLNGATVVAALIANPRRKLVWAISVTMIGVVLFDFAADFIDGPIKAYLFDVCSHQDKEKGLHYHALFTGFGGALGYLLGAIDWAHLELGRLLGTEFQVMFFFSALVLTLCFTVHLCSISEAPLTEVAKGIPPQQTPQDPPLSSDGMYEYGSIEKVKNGYVNPELAMQGAKNKNHAEQTRRAMTLKSLLRALVNMPPHYRYLCISHLIGWTAFLSNMLFFTDFMGQIVYRGDPYSAHNSTEFLIYERGVEVGCWGLCINSVFSSLYSYFQKVLVSYIGLKGLYFTGYLLFGLGTGFIGLFPNVYSTLVLCSLFGVMSSTLYTVPFNLITEYHREEEKEVCCH

SEQ ID NO: 10875 - protein, 1552 aa, Homo sapiens
MRTTKVYKLVIHKKGFGGSDDELVVNPKVFPHIKLGDIVEIAHPNDEYSPLLLQVKSLKEDLQKETISVDQTVTQVFRLRPYQDVYVNVVDPKDVTLDLVELTFKDQYIGRGDMWRLKKSLVSTCAYITQKVEFAGIRAQAGELWVKNEKVMCGYISEDTRVVFRSTSAMVYIFIQMSCEMWDFDIYGDLYFEKAVNGFLADLFTKWKEKNCSHEVTVVLFSRTFYDAKSVDEFPEINRASIRQDHKGRFYEDFYKVVVQNERREEWTSLLVTIKKLFIQYPVLVRLEQAEGFPQGDNSTSAQGNYLEAINLSFNVFDKHYINRNFDRTGQMSVVITPGVGVFEVDRLLMILTKQRMIDNGIGVDLVCMGEQPLHAVPLFKLHNRSAPRDSRLGDDYNIPHWINHSFYTSKSQLFCNSFTPRIKLAGKKPASEKAKNGRDTSLGSPKESENALPIQVDYDAYDAQVFRLPGPSRAQCLTTCRSVRERESHSRKSASSCDVSSSPSLPSRTLPTEEVRSQASDDSSLGKSANILMIPHPHLHQYEVSSSLGYTSTRDVLENMMEPPQRDSSAPGRFHVGSAESMLHVRPGGYTPQRALINPFAPSRMPMKLTSNRRRWMHTFPVGPSGEAIQIHHQTRQNMAELQGSGQRDPTHSSAELLELAYHEAAGRHSNSRQPGDGMSFLNFSGTEELSVGLLSNSGAGMNPRTQNKDSLEDSVSTSPDPILTLSAPPVVPGFCCTVGVDWKSLTTPACLPLTTDYFPDRQGLQNDYTEGCYDLLPEADIDRRDEDGVQMTAQQVFEEFICQRLMQGYQIIVQPKTQKPNPAVPPPLSSSPLYSRGLVSRNRPEEEDQYWLSMGRTFHKVTLKDKMITVTRYLPKYPYESAQIHYTYSLCPSHSDSEFVSCWVEFSHERLEEYKWNYLDQYICSAGSEDFSLIESLKFWRTRFLLLPACVTATKRITEGEAHCDIYGDRPRADEDEWQLLDGFVRFVEGLNRIRRRHRSDRMMRKGTAMKGLQMTGPISTHSLESTAPPVGKKGTSALSALLEMEASQKCLGEQQAAVHGGKSSAQSAESSSVAMTPTYMDSPRKDGAFFMEFVRSPRTASSAFYPQVSVDQTATPMLDGTSLGICTGQSMDRGNSQTFGNSQNIGEQGYSSTNSSDSSSQQLVASSLTSSSTLTEILEAMKHPSTGVQLLSEQKGLSPYCFISAEVVHWLVNHVEGIQTQAMAIDIMQKMLEEQLITHASGEAWRTFIYGFYFYKIVTDKEPDRVAMQQPATTWHTAGVDDFASFQRKWFEVAFVAEELVHSEIPAFLLPWLPSRPASYASRHSSFSRSFGGRSQAAALLAATVPEQRTVTLDVDVNNRTDRLEWCSCYYHGNFSLNAAFEIKLHWMAVTAAVLFEMVQGWHRKATSCGFLLVPVLEGPFALPSYLYGDPLRAQLFIPLNISCLLKEGSEHLFDSLGLYKINILPLLLTSLLRTSLSISTLQEQCFCSCPTPSASSQGSSGGGGTPPAPPTRTCSARSGSATTGPTTPCSPKHGAPAPQGMKSLLIGC

SEQ ID NO: 10876 - protein, 1603 aa, Homo sapiens
MRTTKVYKLVIHKKGFGGSDDELVVNPKVFPHIKLGDIVEIAHPNDEYSPLLLQVKSLKEDLQKETISVDQTVTQVFRLRPYQDVYVNVVDPKDVTLDLVELTFKDQYIGRGDMWRLKKSLVSTCAYITQKVEFAGIRAQAGELWVKNEKVMCGYISEDTRVVFRSTSAMVYIFIQMSCEMWDFDIYGDLYFEKAVNGFLADLFTKWKEKNCSHEVTVVLFSRTFYDAKSVDEFPEINRASIRQDHKGRFYEDFYKVVVQNERREEWTSLLVTIKKLFIQYPVLVRLEQAEGFPQGDNSTSAQGNYLEAINLSFNVFDKHYINRNFDRTGQMSVVITPGVGVFEVDRLLMILTKQRMIDNGIGVDLVCMGEQPLHAVPLFKLHNRSAPRDSRLGDDYNIPHWINHSFYTSKSQLFCNSFTPRIKLAGKKPASEKAKNGRDTSLGSPKESENALPIQVDYDAYDAQVFRLPGPSRAQCLTTCRSVRERESHSRKSASSCDVSSSPSLPSRTLPTEEVRSQASDDSSLGKSANILMIPHPHLHQYEVSSSLGYTSTRDVLENMMEPPQRDSSAPGRFHVGSAESMLHVRPGGYTPQRALINPFAPSRMPMKLTSNRRRWMHTFPVGPSGEAIQIHHQTRQNMAELQGSGQRDPTHSSAELLELAYHEAAGRHSNSRQPGDGMSFLNFSGTEELSVGLLSNSGAGMNPRTQNKDSLEDSVSTSPDPILTLSAPPVVPGFCCTVGVDWKSLTTPACLPLTTDYFPDRQGLQNDYTEGCYDLLPEADIDRRDEDGVQMTAQQVFEEFICQRLMQGYQIIVQPKTQKPNPAVPPPLSSSPLYSRGLVSRNRPEEEDQYWLSMGRTFHKVTLKDKMITVTRYLPKYPYESAQIHYTYSLCPSHSDSEFVSCWVEFSHERLEEYKWNYLDQYICSAGSEDFSLIESLKFWRTRFLLLPACVTATKRITEGEAHCDIYGDRPRADEDEWQLLDGFVRFVEGLNRIRRRHRSDRMMRKGTAMKGLQMTGPISTHSLESTAPPVGKKGTSALSALLEMEASQKCLGEQQAAVHGGKSSAQSAESSSVAMTPTYMDSPRKDGAFFMEFVRSPRTASSAFYPQVSVDQTATPMLDGTSLGICTGQSMDRGNSQTFGNSQNIGEQGYSSTNSSDSSSQQLVASSLTSSSTLTEILEAMKHPSTGVQLLSEQKGLSPYCFISAEVVHWLVNHVEGIQTQAMAIDIMQKMLEEQLITHASGEAWRTFIYGFYFYKIVTDKEPDRVAMQQPATTWHTAGVDDFASFQRKWFEVAFVAEELVHSEIPAFLLPWLPSRPASYASRHSSFSRSFGGRSQAAALLAATVPEQRTVTLDVDVNNRTDRLEWCSCYYHGNFSLNAAFEIKLHWMAVTAAVLFEMVQGWHRKATSCGFLLVPVLEGPFALPSYLYGDPLRAQLFIPLNISCLLKEGSEHLFDSFEPETYWDRMHLFQEAIAHRFGFVQDKYSASAFNFPAENKPQYIHVTGTVFLQLPYSKRKFSGQQRRRRNSTSSTNQNMFCEERVGYNWAYNTMLTKTWRSSATGDEKFADRLLKDFTDFCINRDNRLVTFWTSCLEKMHASAP

SEQ ID NO: 10877 - protein, 57 aa, Homo sapiens
MSWDPNPVPRTLRCWRLRRASETALQSSRRAVEDQLKICGHRRDADVFELFLSKKTG

SEQ ID NO: 10878 - protein, 317 aa, Homo sapiens
MGLLLPLALCILVLCCGAMSPPQLALNPSALLSRGCNDSDVLAVAGFALRDINKDRKDGYVLRLNRVNDAQEYRRAISKKKIYMTCPDCPSSIPTDSSNHQVLEAATESLAKYNNENTSKQYSLFKVTRASSQWVVGPSYFVEYLIKESPCTKSQASSCSLQSSDSVPVGLCKGSLTRTHWEKFVSVTCDFFESQAPATGSENSAVNQKPTNLPKVEESQQKNTPPTDSPSKAGPRGSVQYLPDLDDKNSQEKGPQEAFPVHLDLTTNPQGETLDISFLFLEPMEEKLVVLPFPKEKARTAECPGPAQNASPLVLPP

SEQ ID NO: 10879 - protein, 345 aa, Homo sapiens
MGLLLPLALCILVLCCGAMSPPQLALNPSALLSRGCNDSDVLAVAGFALRDINKDRKDGYVLRLNRVNDAQEYRRVYGQCKAIFYMNNPSRVLYLAAYNCTLRPVSKKKIYMTCPDCPSSIPTDSSNHQVLEAATESLAKYNNENTSKQYSLFKVTRASSQWVVGPSYFVEYLIKESPCTKSQASSCSLQSSDSVPVGLCKGSLTRTHWEKFVSVTCDFFESQAPATGSENSAVNQKPTNLPKVEESQQKNTPPTDSPSKAGPRGSVQYLPDLDDKNSQEKGPQEAFPVHLDLTTNPQGETLDISFLFLEPMEEKLVVLPFPKEKARTAECPGPAQNASPLVLPP

SEQ ID NO: 10880 - protein, 229 aa, Homo sapiens
MNLEGLEMIAVLIVIVLFVKLLEQFGLIEAGLEDSVEDELEMATVRHRPEALELLEAQSKFTKKELQILYRGFKNECPSGVVNEETFKEIYSQFFPQGDSTTYAHFLFNAFDTDHNGAVSFEDFIKGLSILLRGTVQEKLNWAFNLYDINKDGYITKEEMLDIMKAIYDMMGKCTYPVLKEDAPRQHVETFFQKMDKNKDGVVTIDEFIESCQKDENIMRSMQLFENVI

SEQ ID NO: 10881 - protein, 752 aa, Homo sapiens
MGEERWVSLTPEEFDQLQKYSEYSSKKIKDALTEFNEGGSLKQYDPHEPISYDVFKLFMRAYLEVDLPQPLSTHLFLAFSQKPRHETSDHPTEGASNSEANSADTNIQNADNATKADEACAPDTESNMAEKQAPAEDQVAATPLEPPVPRSSSSESPVVYLKDVVCYLSLLETGRPQDKLEFMFRLYDSDENGLLDQAEMDCIVNQMLHIAQYLEWDPTELRPILKEMLQGMDYDRDGFVSLQEWVHGGMTTIPLLVLLGMDDSGSKGDGRHAWTMKHFKKPTYCNFCHIMLMGVRKQGLCCTYCKYTVHERCVSRNIPGCVKTYSKAKRSGEFHRKCELSTLCDGGELRDHILLPTSICPITRDRPGEKSDGCVSAKGELVMQYKIIPTPGTHPLLVLVNPKSGGRQGERILRKFHYLLNPKQVFNLDNGGPTPGLNFFRDTPDFRVLACGGDGTVGWILDCIDKANFAKHPPVAVLPLGTGNDLARCLRWGGGYEGGSLTKILKDIEQSPLVMLDRWHLEVIPREEVENGDQVPYSIMNNYFSIGVDASIAHRFHVMREKHPEKFNSRMKNKLWYFEFGTSETFAATCKKLHDHIELECDGVGVDLSNIFLEGIAILNIPSMYGGTNLWGENKKNRAVIRESRKGVTDPKELKFCVQDLSDQLLEVVGLEGAMEMGQIYTGLKSAGRRLAQCASVTIRTNKLLPMQVDGEPWMQPCCTIKITHKNQAPMMMGPPQKSSFFSLRRKSRSKD

SEQ ID NO: 10882 - protein, 713 aa, Homo sapiens
MLCVGRLGGLGARAAALPPRRAGRGSLEAGIRARRVSTSWSPVGAAFNVKPQGSRLDLFGERRGLFGVPELSAPEGFHIAQEKALRKTELLVDRACSTPPGPQTVLIFDELSDSLCRVADLADFVKIAHPEPAFREAAEEACRSIGTMVEKLNTNVDLYQSLQKLLADKKLVDSLDPETRRVAELFMFDFEISGIHLDKEKRKRAVDLNVKILDLSSTFLMGTNFPNKIEKHLLPEHIRRNFTSAGDHIIIDGLHAESPDDLVREAAYKIFLYPNAGQLKCLEELLSSRDLLAKLVGYSTFSHRALQGTIAKNPETVMQFLEKLSDKLSERTLKDFEMIRGMKMKLNPQNSEVMPWDPPYYSGVIRAERYNIEPSLYCPFFSLGACMEGLNILLNRLLGISLYAEQPAKGEVWSEDVRKLAVVHESEGLLGYIYCDFFQRADKPHQDCHFTIRGGRLKEDGDYQLPVVVLMLNLPRSSRSSPTLLTPSMMENLFHEMGHAMHSMLGRTRYQHVTGTRCPTDFAEVPSILMEYFANDYRVVNQFARHYQTGQPLPKNMVSRLCESKKVCAAADMQLQVFYATLDQIYHGKHPLRNSTTDILKETQEKFYGLPYVPNTAWQLRFSHLVGYGARYYSYLMSRAVASMVWKECFLQDPFNRAAGERYRREMLAHGGGREPMLMVEGMLQKCPSVDDFVSALVSDLDLDFETFLMDSE

SEQ ID NO: 10883 - protein, 766 aa, Homo sapiens
MSPEGHPSRWARPRRPCICPSSLCSPREPRSGPAVGRGGAAHHRVPAGHTPGPQLLQPHLHLPQGQTWLCLQPSPAGLVKLGVHCVTCQKVAIKIVNREKLSESVLMKVEREIAILKLIEHPHVLKLHDVYENKKYLYLVLEHVSGGELFDYLVKKGRLTPKEARKFFRQIISALDFCHSHSICHRDLKPENLLLDEKNNIRIADFGMASLQVGDSLLETSCGSPHYACPEVIRGEKYDGRKADVWSCGVILFALLVGALPFDDDNLRQLLEKVKRGVFHMPHFIPPDCQSLLRGMIEVDAARRLTLEHIQKHIWYIGGKNEPEPEQPIPRKVQIRSLPSLEDIDPDVLDSMHSLGCFRDRNKLLQDLLSEEENQEKMIYFLLLDRKERYPSQEDEDLPPRNEIDPPRKRVDSPMLNRHGKRRPERKSMEVLSVTDGGSPVPARRAIEMAQHGQRSRSISGASSGLSTSPLSSPRVTPHPSPRGSPLPTPKGTPVHTPKESPAGTPNPTPPSSPSVGGVPWRARLNSIKNSFLGSPRFHRRKLQVPTPEEMSNLTPESSPELAKKSWFGNFISLEKEEQIFVVIKDKPLSSIKADIVHAFLSIPSLSHSVISQTSFRAEYKATGGPAVFQKPVKFQVDITYTEGGEAQKENGIYSVTFTLLSGPSRRFKRVVETIQAQLLSTHDPPAAQHLSDTTNCMEMMTGRLSKCDEKNGQAAQAPSTPAKRSAHGPLGDSAAAGPGPGGDAEYPTGKDTAKMGPPTARREQP

SEQ ID NO: 10884 - protein, 760 aa, Homo sapiens
MRALAVLSVTLVMACTEAFFPFISRGKELLWGKPEESRVSSVLEESKRLVDTAMYATMQRNLKKRGILSPAQLLSFSKLPEPTSGVIARAAEIMETSIQAMKRKVNLKTQQSQHPTDALSEDLLSIIANMSGCLPYMLPPKCPNTCLANKYRPITGACNNRDHPRWGASNTALARWLPPVYEDGFSQPRGWNPGFLYNGFPLPPVREVTRHVIQVSNEVVTDDDRYSDLLMAWGQYIDHDIAFTPQSTSKAAFGGGADCQMTCENQNPCFPIQIITLRDYIPRILGPEAFQQYVGPYEGYDSTANPTVSNVFSTAAFRFGHATIHPLVRRLDASFQEHPDLPGLWLHQAFFSPWTLLRGGGLDPLIRGLLARPAKLQVQDQLMNEELTERLFVLSNSSTLDLASINLQRGRDHGLPGYNEWREFCGLPRLETPADLSTAIASRSVADKILDLYKHPDNIDVWLGGLAENFLPRARTGPLFACLIGKQMKALRDGDWFWWENSHVFTDAQRRELEKHSLSRVICDNTGLTRVPMDAFQVGKFPEDFESCDSITGMNLEAWRETFPQDDKCGFPESVENGDFVHCEESGRRVLVYSCRHGYELQGREQLTCTQEGWDFQPPLCKDVNECADGAHPPCHASARCRNTKGGFQCLCADPYELGDDGRTCVDSGRLPRVTWISMSLAALLIGGFAGLTSTVICRWTRTGTKSTLPISETGGGTPELRCGKHQAVGTSPQRAAAQDSEQESAGMEGRDTHRLPRAL

SEQ ID NO: 10885 - protein, 876 aa, Homo sapiens
MRALAVLSVTLVMACTEAFFPFISRGKELLWGKPEESRVSSVLEESKRLVDTAMYATMQRNLKKRGILSPAQLLSFSKLPEPTSGVIARAAEIMETSIQAMKRKVNLKTQQSQHPTDALSEDLLSIIANMSGCLPYMLPPKCPNTCLANKYRPITGACNNRDHPRWGASNTALARWLPPVYEDGFSQPRGWNPGFLYNGFPLPPVREVTRHVIQVSNEVVTDDDRYSDLLMAWGQYIDHDIAFTPQSTSKAAFGGGADCQMTCENQNPCFPIQLPEEARPAAGTACLPFYRSSAACGTGDQGALFGNLSTANPRQQMNGLTSFLDASTVYGSSPALERQLRNWTSAEGLLRVHARLRDSGRAYLPFVPPRAPAACAPEPGIPGETRGPCFLAGDGRASEVPSLTALHTLWLREHNRLAAALKALNAHWSADAVYQEARKVVGALHQIITLRDYIPRILGPEAFQQYVGPYEGYDSTANPTVSNVFSTAAFRFGHATIHPLVRRLDASFQEHPDLPGLWLHQAFFSPWTLLRGGYNEWREFCGLPRLETPADLSTAIASRSVADKILDLYKHPDNIDVWLGGLAENFLPRARTGPLFACLIGKQMKALRDGDWFWWENSHVFTDAQRRELEKHSLSRVICDNTGLTRVPMDAFQVGKFPEDFESCDSITGMNLEAWRETFPQDDKCGFPESVENGDFVHCEESGRRVLVYSCRHGYELQGREQLTCTQEGWDFQPPLCKDVNECADGAHPPCHASARCRNTKGGFQCLCADPYELGDDGRTCVDSGRLPRVTWISMSLAALLIGGFAGLTSTVICRWTRTGTKSTLPISETGGGTPELRCGKHQAVGTSPQRAAAQDSEQESAGMEGRDTHRLPRAL

SEQ ID NO: 10886 - protein, 78 aa, Homo sapiens
MNLCLSALLFFLVILLPSGKGMFGNDGVKVRTCTSQKAVCFFGCPPGYRWIAFCHNILSCCKNMTRFQPPQAKDPWVH

SEQ ID NO: 10887 - protein, 794 aa, Homo sapiens
MLTRNCLSLLLWVLFDGGLLTPLQPQPQQTLATEPRENVIHLPGQRSHFQRVKRGWVWNQFFVLEEYVGSEPQYVGKLHSDLDKGEGTVKYTLSGDGAGTVFTIDETTGDIHAIRSLDREEKPFYTLRAQAVDIETRKPLEPESEFIIKVQDINDNEPKFLDGPYVATVPEMSPVGAYVLQVKATDADDPTYGNSARVVYSILQGQPYFSIDPKTGVIRTALPNMDREVKEQYQVLIQAKDMGGQLGGLAGTTIVNITLTDVNDNPPRFPKSIFHLKVPESSPIGSAIGRIRAVDPDFGQNAEIEYNIVPGDGGNLFDIVTDEDTQEGVIKLKKPLDFETKKAYTFKVEASNLHLDHRFHSAGPFKDTATVKISVLDVDEPPVFSKPLYTMEVYEDTPVGTIIGAVTAQDLDVGSSAVRYFIDWKSDGDSYFTIDGNEGTIATNELLDRESTAQYNFSIIASKVSNPLLTSKVNILINVLDVNEFPPEISVPYETAVCENAKPGQIIQIVSAADRDLSPAGQQFSFRLSPEAAIKPNFTVRDFRNNTAGIETRRNGYSRRQQELYFLPVVIEDSSYPVQSSTNTMTIRVCRCDSDGTILSCNVEAIFLPVGLSTGALIAILLCIVILLAIVVLYVALRRQKKKDTLMTSKEDIRDNVIHYDDEGGGEEDTQAFDIGALRNPKVIEENKIRRDIKPDSLCLPRQRPPMEDNTDIRDFIHQRLQENDVDPTAPPYDSLATYAYEGSGSVAESLSSIDSLTTEADQDYDYLTDWGPRFKVLADMFGEEESYNPDKVT

SEQ ID NO: 10888 - protein, 423 aa, Homo sapiens
MALKVLLEQEKTFFTLLVLLGYLSCKVTCESGDCRQQEFRDRSGNCVPCNQCGPGMELSKECGFGYGEDAQCVTCRLHRFKEDWGFQKCKPCLDCAVVNRFQKANCSATSDAICGDCLPGFYRKTKLVGFQDMECVPCGDPPPPYEPHCASKVNLVKIASTASSPRDTALAAVICSALATVLLALLILCVIYCKRQFMEKKPSWSLRSQDIQYNGSELSCFDRPQLHEYAHRACCQCRRDSVQTCGPVRLLPSMCCEEACSPNPATLGCGVHSAASLQARNAGPAGEMVPTFFGSLTQSICGEFSDAWPLMQNPMGGDNISFCDSYPELTGEDIHSLNPELESSTSLDSNSSQDLVGGAVPVQSHSENFTAATDLSRYNNTLVESASTQDALTMRSQLDQESGAVIHPATQTSLQVRQRLGSL

SEQ ID NO: 10889 - protein, 4579 aa, Homo sapiens
METKENRWVPVTVLPGCVGCRTVAALASWTVRDVKERIFAETGFPVSEQRLWRGGRELSDWIKIGDLTSKNCHLFVNLQSKGLKGGGRFGQTTPPLVDFLKDILRRYPEGGQILKELIQNAEDAGATEVKFLYDETQYGTETLWSKDMAPYQGPALYVYNNAVFTPEDWHGIQEIARSRKKDDPLKVGRFGIGFNSVYHITDVPCIFSGDQIGMLDPHQTLFGPHESGQCWNLKDDSKEISELSDQFAPFVGIFGSTKETFINGNFPGTFFRFPLRLQPSQLSSNLYNKQKVLELFESFRADADTVLLFLKSVQDVSLYVREADGTEKLVFRVTSSESKALKHERPNSIKILGTAISNYCKKTPSNNITCVTYHVNIVLEEESTKDAQKTSWLVCNSVGGRGISSKLDSLADELKFVPIIGIAMPLSSRDDEAKGATSDFSGKAFCFLPLPPGEESSTGLPVHISGFFGLTDNRRSIKWRELDQWRDPAALWNEFLVMNVVPKAYATLILDSIKRLEMEKSSDFPLSVDVIYKLWPEASKVKVHWQPVLEPLFSELLQNAVIYSISCDWVRLEQVYFSELDENLEYTKTVLNYLQSSGKQIAKVPGNVDAAVQLTAASGTTPVRKVTPAWVRQVLRKCAHLGCAEEKLHLLEFVLSDQAYSELLGLELLPLQNGNFVPFSSSVSDQDVIYITSAEYPRSLFPSLEGRFILDNLKPHLVAALKEAAQTRGRPCTQLQLLNPERFARLIKEVMNTFWPGRELIVQWYPFDENRNHPSVSWLKMVWKNLYIHFSEDLTLFDEMPLIPRTILEEGQTCVELIRLRIPSLVILDDESEAQLPEFLADIVQKLGGFVLKKLDASIQHPLIKKYIHSPLPSAVLQIMEKMPLQKLCNQITSLLPTHKDALRKFLASLTDSSEKEKRIIQELAIFKRINHSSDQGISSYTKLKGCKVLHHTAKLPADLRLSISVIDSSDEATIRLANMLKIEQLKTTSCLKLVLKDIENAFYSHEEVTQLMLWVLENLSSLKNENPNVLEWLTPLKFIQISQEQMVSAGELFDPDIEVLKDLFCNEEGTYFPPSVFTSPDILHSLRQIGLKNEASLKEKDVVQVAKKIEALQVGACPDQDVLLKKAKTLLLVLNKNHTLLQSSEGKMTLKKIKWVPACKERPPNYPGSLVWKGDLCNLCAPPDMCDVGHAILIGSSLPLVESIHVNLEKALGIFTKPSLSAVLKHFKIVVDWYSSKTFSDEDYYQFQHILLEIYGFMHDHLNEGKDSFRALKFPWVWTGKKFCPLAQAVIKPIHDLDLQPYLHNVPKTMAKFHQLFKVCGSIEELTSDHISMVIQKIYLKSDQDLSEQESKQNLHLMLNIIRWLYSNQIPASPNTPVPIHHSKNPSKLIMKPIHECCYCDIKVDDLNDLLEDSVEPIILVHEDIPMKTAEWLKVPCLSTRLINPENMGFEQSGQREPLTVRIKNILEEYPSVSDIFKELLQNADDANATECSFLIDMRRNMDIRENLLDPGMAACHGPALWSFNNSQFSDSDFVNITRLGESLKRGEVDKVGKFGLGFNSVYHITDIPIIMSREFMIMFDPNINHISKHIKDKSNPGIKINWSKQQKRLRKFPNQFKPFIDVFGCQLPLTVEAPYSYNGTLFRLSFRTQQEAKVSEVSSTCYNTADIYSLVDEFSLCGHRLIIFTQSVKSMYLKYLKIEETNPSLAQDTVIIKKKSCSSKALNTPVLSVLKEAAKLMKTCSSSNKKLPSDEPKSSCILQITVEEFHHVFRRIADLQSPLFRGPDDDPAALFEMAKSGQSKKPSDELSQKTVECTTWLLCTCMDTGEALKFSLSESGRRLGLVPCGAVGVQLSEIQDQKWTVKPHIGEVFCYLPLRIKTGLPVHINGCFAVTSNRKEIWKTDTKGRWNTTFMRHVIVKAYLQVLSVLRDLATSGELMDYTYYAVWPDPDLVHDDFSVICQGFYEDIAHGKGKELTKVFSDGSTWVSMKNVRFLDDSILKRRDVGSAAFKIFLKYLKKTGSKNLCAVELPSSVKLGFEEAGCKQILLENTFSEKQFFSEVFFPNIQEIEAELRDPLMIFVLNEKVDEFSGVLRVTPCIPCSLEGHPLVLPSRLIHPEGRVAKLFDIKDGRFPYGSTQDYLNPIILIKLVQLGMAKDDILWDDMLERAVSVAEINKSDHVAACLRSSILLSLIDEKLKIRDPRAKDFAAKYQTIRFLPFLTKPAGFSLDWKGNSFKPETMFAATDLYTAEHQDIVCLLQPILNENSHSFRGCGSVSLAVKEFLGLLKKPTVDLVINQLKEVAKSVDDGITLYQENITNACYKYLHEALMQNEITKMSIIDKLKPFSFILVENAYVDSEKVSFHLNFEAAPYLYQLPNKYKNNFRELFETVGVRQSCTVEDFALVLESIDQERGTKQITEENFQLCRRIISEGIWSLIREKKQEFCEKNYGKILLPDTNLMLLPAKSLCYNDCPWIKVKDTTVKYCHADIPREVAVKLGAVPKRHKALERYASNVCFTTLGTEFGQKEKLTSRIKSILNAYPSEKEMLKELLQNADDAKATEICFVFDPRQHPVDRIFDDKWAPLQGPALCVYNNQPFTEDDVRGIQNLGKGTKEGNPYKTGQYGIGFNSVYHITDCPSFISGNDILCIFDPHARYAPGATSISPGRMFRDLDADFRTQFSDVLDLYLGTHFKLDNCTMFRFPLRNAEMAKVSEISSVPASDRMVQNLLDKLRSDGAELLMFLNHMEKISICEIDKSTGALNVLYSVKGKITDGDRLKRKQFHASVIDSVTKKRQLKDIPVQQITYTMDTEDSEGNLTTWLICNRSGFSSMEKVSKSVISAHKNQDITLFPRGGVAACITHNYKKPHRAFCFLPLSLETGLPFHVNGHFALDSARRNLWRDDNGVGVRSDWNNSLMTALIAPAYVELLIQLKKRYFPGSDPTLSVLQNTPIHVVKDTLKKFLSFFPVNRLDLQPDLYCLVKALYNCIHEDMKRLLPVVRAPNIDGSDLHSAVIITWINMSTSNKTRPFFDNLLQDELQHLKNADYNITTRKTVAENVYRLKHLLLEIGFNLVYNCDETANLYHCLIDADIPVSYVTPADIRSFLMTFSSPDTNCHIGKLPCRLQQTNLKLFHSLKLLVDYCFKDAEENEIEVEGLPLLITLDSVLQTFDAKRPKFLTTYHELIPSRKDLFMNTLYLKYSNILLNCKVAKVFDISSFADLLSSVLPREYKTKSCTKWKDNFASESWLKNAWHFISESVSVKEDQEETKPTFDIVVDTLKDWALLPGTKFTVSANQLVVPEGDVLLPLSLMHIAVFPNAQSDKVFHALMKAGCIQLALNKICSKDSAFVPLLSCHTANIESPTSILKALHYMVQTSTFRAEKLVENDFEALLMYFNCNLNHLMSQDDIKILKSLPCYKSISGRYVSIGKFGTCYVLTKSIPSAEVEKWTQSSSSAFLEEKIHLKELYEVIGCVPVDDLEVYLKHLLPKIENLSYDAKLEHLIYLKNRLSSAEELSEIKEQLFEKLESLLIIHDANSRLKQAKHFYDRTVRVFEVMLPEKLFIPNDFFKKLEQLIKPKNHVTFMTSWVEFLRNIGLKYILSQQQLLQFAKEISVRANTENWSKETLQNTVDILLHHIFQERMDLLSGNFLKELSLIPFLCPERAPAEFIRFHPQYQEVNGTLPLIKFNGAQVNPKFKQCDVLQLLWTSCPILPEKATPLSIKEQEGSDLGPQEQLEQVLNMLNVNLDPPLDKVINNCRNICNITTLDEEMVKTRAKVLRSIYEFLSAEKREFRFQLRGVAFVMVEDGWKLLKPEEVVINLEYESDFKPYLYKLPLELGTFHQLFKHLGTEDIISTKQYVEVLSRIFKNSEGKQLDPNEMRTVKRVVSGLFRSLQNDSVKVRSDLENVRDLALYLPSQDGRLVKSSILVFDDAPHYKSRIQGNIGVQMLVDLSQCYLGKDHGFHTKLIMLFPQKLRPRLLSSILEEQLDEETPKVCQFGALCSLQGRLQLLLSSEQFITGLIRIMKHENDNAFLANEEKAIRLCKALREGLKVSCFEKLQTTLRVKGFNPIPHSRSETFAFLKRFGNAVILLYIQHSDSKDINFLLALAMTLKSATDNLISDTSYLIAMLGCNDIYRIGEKLDSLGVKYDSSEPSKLELPMPGTPIPAEIHYTLLMDPMNVFYPGEYVGYLVDAEGGDIYGSYQPTYTYAIIVQEVEREDADNSSFLGKIYQIDIGYSEYKIVSSLDLYKFSRPEESSQSRDSAPSTPTSPTEFLTPGLRSIPPLFSGRESHKTSSKHQSPKKLKVNSLPEILKEVTSVVEQAWKLPESERKKIIRRLYLKWHPDKNPENHDIANEVFKHLQNEINRLEKQAFLDQNADRASRRTFSTSASRFQSDKYSFQRFYTSWNQEATSHKSERQQQNKEKCPPSAGQTYSQRFFVPPTFKSVGNPVEARRWLRQARANFSAARNDLHKNANEWVCFKCYLSTKLALIAADYAVRGKSDKDVKPTALAQKIEEYSQQLEGLTNDVHTLEAYGVDSLKTRYPDLLPFPQIPNDRFTSEVAMRVMECTACIIIKLENFMQQKV

SEQ ID NO: 10890 - protein, 1194 aa, Homo sapiens
METRRRLEQERATMQMTPGEFRRPRLASFGGMGTTSSLPSFVGSGNHNPAKHQLQNGYQGNGDYGSYAPAAPTTSSMGSSIRHSPLSSGISTPVTNVSPMHLQHIREQMAIALKRLKELEEQVRTIPVLQVKISVLQEEKRQLVSQLKNQRAASQINVCGVRKRSYSAGNASQLEQLSRARRSGGELYIDYEEEEMETVEQSTQRIKEFRQLTADMQALEQKIQDSSCEASSELRENGECRSVAVGAEENMNDIVVYHRGSRSCKDAAVGTLVEMRNCGVSVTEAMLGVMTEADKEIELQQQTIESLKEKIYRLEVQLRETTHDREMTKLKQELQAAGSRKKVDKATMAQPLVFSKVVEAVVQTRDQMVGSHMDLVDTCVGTSVETNSVGISCQPECKNKVVGPELPMNWWIVKERVEMHDRCAGRSVEMCDKSVSVEVSVCETGSNTEESVNDLTLLKTNLNLKEVRSIGCGDCSVDVTVCSPKECASRGVNTEAVSQVEAAVMAVPRTADQDTSTDLEQVHQFTNTETATLIESCTNTCLSTLDKQTSTQTVETRTVAVGEGRVKDINSSTKTRSIGVGTLLSGHSGFDRPSAVKTKESGVGQININDNYLVGLKMRTIACGPPQLTVGLTASRRSVGVGDDPVGESLENPQPQAPLGMMTGLDHYIERIQKLLAEQQTLLAENYSELAEAFGEPHSQMGSLNSQLISTLSSINSVMKSASTEELRNPDFQKTSLGKITGNYLGYTCKCGGLQSGSPLSSQTSQPEQEVGTSEGKPISSLDAFPTQEGTLSPVNLTDDQIAAGLYACTNNESTLKSIMKKKDGNKDSNGAKKNLQFVGINGGYETTSSDDSSSDESSSSESDDECDVIEYPLEEEEEEEDEDTRGMAEGHHAVNIEGLKSARVEDEMQVQECEPEKVEIRERYELSEKMLSACNLLKNTINDPKALTSKDMRFCLNTLQHEWFRVSSQKSAIPAMVGDYIAAFEAISPDVLRYVINLADGNGNTALHYSVSHSNFEIVKLLLDADVCNVDHQNKAGYTPIMLAALAAVEAEKDMRIVEELFGCGDVNAKASQAGQTALMLAVSHGRIDMVKGLLACGADVNIQDDEGSTALMCASEHGHVEIVKLLLAQPGCNGHLEDNDGSTALSIALEAGHKDIAVLLYAHVNFAKAQSPGTPRLGRKTSPGPTHRGSFD

SEQ ID NO: 10891 - protein, 1352 aa, Homo sapiens
MAHTTKVNGSASGKAGDILSGDQDKEQKDPYFVETPYGYQLDLDFLKYVDDIQKGNTIKRLNIQKRRKPSVPCPEPRTTSGQQGIWTSTESLSSSNSDDNKQCPNFLIARSQVTSTPISKPPPPLETSLPFLTIPENRQLPPPSPQLPKHNLHVTKTLMETRRRLEQERATMQMTPGEFRRPRLASFGGMGTTSSLPSFVGSGNHNPAKHQLQNGYQGNGDYGSYAPAAPTTSSMGSSIRHSPLSSGISTPVTNVSPMHLQHIREQMAIALKRLKELEEQVRTIPVLQVKISVLQEEKRQLVSQLKNQRAASQINVCGVRKRSYSAGNASQLEQLSRARRSGGELYIDYEEEEMETVEQSTQRIKEFRQLTADMQALEQKIQDSSCEASSELRENGECRSVAVGAEENMNDIVVYHRGSRSCKDAAVGTLVEMRNCGVSVTEAMLGVMTEADKEIELQQQTIESLKEKIYRLEVQLRETTHDREMTKLKQELQAAGSRKKVDKATMAQPLVFSKVVEAVVQTRDQMVGSHMDLVDTCVGTSVETNSVGISCQPECKNKVVGPELPMNWWIVKERVEMHDRCAGRSVEMCDKSVSVEVSVCETGSNTEESVNDLTLLKTNLNLKEVRSIGCGDCSVDVTVCSPKECASRGVNTEAVSQVEAAVMAVPRTADQDTSTDLEQVHQFTNTETATLIESCTNTCLSTLDKQTSTQTVETRTVAVGEGRVKDINSSTKTRSIGVGTLLSGHSGFDRPSAVKTKESGVGQININDNYLVGLKMRTIACGPPQLTVGLTASRRSVGVGDDPVGESLENPQPQAPLGMMTGLDHYIERIQKLLAEQQTLLAENYSELAEAFGEPHSQMGSLNSQLISTLSSINSVMKSASTEELRNPDFQKTSLGKITGNYLGYTCKCGGLQSGSPLSSQTSQPEQEVGTSEGKPISSLDAFPTQEGTLSPVNLTDDQIAAGLYACTNNESTLKSIMKKKDGNKDSNGAKKNLQFVGINGGYETTSSDDSSSDESSSSESDDECDVIEYPLEEEEEEEDEDTRGMAEGHHAVNIEGLKSARVEDEMQVQECEPEKVEIRERYELSEKMLSACNLLKNTINDPKALTSKDMRFCLNTLQHEWFRVSSQKSAIPAMVGDYIAAFEAISPDVLRYVINLADGNGNTALHYSVSHSNFEIVKLLLDADVCNVDHQNKAGYTPIMLAALAAVEAEKDMRIVEELFGCGDVNAKASQAGQTALMLAVSHGRIDMVKGLLACGADVNIQDDEGSTALMCASEHGHVEIVKLLLAQPGCNGHLEDNDGSTALSIALEAGHKDIAVLLYAHVNFAKAQSPGTPRLGRKTSPGPTHRGSFD

SEQ ID NO: 10892 - protein, 600 aa, Homo sapiens
MDKGLSELSPMQQALIYSFCENHDKAIEVLDGISWNRAEMTMCALLAKVQMKAKRTKEAVEVLKKALDAISHSDKGPDATAISADCLYNLGLCYMEEGNLQMAFDSFTKAVKANPDFAESFYQRGLCKVKLHKDSSILDFNRAITLNPKHYQAYLSRVAFYGLKGRYSKAILNCNKAIKIYPESVRAYLYRGVLKYYNKTYKLAITDLTTAISMDKNSYTAFYNRALCYTKIRELQMALTDYGIVLLLDATETVKLNTFLNRGLIYVELGQYGFALEDFKQAALISRTNGSLCHATAMCHHRINEFEEAVNFFTWALKINPCFLDAYVGRGNSYMEYGHDEATKQAQKDFLKALHINPAYIKARISFGYNLQAQGKFQKAWNHFTIAIDTDPKNYLAYEGRAVVCLQMGNNFAAMQDINAAMKISTTAEFLTNRGVIHEFMGHKQNAMKDYQDAITLNPKYSLAYFNAGNIYFHHRQFSQASDYFSKALKFDPENEYVLMNRAITNTILKKYEEAKEDFANVIESCPFWAAVYFNRAHFYYCLKQYELAEEDLNKALSLKPNDALVYNFRAKVRGKIGLIEEAMADYNQALDLEDYASVI

SEQ ID NO: 10893 - protein, 1566 aa, Homo sapiens
MCGEDASNAMPVRRETNICLKSGWAAHPCHFTQVRDSSVYKVRLFQANTAQHVQGLLCPGYQWGNRVIFGKSSGPEFLQEVYTAVTYHNKSPDFYEEVKIKLPAKLTVNHHLLFTFYHISCQQKQGASVETLLGYSWLPILLNERLQTGSYCLPVALEKLPPNYSMHSAEKVPLQNPPIKWAEGHKGVFNIEVQAVSSVHTQDNHLEKFFTLCHSLESQVTFPIRVLDQKISEMALEHELKLSIICLNSSRLEPLVLFLHLVLDKLFQLSVQPMVIAGQTANFSQFAFESVVAIANSLHNSKDLSKDQHGRNCLLASYVHYVFRLPEVQRDVPKSGAPTALLDPRSYHTYGRTSAAAVSSKLLQARVMSSSNPDLAGTHSAADEEVKNIMSSKIADRNCSRMSYYCSGSSDAPSSPAAPRPASKKHFHEELALQMVVSTGMVRETVFKYAWFFFELLVKSMAQHVHNMDKRDSFRRTRFSDRFMDDITTIVNVVTSEIAALLVKPQKENEQAEKMNISLAFFLYDLLSLMDRGFVFNLIRHYCSQLSAKLSNLPTLISMRLEFLRILCSHEHYLNLNLFFMNADTAPTSPCPSISSQNSSSCSSFQDQKIASMFDLTSEYRQQHFLTGLLFTELAAALDAEGEGISKVQRKAVSAIHSLLSSHDLDPRCVKPEVKVKIAALYLPLVGIILDALPQLCDFTVADTRRYRTSGSDEEQEGAGAINQNVALAIAGNNFNLKTSGIVLSSLPYKQYNMLNADTTRNLMICFLWIMKNADQSLIRKWIADLPSTQLNRILDLLFICVLCFEYKGKQSSDKVSTQVLQKSRDVKARLEEALLRGEGARGEMMRRRAPGNDRFPGLNENLRWKKEQTHWRQANEKLDKTKAELDQEALISGNLATEAHLIILDMQENIIQASSALDCKDSLLGGVLRVLVNSLNCDQSTTYLTHCFATLRALIAKFGDLLFEEEVEQCFDLCHQVLHHCSSSMDVTRSQACATLYLLMRFSFGATSNFARVKMQVTMSLASLVGRAPDFNEEHLRRSLRTILAYSEEDTAMQMTPFPTQVEELLCNLNSILYDTVKMREFQEDPEMLMDLMYRIAKSYQASPDLRLTWLQNMAEKHTKKKCYTEAAMCLVHAAALVAEYLSMLEDHSYLPVGSVSFQNISSNVLEESVVSEDTLSPDEDGVCAGQYFTESGLVGLLEQAAELFSTGGLYETVNEVYKLVIPILEAHREFRKLTLTHSKLQRAFDSIVNKDHKRMFGTYFRVGFFGSKFGDLDEQEFVYKEPAITKLPEISHRLEAFYGQCFGAEFVEVIKDSTPVDKTKLDPNKAYIQITFVEPYFDEYEMKDRVTYFEKNFNLRRFMYTTPFTLEGRPRGELHEQYRRNTVLTTMHAFPYIKTRISVIQKEEFVLTPIEVAIEDMKKKTLQLAVAINQEPPDAKMLQMVLQGSVGATVNQGPLEVAQVFLAEIPADPKLYRHHNKLRLCFKEFIMRCGEAVEKNKRLITADQREYQQELKKNYNKLKENLRPMIERKIPELYKPIFRVESQKRDSFHRSSFRKCETQLSQGS

SEQ ID NO: 10894 - protein, 234 aa, Homo sapiens [sequence omitted]

SEQ ID NO: 10895 - protein, 271 aa, Homo sapiens
MYYAVSQARVNAVPGTMLRPQRPGDLQLGASLYELVGYRQPPSSSSSSTSSTSSTSSSSTTAPLLPKAAREKPEAPAEPPGPGPGSGAHPGGSARPDAKEEQQQQLRRKINSRERKRMQDLNLAMDALREVILPYSAAHCQGAPGRKLSKIATLLLARNYILLLGSSLQELRRALGEGAGPAAPRLLLAGLPLLAAAPGSVLLAPGAVGPPDALRPAKYLSLALDEPPCGQFALPGGGAGGPGLCTCAVCKFPHLVPASLGLAAVQAQFSK

SEQ ID NO: 10896 - protein, 208 aa, Homo sapiens
MAPLGEVGNYFGVQDAVPFGNVPVLPVDSPVLLSDHLGQSEAGGLPRGPAVTDLDHLKGILRRRQLYCRTGFHLEIFPNGTIQGTRKDHSRFGILEFISIAVGLVSIRGVDSGLYLGMNEKGELYGSEKLTQECVFREQFEENWYNTYSSNLYKHVDTGRRYYVALNKDGTPREGTRTKRHQKFTHFLPRPVDPDKVPELYKDILSQS

SEQ ID NO: 10897 - protein, 2049 aa, Homo sapiens
MFSKKPHGDVKKSTQKVLDTKKDALTRLKHLRIVIENAESIDLKQFFDQHFSHIYYVFFENFVTIEASLKQKGHKSQREELDAILFIFEKILQLLPERIHQRWQFHSIGLILKKLLHTGNSLKIRREGVRLFLLWLQALQNNCSKEQLWMFSCLIPGFSAPQSEHGPRTLDNLINPPLNLQETQVTIEEITPLVPPQSGDKGQEDLTSYFLEALLKYIVIQVKSLEWKNKENQERGFSFLFSHFKKYYLPYIFPNICKENSLYHPILDIPQMRPKPHYVVIKKDAETNEAIYCTKEPFIKARVIVIRWLVSFWLEPKPHTGPHIPGMEGEVLPKNIQRAAASLVSREESKNDNADKTDRTTEPEQSHSNTSTLTEREPSSSSLCSIDEEHLTDIEIVRRVFSSKRSNVNFVTEIFRQAFLLPICEAAAMRKVVKVYQEWIQQEEKPLFMQEPEEIVITSSDLPCIENVTDHDISMEEGEKREEENGTNTADHVRNSSWAKNGSYQGALHNASEEATEQNIRAGTQAVLQVFIINSSNIFLLEPANEIKNLLDEHTDMCKRILNIYRYMVVQVSMDKKTWEQMLLVLLRVTESVLKMPSQAFLQFQGKKNMTLAGRLAGPLFQTLIVAWIKANLNVYISRELWDDLLSVLSSLTYWEELATEWSLTMETLTKVLARNLYSLDLSDLPLDKLSEQKQKKHKGKGVGHEFQKVSVDKSFSRGWSRDQPGQAPMRQRSATTTGSPGTEKARSIVRQKTVDIDDAQILPRSTRVRHFSQSEETGNEVFGALNEEQPLPRSSSTSDILEPFTVERAKEAEQNATRGSTEGSVQSCNGLFWKESCSDIGGSSANVPDLMDEFIAERLRSGNASTMTRRGSSPGSLEIPKDLPDILNKQNQMRPIDDPGVPSEWTSPASAGSSDLISSDSHSDSFSAFQYDGRKFDNFGFGTDTGVTSSADVDSGSGHHQSAEEQEVASLTTLHIDSETSSLNQQAFSAEVATITGSESASPVHSPLGSRSQTPSPSTLNIDHMEQKDLQLDEKLHHSVLQTPDDLEISEFPSECCSVMAGGTLTGWHADVATVMWRRMLGILGDVNSIMDPEIHAQVFDYLCELWQNLAKIRDNLGISTDNLTSPSPPVLIPPLRILTPWLFKATMLTDKYKQGKLHAYKLICNTMKRRQDVSPNRDFLTHFYNIMHCGLLHIDQDIVNTIIKHCSPQFFSLGLPGATMLIMDFIVAAGRVASSAFLNAPRVEAQVLLGSLVCFPNLYCELPSLHPNIPDVAVSQFTDVKELIIKTVLSSARDEPSGPARCVALCSLGIWICEELVHESHHPQIKEALNVICVSLKFTNKTVAHVACNMLHMLVHYVPRLQIYQPDSPLKIIQILIATITHLLPSTEASSYEMDKRLVVSLLLCLLDWIMALPLKTLLQPFHATGAESDKTEKSVLNCIYKVLHGCVYGAQCFSNPRYFPMSLSDLASVDYDPFMHLESLKEPEPLHSPDSERSSKLQPVTEVKTQMQHGLISIAARTVITHLVNHLGHYPMSGGPAMLTSQVCENHDNHYSESTELSPELFESPNIQFFVLNNTTLVSCIQIRSEENMPGGGLSAGLASANSNVRIIVRDLSGKYSWDSAILYGPPPVSGLSEPTSFMLSLSHQEKPEEPPTSNECLEDITVKDGLSLQFKRFRETVPTWDTIRDEEDVLDELLQYLGVTSPECLQRTGISLNIPAPQPVCISEKQENDVINAILKQHTEEKEFVEKHFNDLNMKAVEQDEPIPQKPQSAFYYCRLLLSILGMNSWDKRRSFHLLKKNEKLLRELRNLDSRQCRETHKIAVFYVAEGQEDKHSILTNTGGSQAYEDFVAGLGWEVNLTNHCGFMGGLQKNKSTGLTTPYFATSTVEVIFHVSTRMPSDSDDSLTKKLRHLGNDEVHIVWSEHTRDYRRGIIPTEFGDVLIVIYPMKNHMFSIQIMKKPEVPFFGPLFDGAIVNGKVLPIMVRATAINASRALKSLIPLYQNFYEERARYLQTIVQHHLEPTTFEDFAAQVFSPAPYHHLPSDADH

SEQ ID NO: 10898 - protein, 718 aa, Homo sapiens
MASSGEDISNDDDDMHPAAAGMADGVHLLGFSDEILLHILSHVPSTDLILNVRRTCRKLAALCLDKSLIHTVLLQKDYQASEDKVRQLVKEIGREIQQLSMAGCYWLPGSTVEHVARCRSLVKVNLSGCHLTSLRLSKMLSALQHLRSLAIDVSPGFDASQLSSECKATLSRVRELKQTLFTPSYGVVPCCTSLEKLLLYFEILDRTREGAILSGQLMVGQSNVPHYQNLRVFYARLAPGYINQEVVRLYLAVLSDRTPQNLHAFLISVPGSFAESGATKNLLDSMARNVVLDALQLPKSWLNGSSLLQHMKFNNPFYFSFSRCTLSGGHLIQQVINGGKDLRSLASLNLSGCVHCLSPDSLLRKAEDDIDSSILETLVASCCNLRHLNLSAAHHHSSEGLGRHLCQLLARLRHLRSLSLPVCSVADSAPRADRAPAQPAMHAVPRGFGKKVRVGVQSCPSPFSGQACPQPSSVFWSLLKNLPFLEHLELIGSNFSSAMPRNEPAIRNSLPPCSRAQSVGDSEVAAIGQLAFLRHLTLAQLPSVLTGSGLVNIGLQCQQLRSLSLANLGMMGKVVYMPALSDMLKHCKRLRDLRLEQPYFSANAQFFQALSQCPSLQRLCLVSRSGTLQPDAVLAFMARCLQVVMCHLFTGESLATCKSLQQSLLRSFQAERPALNVVIFPLLHEGLTDVIRDVPLVHLDEITLFKSRVAEEPPNLWW

SEQ ID NO: 10899 - protein, 1646 aa, Homo sapiens
MAVLRQLALLLWKNYTLQKRKVLVTVLELFLPLLFSGILIWLRLKIQSENVPNATIYPGQSIQELPLFFTFPPPGDTWELAYIPSHSDAAKTVTETVRRALVINMRVRGFPSEKDFEDYIRYDNCSSSVLAAVVFEHPFNHSKEPLPLAVKYHLRFSYTRRNYMWTQTGSFFLKETEGWHTTSLFPLFPNPGPREPTSPDGGEPGYIREGFLAVQHAVDRAIMEYHADAATRQLFQRLTVTIKRFPYPPFIADPFLVAIQYQLPLLLLLSFTYTALTIARAVVQEKERRLKEYMRMMGLSSWLHWSAWFLLFFLFLLIAASFMTLLFCVKVKPNVAVLSRSDPSLVLAFLLCFAISTISFSFMVSTFFSKGMGIQWRDLLSPVNVDDDFCFGQVLGMLLLDSVLYGLVTWYMEAVFPGQFGVPQPWYFFIMPSYWCGKPRAVAGKEEEDSDPEKALRNEYFEAEPEDLVAGIKIKHLSKVFRVGNKDRAAVRDLNLNLYEGQITVLLGHNGAGKTTTLSMLTGLFPPTSGRAYISGYEISQDMVQIRKSLGLCPQHDILFDNLTVAEHLYFYAQLKGLSRQKCPEEVKQMLHIIGLEDKWNSRSRFLSGGMRRKLSIGIALIAGSKVLILDEPTSGMDAISRRAIWDLLQRQKSDRTIVLTTHFMDEADLLGDRIAIMAKGELQCCGSSLFLKQKYGAGYHMTLVKEPHCNPEDISQLVHHHVPNATLESSAGAELSFILPRESTHRFEGLFAKLEKKQKELGIASFGASITTMEEVFLRVGKLVDSSMDIQAIQLPALQYQHERRASDWAVDSNLCGAMDPSDGIGALIEEERTAVKLNTGLALHCQQFWAMFLKKAAYSWREWKMVAAQVLVPLTCVTLALLAINYSSELFDDPMLRLTLGEYGRTVVPFSVPGTSQLGQQLSEHLKDALQAEGQEPREVLGDLEEFLIFRASVEGGGFNERCLVAASFRDVGERTVVNALFNNQAYHSPATALAVVDNLLFKLLCGPHASIVVSNFPQPRSALQAAKDQFNEGRKGFDIALNLLFAMAFLASTFSILAVSERAVQAKHVQFVSGVHVASFWLSALLWDLISFLIPSLLLLVVFKAFDVRAFTRDGHMADTLLLLLLYGWAIIPLMYLMNFFFLGAATAYTRLTIFNILSGIATFLMVTIMRIPAVKLEELSKTLDHVFLVLPNHCLGMAVSSFYENYETRRYCTSSEVAAHYCKKYNIQYQENFYAWSAPGVGRFVASMAASGCAYLILLFLIETNLLQRLRGILCALRRRRTLTELYTRMPVLPEDQDVADERTRILAPSPDSLLHTPLIIKELSKVYEQRVPLLAVDRLSLAVQKGECFGLLGFNGAGKTTTFKMLTGEESLTSGDAFVGGHRISSDVGKVRQRIGYCPQFDALLDHMTGREMLVMYARLRGIPERHIGACVENTLRGLLLEPHANKLVRTYSGGNKRKLSTGIALIGEPAVIFLDEPSTGMDPVARRLLWDTVARARESGKAIIITSHSMEECEALCTRLAIMVQGQFKCLGSPQHLKSKFGSGYSLRAKVQSEGQQEALEEFKAFVDLTFPGSVLEDEHQGMVHYHLPGRDLSWAKVFGILEKAKEKYGVDDYSVSQISLEQVFLSFAHLQPPTAEEGR

SEQ ID NO: 10900 - protein, 99 aa, Homo sapiens
MGLFMIIAILLFQKPTVTEQLKKCWNNYVQGHCRKICRVNEVPEALCENGRYCCLNIKELEACKKITKPPRPKPATLALTLQDYVTIIENFPSLKTQST

SEQ ID NO: 10901 - protein, 1004 aa, Homo sapiens
MRDFGFGVLQTAPLRSSSPGPLFCGEAYGPYAVGSVNPLPSATPFGPLSPPPLPVTGFLEAASPFSVPLGGGAGSPAAAASSSSPFLAHQQTMQDELLLGLTQQPARPLSGAAATEKLPDHHPGGGTIAGVTHLLPSQDFKPSLHHPSSSSASSCCCCRTSSPQDFSKRQQQQLSSQKRKEFSPPHLPHPPDSKPPPPPPPLHCPGRFSPPPPPAGPLLQPAQLAQRQQQQPPQQFSLLHQQHLSPQDFAPRQRPADLPPLPQLPPSPPAAPRRRHGGAGSPRKTPAAGEGSAAESPNAGLASSTPVNPAPGSMESPNHPLLNSPSNLLPGGALGAGAFSSLQSPDLPHPGGGGGGGGGGPPGGGGGGGSASPPPLPGFGTPWSVQTASPPPQPQQPPPTQPQQQPPPPQQPPQPQPQPPGSSATTPGGGSGGSLSAMPPPSPDSENGFYPGLPSSMNPAFFPSFSPVSPHGCTGLSVPTSGGGGGGFGGPFSATAVPPPPPPAMNIPQQQPPPPAAPQQPQSRRSPVSPQLQQQHQAAAAAFLQQRNSYNHHQPLLKQSPWSNHQSSGWGTGSMSWGAMHGRDHRRTGNMGIPGTMNQISPLKKPFSGNVIAPPKFTRSTPSLTPKSWIEDNVFRTDNNSNTLLPLQDRSRMYDSLNMHSLENSLIDIMRAEHDPLKGRLSYPHPGTDNLLMLNARSYGRRRGRSSLFPIDDGLLDDGHSDQVGVLNSPTCYSAHQNGERIERFSRKVFVGGLPPDIDEDEITASFRRFGPLVVDWPHKAESKSYFPPKGYAFLLFQEESSVQALIDACIEEDGKLYLCVSSPTIKDKPVQIRPWNLSDSDFVMDGSQPLDPRKTIFVGGVPRPLRAVELAMIMDRLYGGVCYAGIDTDPELKYPKGAGRVAFSNQQSYIAAISARFVQLQHGDIDKRVEVKPYVLDDQMCDECQGARCGGKFAPFFCANVTCLQYYCEFCWANIHSRAGREFHKPLVKEGADRPRQIHFRWN

SEQ ID NO: 10902 - protein, 111 aa, Homo sapiens
MKSLLFTLAVFMLLAQLVSGNWYVKKCLNDVGICKKKCKPEEMHVKNGWAMCGKQRDCCVPADRRANYPVFCVQTKTTRISTVTATTATTTLMMTTASMSSMAPTPVSPTG

SEQ ID NO: 10903 - protein, 999 aa, Homo sapiens
MRDFGFGVLQTAPLRSSSPGPLFCGEAYGPYAVGSVNPLPSATPFGPLSPPPLPVTGFLEAASPFSVPLGGGAGSPAAAASSSSPFLAHQQTMQDELLLGLTQQPARPLSGAAATEKLPDHHPGGGTIAGVTHLLPSQDFKPSLHHPSSSSASSCCCCRTSSPQDFSKRQQQQLSSQKRKEFSPPHLPHPPDSKPPPPPPPLHCPGRFSPPPPPAGPLLQPAQLAQRQQQQPPQQFSLLHQQHLSPQDFAPRQRPADLPPLPQLPPSPPAAPRRRHGGAGSPRKTPAAGEGSAAESPNAGLASSTPVNPAPGSMESPNHPLLNSPSNLLPGGALGAGAFSSLQSPDLPHPGGGGGGGGGGPPGGGGGGGSASPPPLPGFGTPWSVQTASPPPQPQQPPPTQPQQQPPPPQQPPQPQPQPPGSSATTPGGGSGGSLSAMPPPSPDSENGFYPGLPSSMNPAFFPSFSPVSPHGCTGLSVPTSGGGGGGFGGPFSATAVPPPPPPAMNIPQQQPPPPAAPQQPQSRRSPVSPQLQQQHQAAAAAFLQQRNSYNHHQPLLKQSPWSNHQSSGWGTGSMSWGAMHGRDHRRTGNMGIPGTMNQISPLKKPFSGNVIAPPKFTRSTPSLTPKSWIEDNVFRTDNNSNTLLPLQVRMDRSRMYDSLNMHSLENSLIDIMRAEHDPLKGRLSYPHPGTDNLLMLNGRSSLFPIDDGLLDDGHSDQVGVLNSPTCYSAHQNGERIERFSRKVFVGGLPPDIDEDEITASFRRFGPLVVDWPHKAESKSYFPPKGYAFLLFQEESSVQALIDACIEEDGKLYLCVSSPTIKDKPVQIRPWNLSDSDFVMDGSQPLDPRKTIFVGGVPRPLRAVELAMIMDRLYGGVCYAGIDTDPELKYPKGAGRVAFSNQQSYIAAISARFVQLQHGDIDKRVEVKPYVLDDQMCDECQGARCGGKFAPFFCANVTCLQYYCEFCWANIHSRAGREFHKPLVKEGADRPRQIHFRWN

SEQ ID NO: 10904 - protein, 565 aa, Homo sapiens
MEDSDSAAKQLGLAEAAAVAAAAAVAAAAAAAAGGEAEEPVLSRDEDSEEDADSEAERETPRVTAVAVMAAEPGHMDMGAEALPGPDEAAAAAAFAEVTTVTVANVGAAADNVFTTSVANAASISGHVLSGRTALQIGDSLNTEKATLIVVHTDGSIVETTGLKGPAAPLTPGPQSPPTPLAPGQEKGGTKYNWDPSVYDSELPVRCRNISGTLYKNRLGSGGRGRCIKQGENWYSPTEFEAMAGRASSKDWKRSIRYAGRPLQCLIQDGILNPHAASCTCAACCDDMTLSGPVRLFVPYKRRKKENELPTTPVKKDSPKNITLLPATAATTFTVTPSGQITTSGALTFDRASTVEATAVISESPAQGDVFAGATVQEASVQPPCRASHPEPHYPGYQDSCQIAPFPEAALPTSHPKIVLTSLPALAVPPPTPTKAAPPALVNGLELSEPRSWLYLEEMVNSLLNTAQQLKTLFEQAKHASTYREAATNQAKIHADAERKEQSCVNCGREAMSECTGCHKVNYCSTFCQRKDWKDHQHICGQSAAVTVQADEVHVAESVMEKVTV

SEQ ID NO: 10905 - protein, 338 aa, Homo sapiens
MAGSHPYFNLPDSTHPSPPSAPPSLRWHQRCQPSGATNGLLVALLGGGLPAGFVGPLSRMAYQGSNLPSLELLICRCLFHLPIALLLKLRGDPLLGPPDIRGWACFCALLNVLSIGCAYSAVQVVPAGNAATVRKGSSTVCSAVLTLCLESQGLGGYEWCGLLGSILGLIIILGPGLWTLQEGTTGVYTTLGYVQAFLGGLALSLGLLVYRSLHFPSCLPTVAFLSGLVGLLGCVPGLFVLQTPVLPSDLLSWSCVGAEGILALVSFTCVGYAVTKAHPALVCAVLHSEVVVALILQYYMLHETVALSDIMGAGVVLGSIAIITARNLSCERTGKVEE

SEQ ID NO: 10906 - protein, 1012 aa, Homo sapiens
MAEAALEAVRSELREFPAAARELCVPLAVPYLDKPPTPLHFYRDWVCPNRPCIIRNALQHWPALQKWSLPYFRATVGSTEVSVAVTPDGYADAVRGDRFMMPAERRLPLSFVLDVLEGRAQHPGVLYVQKQCSNLPSELPQLLPDLESHVPWASEALGKMPDAVNFWLGEAAAVTSLHKDHYENLYCVVSGEKHFLFHPPSDRPFIPYELYTPATYQLTEEGTFKVVDEEAMEKAEVSRTCLLTVRVLQAHRLPSKDLVTPSDCYVTLWLPTACSHRLQTRTVKNSSSPVWNQSFHFRIHRQLKNVMELKVFDQDLVTGDDPVLSVLFDAGTLRAGEFRRESFSLSPQGEGRLEVEFRLQSLADRGEWLVSNGVLVARELSCLHVQLEETGDQKSSEHRVQLVVPGSCEGPQEASVGTGTFRFHCPACWEQELSIRLQDAPEEQLKAPLSALPSGQVVRLVFPTSQEPLMRVELKKEAGLRELAVRLGFGPCAEEQAFLSRRKQVVAAALRQALQLDGDLQEDEIPVVAIMATGGGIRAMTSLYGQLAGLKELGLLDCVSYITGASGSTWALANLYEDPEWSQKDLAGPTELLKTQVTKNKLGVLAPSQLQRYRQELAERARLGYPSCFTNLWALINEALLHDEPHDHKLSDQREALSHGQNPLPIYCALNTKGQSLTTFEFGEWCEFSPYEVGFPKYGAFIPSELFGSEFFMGQLMKRLPESRICFLEGIWSNLYAANLQDSLYWASEPSQFWDRWVRNQANLDKEQVPLLKIEEPPSTAGRIAEFFTDLLTWRPLAQATHNFLRGLHFHKDYFQHPHFSTWKATTLDGLPNQLTPSEPHLCLLDVGYLINTSCLPLLQPTRDVDLILSLDYNLHGAFQQLQLLGRFCQEQGIPFPPISPSPEEQLQPRECHTFSDPTCPGAPAVLHFPLVSDSFREYSAPGVRRTPEEAAAGEVNLSSSDSPYHYTKVTYSQEDVDKLLHLTHYNVCNNQEQLLEALRQAVQRRRQRRPH

SEQ ID NO: 10907 - protein, 466 aa, Homo sapiens
MPYEIKKVFASLPQVERGVSKIIGGDPKGNNFLYTNGKCVILRNIDDHSRFVNCVRFSPDGNRFATASADGQIYIYDGKTGEKVCALGGSKAHDGGIYAISWSPDSTHLLSASGDKTSKIWDVSVNSVVSTFPMGSTVLDQQLGCLWQKDHLLSVSLSGYINYLDRNNPSKPLHVIKGHSKSIQCLTVHKNGGKSYIYSGSHDGHINYWDSETGENDSFAGKGHTNQVSRMTVDESGQLISCSMDDTVRYTSLMLRDYSGQGVVKLDVQPKCVAVGPGGYAVVVCIGQIVLLKDQRKCFSIDNPGYEPEVVAVHPGGDTVAIGGVDGNVRLYSILGTTLKDEGKLLEAKGPVTDVAYSHDGAFLAVCDASKVVTVFSVADGYSENNVFYGHHAKIVCLAWSPDNEHFASGGMDMMVYVWTLSDPETRVKIQDAHRLHHVSSLAWLDEHTLVTTSHDASVKEWTITY

SEQ ID NO: 10908 - protein, 606 aa, Homo sapiens
MPYEIKKVFASLPQVERGVSKIIGGDPKGNNFLYTNGKCVILRNIDNPALADIYTEHAHQVVVAKYAPSGFYIASGDVSGKLRIWDTTQKEHLLKYEYQPFAGKIKDIAWTEDSKRIAVVGEGREKFGAVFLWDSGSSVGEITGHNKVINSVDIKQSRPYRLATGSDDNCAAFFEGPPFKFKFTIGDHSRFVNCVRFSPDGNRFATASADGQIYIYDGKTGEKVCALGGSKAHDGGIYAISWSPDSTHLLSASGDKTSKIWDVSVNSVVSTFPMGSTVLDQQLGCLWQKDHLLSVSLSGYINYLDRNNPSKPLHVIKGHSKSIQCLTVHKNGGKSYIYSGSHDGHINYWDSETGENDSFAGKGHTNQVSRMTVDESGQLISCSMDDTVRYTSLMLRDYSGQGVVKLDVQPKCVAVGPGGYAVVVCIGQIVLLKDQRKCFSIDNPGYEPEVVAVHPGGDTVAIGGVDGNVRLYSILGTTLKDEGKLLEAKGPVTDVAYSHDGAFLAVCDASKVVTVFSVADGYSENNVFYGHHAKIVCLAWSPDNEHFASGGMDMMVYVWTLSDPETRVKIQDAHRLHHVSSLAWLDEHTLVTTSHDASVKEWTITY

SEQ ID NO: 10909 - protein, 1502 aa, Homo sapiens
MMAKNKEPRPPSYTISIVGLSGTEKDKGNCGVGKSCLCNRFVRSKADEYYPEHTSVLSTIDFGGRVVNNDHFLYWGDIIQNSEDGVECKIHVIEQTEFIDDQTFLPHRSTNLQPYIKRAAASKLQSAEKLMYICTDQLGLEQDFEQKQMPEGKLNVDGFLLCIDVSQGCNRKFDDQLKFVNNLFVQLSKSKKPVIIAATKCDECVDHYLREVQAFASNKKNLLVVETSARFNVNIETCFTALVQMLDKTRSKPKIIPYLDAYKTQRQLVVTATDKFEKLVQTVRDYHATWKTVSNKLKNHPDYEEYINLEGTRKARNTFSKHIEQLKQEHIRKRREEYINTLPRAFNTLLPNLEEIEHLNWSEALKLMEKRADFQLCFVVLEKTPWDETDHIDKINDRRIPFDLLSTLEAEKVYQNHVQHLISEKRRVEMKEKFKKTLEKIQFISPGQPWEEVMCFVMEDEAYKYITEADSKEVYGRHQREIVEKAKEEFQEMLFEHSELFYDLDLNATPSSDKMSEIHTVLSEEPRYKALQKLAPDRESLLLKHIGFVYHPTKETCLSGQNCTDIKVEQLLASSLLQLDHGRLRLYHDSTNIDKVNLFILGKDGLAQELANEIRTQSTDDEYALDGKIYELDLRPVDAKSPYFLSQLWTAAFKPHGCFCVFNSIESLSFIGEFIGKIRTEASQIRKDKYMANLPFTLILANQRDSISKNLPILRHQGQQLANKLQCPFVDVPAGTYPRKFNETQIKQALRGVLESVKHNLDVVSPIPANKDLSEADLRIVMCAMCGDPFSVDLILSPFLDSHSCSAAQAGQNNSLMLDKIIGEKRRRIQITILSYHSSIGVRKDELVHGYILVYSAKRKASMGMLRAFLSEVQDTIPVQLVAVTDSQADFFENEAIKELMTEGEHIATEITAKFTALYSLSQYHRQTEVFTLFFSDVLEKKNMIENSYLSDNTRESTHQSEDVFLPSPRDCFPYNNYPDSDDDTEAPPPYSPIGDDVQLLPTPSDRSRYRLDLEGNEYPIHSTPNCHDHERNHKVPPPIKPKPVVPKTNVKKLDPNLLKTIEAGIGKNPRKQTSRVPLAHPEDMDPSDNYAEPIDTIFKQKGYSDEIYVVPDDSQNRIKIRNSFVNNTQGDEENGFSDRTSKSHGERRPSKYKYKSKTLFSKAKSYYRRTHSDASDDEAFTTSKTKRKGRHRGSEEDPLLSPVETWKGGIDNPAITSDQELDDKKMKKKTHKVKEDKKQKKKTKNFNPPTRRNWESNYFGMPLQDLVTAEKPIPLFVEKCVEFIEDTGLCTEGLYRVSGNKTDQDNIQKQFDQDHNINLVSMEVTVNAVAGALKAFFADLPDPLIPYSLHPELLEAAKIPDKTERLHALKEIVKKFHPVNYDVFRYVITHLNRVSQQHKINLMTADNLSICFWPTLMRPDFENREFLSTTKIHQSVVETFIQQCQFFFYNGEIVETTNIVAPPPPSNPGQLVEPMVPLQLPPPLQPQLIQPQLQTDPLGII

SEQ ID NO: 10910 - protein, 725 aa, Homo sapiens
MATAATTTTTTTATVALTTSWDNATGRPTAEPDPILDNYVLLVVVMSLFVGGTLVVLSGVLLLCKRCWDVHQRLNRAMEEAEKTTTTYLDNGTHPAQDPDFRGEDPECQDAETERFLSTSSTGRRVSFNEAALFEQSRKTQDKGRQGGWQSTAAGASGMGGGRALMARCCRRYTLTEGDFHHLKNARLTHLHLPPLKIVTIHECDSGEASSATTPHPATSPKATLAIFQPPGKALTGRSVGPSSALPGDPYNSAAGATDFAEISPSASSDSGEGTSLDAGTRSTKAGGPGAAAGPGEAGPGSGAGTVLQFLTRLRRHASLDGASPYFKVKKWKLEPSQRAASLDTRGSPKRHHFQRQRAASESTEQEEGDAPQEDFIQYIARAGDAVAFPHPRPFLASPPPALGRLEAAEAAGGASPDSPPERGAGSAGPEQQQPPLEPDAERDAGPEQAQTSYRDLWSLRASLELHAAASDHSSSGNDRDSVRSGDSSGSGSGGAAPAFPPPSPPAPRPKDGEARRLLQMDSGYASIEGRGAGDDTEPPAAPARPRSPRAWPRRPRRDYSIDEKTDALFHEFLRHDPHFDDTPAAARHRARAHPHARKQWQRGRQHSDPGARAAPALAGTPAPPAGAARPARAPLRRGDSVDGPPDGRTLGGAGDDPAIPVIEEEPGGGGCPGSGLCVLPSGSVLDKLAAGLDERLFPPRLAEPVVATPALVAAAPTSPDHSPA

SEQ ID NO: 10911 - protein, 515 aa, Homo sapiens
MAWPYFLDCHRYFTREDEGCYDPLEKLRGGLEADEALPSGLPPTFIRFSHHSYAQMVRVLRRTASRCAHVARTYSIGRSFDGRELLVIEFSSRPGQHELMEPEVKLIGNIHGNEVAGREMLIYLAQYLCSEYLLGNPRIQRLLNTTRIHLLPSMNPDGYEVAAAEGAGYNGWTSGRQNAQNLDLNRNFPDLTSEYYRLAETRGARSDHIPIPQHYWWGKVAPETKAIMKWMQTIPFVLSASLHGGDLVVSYPFDFSKHPQEEKMFSPTPDEKMFKLLSRAYADVHPMMMDRSENRCGGNFLKRGSIINGADWYSFTGGMSDFNYLHTNCFEITVELGCVKFPPEEALYILWQHNKESLLNFVETVHRGIKGVVTDKFGKPVKNARISVKGIRHDITTAPDGDYWRLLPPGIHIVIAQAPGYAKVIKKVIIPARMKRAGRVDFILQPLGMGPKNFIHGLRRTGPHDPLGGASSLGEATEPDPLRARRQPSADGSKPWWWSYFTSLSTHRPRWLLKY

SEQ ID NO: 10912 - protein, 2400 aa, Homo sapiens
MNSTPRNAQAPSHRECFLPSVARTPSVTKVTPAKKITFLKRGDPRFAGVRLAVHQRAFKTFSALMDELSQRVPLSFGVRSVTTPRGLHSLSALEQLEDGGCYLCSDKKPPKTPSGPGRPQERNPTAQQLRDVEGQREAPGTSSSRKSLKTPRRILLIKNMDPRLQQTVVLSHRNTRNLAAFLGKASDLLRFPVKQLYTTSGKKVDSLQALLHSPSVLVCAGHEAFRTPAMKNARRSEAETLSGLTSRNKNGSWGPKTKPSVIHSRSPPGSTPRLPERPGPSNPPVGPAPGRHPQDTPAQSGPLVAGDDMKKKVRMNEDGSLSVEMKVRFHLVGEDTLLWSRRMGRASALTAASGEDPVLGEVDPLCCVWEGYPWGFSEPGVWGPRPCRVGCREVFGRGGQPGPKYEIWTNPLHASQGERVAARKRWGLAQHVRCSGLWGHGTAGRERCSQDSASPASSTGLPEGSEPESSCCPRTPEDGVDSASPSAQIGAERKAGGSLGEDPGLCIDGAGLGGPEQGGRLTPRARSEEGASSDSSASTGSHEGSSEWGGRPQGCPGKARAETSQQEASEGGDPASPALSLSSLRSDDLQAETQGQGTEQATGAAVTREPLVLGLSCSWDSEGASSTPSTCTSSQQGQRRHRSRASAMSSPSSPGLGRVAPRGHPRHSHYRKDTHSPLDSSVTKQVPRPPERRRACQDGSVPRYSGSSSSTRTQASGNLRPPSSGSLPSQDLLGTSSATVTPAVHSDFVSGVSPHNAPSAGWAGDAGSRTCSPAPIPPHTSDSCSKSGAASLGEEARDTPQPSSPLVLQVGRPEQGAVGPHRSHCCSQPGTQPAQEAQRGPSPEASWLCGRYCPTPPRGRPCPQRRSSSCGSTGSSHQSTARGPGGSPQEGTRQPGPTPSPGPNSGASRRSSASQGAGSRGLSEEKTLRSGGGPQGQEEASGVSPSSLPRSSPEAVVREWLDNIPEEPILMTYELADETTGAAGGGLRGPEVDPGDDHSLEGLGEPAQAGQQSLEGDPGQDPEPEGALLGSSDTGPQSGEGVPQGAAPEGVSEAPAEAGADREAPAGCRVSLRALPGRVSASTQIMRALMGSKQGRPSSVPEVSRPMARRLSCSAGALITCLASLQLFEEDLGSPASKVRFKDSPRYQELLSISKDLWPGCDVGEDQLDSGLWELTWSQALPDLGSHAMTENFTPTSSSGVDISSGSGGSGESSVPCAMDGTLVTQGTELPLKTSNQRPDSRTYESPGDLENQQQCCFPTFLNARACACATNEDEAERDSEEQRASSNLEQLAENTVQEEVQLEETKEGTEGEGLQEEAVQLEETKTEEGLQEEGVQLEETKETEGEGQQEEEAQLEEIEETGGEGLQEEGVQLEEVKEGPEGGLQGEALEEGLKEEGLPEEGSVHGQELSEASSPDGKGSQEDDPVQEEEAGRASASAEPCPAEGTEEPTEPPSHLSETDPSASERQSGSQLEPGLEKPPGATMMGQEHTQAQPTQGAAERSSSVACSAALDCDPIWVSVLLKKTEKAFLAHLASAVAELRARWGLQDNDLLDQMAAELQQDVAQRLQDSTKRELQKLQGRAGRMVLEPPREALTGELLLQTQQRRHRLRGLRNLSAFSERTLGLGPLSFTLEDEPALSTALGSQLGEEAEGEEFCPCEACVRKKVSPMSPKATMGATRGPIKEAFDLQQILQRKRGEHTDGEAAEVAPGKTHTDPTSTRTVQGAEGGLGPGLSQGPGVDEGEDGEGSQRLNRDKDPKLGEAEGDAMAQEREGKTHNSETSAGSELGEAEQEGEGISERGETGGQGSGHEDNLQGEAAAGGDQDPGQSDGAEGIEAPEAEGEAQPESEGVEAPEAEGDAQEAEGEAQPESEDVEAPEAEGEAQPESEDVETPEAEWEVQPESEGAEAPEAEKEAQPETESVEALETEGEDEPESEGAEAQEAEEAAQEAEGQTQPESEVIESQEAEEEAQPESEDVEALEVEVETQEAEGEAQPESEDVEAPEAEGEMQEAEEEAQPESDGVEAQPKSEGEEAQEVEGETQKTEGDAQPESDGVEAPEAEEEAQEAEGEVQEAEGEAHPESEDVDAQEAEGEAQPESEGVEAPEAEGEAQKAEGIEAPETEGEAQPESEGIEAPEAEGEAQPESEGVEAQDAEGEAQPESEGIEAQEAEEEAQPELEGVEAPEAEGEAQPESEGIEAPEAEGEAQPELEGVEAPEAEEEAQPEPEGVETPEAEGEAQPESEGETQGEKKGSPQVSLGDGQSEEASESSSPVPEDRPTPPPSPGGDTPHQRPGSQTGPSSSRASSWGNCWQKDSENDHVLGDTRSPDAKSTGTPHAERKATRMYPESSTSEQEEAPLGSRTPEQGASEGYDLQEDQALGSLAPTEAVGRADGFGQDDLDF

SEQ ID NO: 10913 - protein, 363 aa, Homo sapiens
MGPGEALLAGLLVMVLAVALLSNALVLLCCAYSAELRTRASGVLLVNLSLGHLLLAALDMPFTLLGVMRGRTPSAPGACQVIGFLDTFLASNAALSVAALSADQWLAVGFPLRYAGRLRPRYAGLLLGCAWGQSLAFSGAALGCSWLGYSSAFASCSLRLPPEPERPRFAAFTATLHAVGFVLPLAVLCLTSLQVHRVARRHCQRMDTVTMKALALLADLHPSVRQRCLIQQKRRRHRATRKIGIAIATFLICFAPYVMTRLAELVPFVTVNAQWGILSKCLTYSKAVADPFTYSLLRRPFRQVLAGMVHRLLKRTPRPASTHDSSLDVAGMVHQLLKRTPRPASTHNGSVDTENDSCLQQTH

SEQ ID NO: 10914 - protein, 1264 aa, Homo sapiens
MAFSKGFRIYHKLDPPPFSLIVETRHKEECLMFESGAVAVLSSAEKEAIKGTYSKVLDAYGLLGVLRLNLGDTMLHYLVLVTGCMSVGKIQESEVFRVTSTEFISLRIDSSDEDRISEVRKVLNSGNFYFAWSASGISLDLSLNAHRSMQEQTTDNRFFWNQSLHLHLKHYGVNCDDWLLRLMCGGVEIRTIYAAHKQAKACLISRLSCERAGTRFNVRGTNDDGHVANFVETEQVVYLDDSVSSFIQIRGSVPLFWEQPGLQVGSHRVRMSRGFEANAPAFDRHFRTLKNLYGKQIIVNLLGSKEGEHMLSKAFQSHLKASEHAADIQMVNFDYHQMVKGGKAEKLHSVLKPQVQKFLDYGFFYFNGSEVQRCQSGTVRTNCLDCLDRTNSVQAFLGLEMLAKQLEALGLAEKPQLVTRFQEVFRSMWSVNGDSISKIYAGTGALEGKAKAGKLKDGARSVTRTIQNNFFDSSKQEAIDVLLLGNTLNSDLADKARALLTTGSLRASSKVLKSMCENFYKYSKPKKIRVCVGTWNVNGGKQFRSIAFKNQTLTDWLLDAPKLAGIQEFQDKRSKPTDIFAIGFEEMVELNAGNIVSASTTNQKLWAVELQKTISRDNKYVLLASEQLVGVCLFVFIRPQHAPFIRDVAVDTVKTGMGGATGNKGAVAIRMLFHTTSLCFVCSHFAAGQSQVKERNEDFIEIARKLSFPMGRMLFSHDYVFWCGDFNYRIDLPNEEVKELIRQQNWDSLIAGDQLINQKNAGQVFRGFLEGKVTFAPTYKYDLFSDDYDTSEKCRTPAWTDRVLWRRRKWPFDRSAEDLDLLNASFQDESKILYTWTPGTLLHYGRAELKTSDHRPVVALIDIDIFEVEAEERQNIYKEVIAVQGPPDGTVLVSIKSSLPENNFFDDALIDELLQQFASFGEVILIRFVEDKMWVTFLEGSSALNVLSLNGKELLNRTITIALKSPDWIKNLEEEMSLEKISIALPSSTSSTLLGEDAEVAADFDMEGDVDDYSAEVEELLPQHLQPSSSSGLGTSPSSSPRTSPCQSPTISEGPVPSLPIRPSRAPSRTPGPPSAQSSPIDAQPATPLPQKDPAQPLEPKRPPPPRPVAPPTRPAPPQRPPPPSGRSQPSPQAGLAGPGPAGYSTARPTIPPRAGVISAPQSHARASAGRLTPESQSKTSETSKGSTFLPEPLKPQAAFPPQSSLPPPAQRLQEPLVPVAAPMPQSGPQPNLETPPQPPPRSRSSHSLPSEASSQPQQEQPSG

SEQ ID NO: 10915 - protein, 1074 aa, Homo sapiens
MKGTCVIAWLFSSLGLWRLAHPEAQGTTQCQRTEHPVISYKEIGPWLREFRAKNAVDFSQLTFDPGQKELVVGARNYLFRLQLEDLSLIQAVEWECDEATKKACYSKGKSKEECQNYIRVLLVGGDRLFTCGTNAFTPVCTNRSLSNLTEIHDQISGMARCPYSPQHNSTALLTAGGELYAATAMDFPGRDPAIYRSLGILPPLRTAQYNSKWLNEPNFVSSYDIGNFTYFFFRENAVEHDCGKTVFSRAARVCKNDIGGRFLLEDTWTTFMKARLNCSRPGEVPFYYNELQSTFFLPELDLIYGIFTTNVNSIAASAVCVFNLSAIAQAFSGPFKYQENSRSAWLPYPNPNPHFQCGTVDQGLYVNLTERNLQDAQKFILMHEVVQPVTTVPSFMEDNSRFSHVAVDVVQGREALVHIIYLATDYGTIKKVRVPLNQTSSSCLLEEIELFPERRREPIRSLQILHSQSVLFVGLREHVVKIPLKRCQFYRTRSTCIGAQDPYCGWDVVMKKCTSLEESLSMTQWEQSISACPTRNLTVDGHFGVWSPWTPCTHTDGSAVGSCLCRTRSCDSPAPQCGGWQCEGPGMEIANCSRNGGWTPWTSWSPCSTTCGIGFQVRQRSCSNPTPRHGGRVCVGQNREERYCNEHLLCPPHMFWTGWGPWERCTAQCGGGIQARRRICENGPDCAGCNVEYQSCNTNPCPELKKTTPWTPWTPVNISDNGGHYEQRFRYTCKARLADPNLLEVGRQRIEMRYCSSDGTSGCSTDGLSGDFLRAGRYSAHTVNGAWSAWTSWSQCSRDCSRGIRNRKRVCNNPEPKYGGMPCLGPSLEYQECNILPCPVDGVWSCWSPWTKCSATCGGGHYMRTRSCSNPAPAYGGDICLGLHTEEALCNTQPCPESWSEWSDWSECEASGVQVRARQCILLFPMGSQCSGNTTESRPCVFDSNFIPEVSVARSSSVEEKRCGEFNMFHMIAVGLSSSILGCLLTLLVYTYCQRYQQQSHDATVIHPVSPAPLNTSITNHINKLDKYDSVEAIKAFNKNNLILEERNKYFNPHLTGKTYSNAYFTDLNNYDEY

SEQ ID NO: 10916 - protein, 1350 aa, Homo sapiens
MRKRWACWSGSDAPGGCGGGCGRRRRRSRRKRAASEERRMAFSKGFRIYHKLDPPPFSLIVETRHKEECLMFESGAVAVLSSAEKEAIKGTYSKVLDAYGLLGVLRLNLGDTMLHYLVLVTGCMSVGKIQESEVFRVTSTEFISLRIDSSDEDRISEVRKVLNSGNFYFAWSASGISLDLSLNAHRSMQEQTTDNRFFWNQSLHLHLKHYGVNCDDWLLRLMCGGVEIRTIYAAHKQAKACLISRLSCERAGTRFNVRGTNDDGHVANFVETEQVVYLDDSVSSFIQIRGSVPLFWEQPGLQVGSHRVRMSRGFEANAPAFDRHFRTLKNLYGKQIIVNLLGSKEGEHMLSKAFQSHLKASEHAADIQMVNFDYHQMVKGGKAEKLHSVLKPQVQKFLDYGFFYFNGSEVQRCQSGTVRTNCLDCLDRTNSVQAFLGLEMLAKQLEALGLAEKPQLVTRFQEVFRSMWSVNGDSISKIYAGTGALEGKAKLKDGARSVTRTIQNNFFDSSKQEAIDVLLLGNTLNSDLADKARALLTTGSLRVSEQTLQSASSKVLKSMCENFYKYSKPKKIRVCVGTWNVNGGKQFRSIAFKNQTLTDWLLDAPKLAGIQEFQDKRSKPTDIFAIGFEEMVELNAGNIVSASTTNQKLWAVELQKTISRDNKYVLLASEQLVGVCLFVFIRPQHAPFIRDVAVDTVKTGMGGATGNKGAVAIRMLFHTTSLCFVCSHFAAGQSQVKERNEDFIEIARKLSFPMGRMLFSHDYVFWCGDFNYRIDLPNEEVKELIRQQNWDSLIAGDQLINQKNAGQVFRGFLEGKVTFAPTYKYDLFSDDYDTSEKCRTPAWTDRVLWRRRKWPFDRSAEDLDLLNASFQDESKILYTWTPGTLLHYGRAELKTSDHRPVVALIDIDIFEVEAEERQNIYKEVIAVQGPPDGTVLVSIKSSLPENNFFDDALIDELLQQFASFGEVILIRFVEDKMWVTFLEGSSALNVLSLNGKELLNRTITIALKSPDWIKNLEEEMSLEKISIALPSSTSSTLLGEDAEVAADFDMEGDVDDYSAEVEELLPQHLQPSSSSGLGTSPSSSPRTSPCQSPTISEGPVPSLPIRPSRAPSRTPGPPSAQSSPIDAQPATPLPQKDPAQPLEPKRPPPPRPVAPPTRPAPPQRPPPPSGARSPAPTRKEFGGIGAPPSPGVARREMEAPKSPGTTRKDNIGRSQPSPQAGLAGPGPAGYSTARPTIPPRAGVISAPQSHARASAGRLTPESQSKTSETSKGSTFLPEPLKPQAAFPPQSSLPPPAQRLQEPLVPVAAPMPQSGPQPNLETPPQPPPRSRSSHSLPSEASSQPQQEQPSG

SEQ ID NO: 10917 - protein, 251 aa, Homo sapiens
MPVKGGTKCIKYLLFGFNFIFWLAGIAVLAIGLWLRFDSQTKSIFEQETNNNNSSFYTGVYILIGAGALMMLVGFLGCCGAVQESQCMLGLATKRTMFPPFLEDHVCFFSLNPQFFGFLLVIFAIEIAAAIWGYSHKDEVIKEVQEFYKDTYNKLKTKDEPQRETLKAIHYALNCCGLAGGVEQFISDICPKKDVLETFTVKSCPDAIKEVFDNKFHIIGAVGIGIAVVMIFGMIFSMILCCAIRRNREMV

SEQ ID NO: 10918 - protein, 1692 aa, Homo sapiens
MECGLNNRIRMIGQICEVAKTKKFEEHAVEALWKAVADLLQPERPLEARHAVLALLKAIVQGQGERLGVLRALFFKVIKDYPSNEDLHERLEVFKALTDNGRHITYLEEELADFVLQWMDVGLSSEFLLVLVNLVKFNSCYLDEYIARMVQMICLLCVRTASSVDIEVSLQVLDAVVCYNCLPAESLPLFIVTLCRTINVKELCEPCWKLMRNLLGTHLGHSAIYNMCHLMEDRAYMEDAPLLRGAVFFVGMALWGAHRLYSLRNSPTSVLPSFYQAMACPNEVVSYEIVLSITRLIKKYRKELQVVAWDILLNIIERLLQQLQTLDSPELRTIVHDLLTTVEELCDQNEFHGSQERYFELVERCADQRPESSLLNLISYRAQSIHPAKDGWIQNLQALMERFFRSESRGAVRIKVLDVLSFVLLINRQFYEEELINSVVISQLSHIPEDKDHQVRKLATQLLVDLAEGCHTHHFNSLLDIIEKVMARSLSPPPELEERDVAAYSASLEDVKTAVLGLLVILQTKLYTLPASHATRVYEMLVSHIQLHYKHSYTLPIASSIRLQAFDFLLLLRADSLHRLGLPNKDGVVRFSPYCVCDYMEPERGSEKKTSGPLSPPTGPPGPAPAGPAVRLGSVPYSLLFRVLLQCLKQESDWKVLKLVLGRLPESLRYKVLIFTSPCSVDQLCSALCSMLSGPKTLERLRGAPEGFSRTDLHLAVVPVLTALISYHNYLDKTKQREMVYCLEQGLIHRCASQCVVALSICSVEMPDIIIKALPVLVVKLTHISATASMAVPLLEFLSTLARLPHLYRNFAAEQYASVFAISLPYTNPSKFNQYIVCLAHHVIAMWFIRCRLPFRKDFVPFITKGLRSNVLLSFDDTPEKDSFRARSTSLNERPKSRIQTSLTSASLGSADENSVAQADDSLKNLHLELTETCLDMMARYVFSNFTAVPKRSPVGEFLLAGGRTKTWLVGNKLVTVTTSVGTGTRSLLGLDSGELQSGPESSSSPGVHVRQTKEAPAKLESQAGQQVSRGARDRVRSMSGGHGLRVGALDVPASQFLGSATSPGPRTAPAAKPEKASAGTRVPVQEKTNLAAYVPLLTQGWAEILVRRPTGNTSWLMSLENPLSPFSSDINNMPLQELSNALMAAERFKEHRDTALYKSLSVPAASTAKPPPLPRSNTDSAVVMEEGSPGEVPVLVEPPGLEDVEAALGMDRRTDAYSRSSSVSSQEEKSLHAEELVGRGIPIERVVSSEGGRPSVDLSFQPSQPLSKSSSSPELQTLQDILGDPGDKADVGRLSPEVKARSQSGTLDGESAAWSASGEDSRGQPEGPLPSSSPRSPSGLRPRGYTISDSAPSRRGKRVERDALKSRATASNAEKVPGINPSFVFLQLYHSPFFGDESNKPILLPNESQSFERSVQLLDQIPSYDTHKIAVLYVGEGQSNSELAILSNEHGSYRYTEFLTGLGRLIELKDCQPDKVYLGGLDVCGEDGQFTYCWHDDIMQAVFHIATLMPTKDVDKHRCDKKRHLGNDFVSIVYNDSGEDFKLGTIKGQFNFVHVIVTPLDYECNLVSLQCRKDMEGLVDTSVAKIVSDRNLPFVARQMALHANMASQVHHSRSNPTDIYPSKWIARLRHIKRLRQRICEEAAYSNPSLPLVHPPSHSKAPAQTPAEPTPGYEVGQRKRLISSVEDFTEFV

SEQ ID NO: 10919 - protein, 202 aa, Homo sapiens
MQPILLLLAFLLLPRADAGEIIGGHEAKPHSRPYMAYLMIWDQKSLKRCGGFLIRDDFVLTAAHCWGRLERKAKRTRAVQPLRLPSNKAQVKPGQTCSVAGWGQTAPLGKHSHTLQEVKMTVQEDRKCESDLRHYYDSTIELCVGDPEIKKTSFKGDSGGPLVCNKVAQGIVSYGRNNGMPPRACTKVSSFVHWIKKTMKRY

SEQ ID NO: 10920 - protein, 202 aa, Homo sapiens; identical to SEQ ID NO: 10919

SEQ ID NO: 10921 - protein, 814 aa, Homo sapiens
MEELIVELRLFLELLDHEYLTSTVREKKAVITNILLRIQSSKGFDVKDHAQKQETANSLPAPPQMPLPEIPQPWLPPDSGPPPLPTSSLPEGYYEEAVPLSPGKAPEYITSNYDSDAMSSSYESYDEEEEDGKGKKTRHQWPSEEASMDLVKDAKICAFLLRKKRFGQWTKLLCVIKDTKLLCYKSSKDQQPQMELPLQGCNITYIPKDSKKKKHELKITQQGTDPLVLAVQSKEQAEQWLKVIKEAYSGCSGPVDSECPPPPSSPVHKAELEKKLSSERPSSDGEGVVENGITTCNGKEQVKRKKSSKSEAKGTVSKVTGKKITKIISLGKKKPSTDEQTSSAEEDVPTCGYLNVLSNSRWRERWCRVKDNKLIFHKDRTDLKTHIVSIPLRGCEVIPGLDSKHPLTFRLLRNGQEVAVLEASSSEDMGRWIGILLAETGSSTDPEALHYDYIDVEMSASVIQTAKQTFCFMNRRVISANPYLGGTSNGYAHPSGTALHYDDVPCINGSWEPEDGFPASCSRGLGEEVLYDNAGLYDNLPPPHIFARYSPADRKASRLSADKLSSNHYKYPASAQSVTNTSSVGRASLGLNSQLKGKKPPVASNGVTGKGKTLSSQPKKADPAAVVKRTGSNAAQYKYGKNRVEADAKRLQTKEEELLKRKEALRNRLAQLRKERKDLRAAIEVNAGRKPQAILEEKLKQLEEECRQKEAERVSLELELTEVKESLKKALAGGVTLGLAIEPKSGTSSPQSPVFRHRTLENSPISSCDTSDTEGPVPVNSAAVLKKSQAAPGSSPCRGHVLRKAKEWELKNGT

SEQ ID NO: 10922 - protein, 495 aa, Homo sapiens
MTVMSGENVDEASAAPGHPQDGSYPRQADHDDHECCERVVINISGLRFETQLKTLAQFPNTLLGNPKKRMRYFDPLRNEYFFDRNRPSFDAILYYYQSGGRLRRPVNVPLDMFSEEIKFYELGEEAMEKFREDEGFIKEEERPLPEKEYQRQVWLLFEYPESSGPARVIAIVSVMVILISIVIFCLETLPELKDDKDFTGTVHRIDNTTVIYNSNIFTDPFFIVETLCIIWFSFELVVRFFACPSKTDFFKNIMNFIDIVAIIPYFITLGTEIAEQEGNQKGEQATSLAILRVIRLVRVFRIFKLSRHSKGLQILGQTLKASMRELGLLIFFLFIGVILFSSAVYFAEAEEAESHFSSIPDAFWWAVVSMTTVGYGDMYPVTIGGKIVGSLCAIAGVLTIALPVPVIVSNFNYFYHRETEGEEQAQLLHVSSPNLASDSDLSRRSSSTMSKSEYMEIEEDMNNSIAHYRQVNIRTANCTTANQNCVNKSKLLTDV

SEQ ID NO: 10923 - protein, 1898 aa, Homo sapiens
MLLSGGDPPAQEWFMVQTKSKPRVQRQRLQVQRIFRVKLNAFQSRPDTPYFWLQLEGPRENMGKAKEYLKGLCSPELWKEVRYPPILHCAFLGAQGLFLDCLCWSTLAYLVPGPPGSLMVGGLTESFIMTQNWLEELVGRLRWGPAPLLTPRGIWEAEVTRAFGALVWIRGDQHAGDLLQLPPAVQELLLSLVRDAAGKEDIIEWLSRFGISDSHSDPEVLICPPQQQKEAPAMVSVGESPGPFVDMGTLQNRGPENSKRLSSLGATGSLITAQSTPQEAANQLVRVGSNNQDGMDSAQEEGTVQATSSQDSTNHTQALLKQRQVQKIEDKLLFQPPVSALGVCPPWKAWTPGPAFGPLWPGAIAATFWRINELHSLHLAWLLSQACFNFPFWQRPLGPIQLKLPGQNPLPLNLEWKQKELAPLPSAESPAGRPDGGLGGEAALQNCPRPEISPKVTSLLVVPGSSDVKDKVSSDLPQIGPPLTSTPQLQAGGEPGDQGSMQLDFKGLEEGPAPVLPTGQGKPVAQGGLTDQSVPGAQTVPETLKVPMAAAVPKAENPSRTQVPSAAPKLPTSRMMLAVHTEPAAPEVPLAPTKPTAQLMATAQKTVVNQPVLVAQVEPTTPKTPQAQKMPVAKTSPAGPKTPKAQAGPAATVSKAPAASKAPAAPKVPVTPRVSRAPKTPAAQKVPTDAGPTLDVARLLSEVQPTSRASVSLLKGQGQAGRQGPQSSGTLALSSKHQFQMEGLLGAWEGAPRQPPRHLQANSTVTSFQRYHEALNTPFELNLSGEPGNQGLRRVVIDGSSVAMVHGLQHFFSCRGIAMAVQFFWNRGHREVTVFVPTWQLKKNRRVRESHFLTKLHSLKMLSITPSQLENGKKITTYDYRFMVKLAEETDGIIVTNEQIHILMNSSKKLMVKDRLLPFTFAGNLFMVPDDPLGRDGPTLDEFLKKPNRLDTDIGNFLKVWKTLPPSSASVTELSDDADSGPLESLPNMEEVREEKEERQDEEQRQGQGTQKAAEEDDLDSSLASVFRVECPSLSEEILRCLSLHDPPDGALDIDLLPGAASPYLGIPWDGKAPCQQVLAHLAQLTIPSNFTALSFFMGFMDSHRDAIPDYEALVGPLHSLLKQKPDWQWDQEHEEAFLALKRALVSALCLMAPNSQLPFRLEVTVSHVALTAILHQEHSGRKHPIAYTSKPLLPDEESQGPQSGGDSPYAVAWALKHFSRCIGDTPVVLDLSYASRTTADPEVREGRRVSKAWLIRWSLLVQDKGKRALELALLQGLLGENRLLTPAASMPRFFQVLPPFSDLSTFVCIHMSGYCFYREDEWCAGFGLYVLSPTSPPVSLSFSCSPYTPTYAHLAAVACGLERFGQSPLPVVFLTHCNWIFSLLWELLPLWRARGFLSSDGAPLPHPSLLSYIISLTSGLSSLPFIYRTSYRGSLFAVTVDTLAKQGAQGGGQWWSLPKDVPAPTVSPHAMGKRPNLLALQLSDSTLADIIARLQAGQKLSGSSPFSSAFNSLSLDKESGLLMFKGDKKPRVWVVPTQLRRDLIFSVHDIPLGAHQRPEETYKKLRLLGWWPGMQEHVKDYCRSCLFCIPRNLIGSELKVIESPWPLRSTAPWSNLQIEVVGPVTISEEGHKHVLIVADPNTRWVEAFPLKPYTHTAVAQVLLQHVFARWGVPVRLEAAQGPQFARHVLVSCGLALGAQVASLSRDLQFPCLTSSGAYWEFKRALKEFIFLHGKKWAASLPLLHLAFRASSTDATPFKVLTGGESRLTEPLWWEMSSANIEGLKMDVFLLQLVGELLELHWRVADKASEKAENRRFKRESQEKEWNVGDQVLLLSLPRNGSSAKWVGPFYIGDRLSLSLYRIWGFPTPEKLGCIYPSSLMKAFAKSGTPLSFKVLEQ

SEQ ID NO: 10924 - protein, 207 aa, Homo sapiens
MSRESDVEAQQSHGSSACSQPHGSVTQSQGSSSQSQGISSSSTSTMPNSSQSSHSSSGTLSSLETVSTQELYSIPEDQEPEDQEPEEPTPAPWARLWALQDGFANLECVNDNYWFGRDKSCEYCFDEPLLKRTDKYRTYSKKHFRIFREVGPKNSYIAYIEDHSGNGTFVNTELVGKGKRRPLNNNSEIALSLSRNKEKILKIYSLS

SEQ ID NO: 10925 - protein, 586 aa, Homo sapiens
MSRESDVEAQQSHGSSACSQPHGSVTQSQGSSSQSQGISSSSTSTMPNSSQSSHSSSGTLSSLETVSTQELYSIPEDQEPEDQEPEEPTPAPWARLWALQDGFANLETESGHVTQSDLELLLSSDPPASASQSAGIRGVRHHPRPVCSLKCVNDNYWFGRDKSCEYCFDEPLLKRTDKYRTYSKKHFRIFREVGPKNSYIAYIEDHSGNGTFVNTELVGKGKRRPLNNNSEIALSLSRNKVFVFFDLTVDDQSVYPKALRDEYIMSKTLGSGACGEVKLAFERKTCKKVAIKIISKRKFAIGSAREADPALNVETEIEILKKLNHPCIIKIKNFFDAEDYYIVLELMEGGELFDKVVGNKRLKEATCKLYFYQMLLAVQYLHENGIIHRDLKPENVLLSSQEEDCLIKITDFGHSKILGETSLMRTLCGTPTYLAPEVLVSVGTAGYNRAVDCWSLGVILFICLSGYPPFSEHRTQVSLKDQITSGKYNFIPEVWAEVSEKALDLVKKLLVVDPKARFTTEEALRHPWLQDEDMKRKFQDLLSEENESTALPQVLAQPSTSRKRPREGEAEGAETTKRPAVCAAVL

SEQ ID NO: 10926 - protein, 653 aa, Homo sapiens
MDRDLLRQSLNCHGSSLLSLLRSEQQDNPHFRSLLGSAAEPARGPPPQHPLQGRKEKRVDNIEIQKFISKKADLLFALSWKSDAPATSEINEDSEDHYAIMPPLEQFMEIPSMDRRELFFRDIERGDIVIGRISSIREFGFFMVLICLGSGIMRDIAHLEITALCPLRDVPSHSNHGDPLSYYQTGDIIRAGIKDIDRYHEKLAVSLYSSSLPPHLSGIKLGVISSEELPLYYRRSVELNSNSLESYENVMQSSLGFVNPGVVEFLLEKLGIDESNPPSLMRGLQSKNFSEDDFASALRKKQSASWALKCVKIGVDYFKVGRHVDAMNEYNKALEIDKQNVEALVARGALYATKGSLNKAIEDFELALENCPTHRNARKYLCQTLVERGGQLEEEEKFLNAESYYKKALALDETFKDAEDALQKLHKYMQKSLELREKQAEKEEKQKTKKIETSAEKLRKLLKEEKRLKKKRRKSTSSSSVSSADESVSSSSSSSSSGHKRHKKHKRNRSESSRSSRRHSSRASSNQIDQNRKDECYPVPANTSASFLNHKQEVEKLLGKQDRLQYEKTQIKEKDRCPLSSSSLEIPDDFGVYSYLFKKLTIKQPQAGPSGDIPEEGIVIIDDSSIHVTDPEDLQVGQDMEVEDSGIDDPDHG

SEQ ID NO: 10927 - protein, 1088 aa, Homo sapiens
MRPKTFPATTYSGNSRQRLQEIREGLKQPSKSSVQGLPAGPNSDTSLDAKVLGSKDATRQQQQMRATPKFGPYQKALREIRYSLLPFANESGTSAAAEVNRQMLQELVNAGCDQEMAGRALKQTGSRSIEAALEYISKMGYLDPRNEQIVRVIKQTSPGKGLMPTPVTRRPSFEGTGDSFASYHQLSGTPYEGPSFGADGPTALEEMPRPYVDYLFPGVGPHGPGHQHQHPPKGYGASVEAAGAHFPLQGAHYGRPHLLVPGEPLGYGVQRSPSFQSKTPPETGGYASLPTKGQGGPPGAGLAFPPPAAGLYVPHPHHKQAGPAAHQLHVLGSRSQVFASDSPPQSLLTPSRNSLNVDLYELGSTSVQQWPAATLARRDSLQKPGLEAPPRAHVAFRPDCPVPSRTNSFNSHQPRPGPPGKAEPSLPAPNTVTAVTAAHILHPVKSVRVLRPEPQTAVGPSHPAWVPAPAPAPAPAPAPAAEGLDAKEEHALALGGAGAFPLDVEYGGPDRRCPPPPYPKHLLLRSKSEQYDLDSLCAGMEQSLRAGPNEPEGGDKSRKSAKGDKGGKDKKQIQTSPVPVRKNSRDEEKRESRIKSYSPYAFKFFMEQHVENVIKTYQQKVNRRLQLEQEMAKAGLCEAEQEQMRKILYQKESNYNRLKRAKMDKSMFVKIKTLGIGAFGEVCLACKVDTHALYAMKTLRKKDVLNRNQVAHVKAERDILAEADNEWVVKLYYSFQDKDSLYFVMDYIPGGDMMSLLIRMEVFPEHLARFYIAELTLAIESVHKMGFIHRDIKPDNILIDLDGHIKLTDFGLCTGFRWTHNSKYYQKGSHVRQDSMEPSDLWDDVSNCRCGDRLKTLEQRARKQHQRCLAHSLVGTPNYIAPEVLLRKGYTQLCDWWSVGVILFEMLVGQPPFLAPTPTETQLKVINWENTLHIPAQVKLSPEARDLITKLCCSADHRLGRNGADDLKAHPFFSAIDFSSDIRKQPAPYVPTISHPMDTSNFDPVDEESPWNDASEGSTKAWDTLTSPNNKHPEHAFYEFTFRRFFDDNGYPFRCPKPSGAEASQAESSDLESSDLVDQTEGCQPVYV

SEQ ID NO: 10928 - protein, 447 aa, Homo sapiens
MGEDTDTRKINHSFLRDHSYVTEADIISTVEFNHTGELLATGDKGGRVVIFQREPESKNAPHSQGEYDVYSTFQSHEPEFDYLKSLEIEEKINKIKWLPQQNAAHSLLSTNDKTIKLWKITERDKRPEGYNLKDEEGKLKDLSTVTSLQVPVLKPMDLMVEVSPRRIFANGHTYHINSISVNSDCETYMSADDLRINLWHLAITDRSFNIVDIKPANMEDLTEVITASEFHPHHCNLFVYSSSKGSLRLCDMRAAALCDKHSKLFEEPEDPSNRSFFSEIISSVSDVKFSHSGRYMLTRDYLTVKVWDLNMEARPIETYQVHDYLRSKLCSLYENDCIFDKFECAWNGSDSVIMTGAYNNFFRMFDRNTKRDVTLEASRESSKPRAVLKPRRVCVGGKRRRDDISVDSLDFTKKILHTAWHPAENIIAIAATNNLYIFQDKVNSDMH

SEQ ID NO: 10929 - protein, 394 aa, Homo sapiens
MGMKHSSRCLLLRRKMAENAAESTEVNSPPSQPPQPVVPAKPVQCVHHVSTQPSCPGRGKMSKLLNPEEMTSRDYYFDSYAHFGIHEEMLKDEVRTLTYRNSMYHNKHVFKDKVVLDVGSGTGILSMFAAKAGAKKVFGIECSSISDYSEKIIKANHLDNIITIFKGKVEEVELPVEKVDIIISEWMGYCLFYESMLNTVIFARDKWLKPGGLMFPDRAALYVVAIEDRQYKDFKIHWWENVYGFDMTCIRDVAMKEPLVDIVDPKQVVTNACLIKEVDIYTVKTEELSFTSAFCLQIQRNDYVHALVTYFNIEFTKCHKKMGFSTAPDAPYTHWKQTVFYLEDYLTVRRGEEIYGTISMKPNAKNVRDLDFTVDLDFKGQLCETSVSNDYKMR

SEQ ID NO: 10930 - protein, 1044 aa, Homo sapiens
MLKPQPLQQPSQPQQPPPTQQAVARRPPGGTSPPNGGLPGPLATSAAPPGPPAAASPCLGPVAAAGSGLRRGAEGILAPQPPPPQQHQERPGAAAIGSARGQSTGKGPPQSPVFEGVYNNSRMLHFLTAVVGSTCDVKVKNGTTYEGIFKTLSSKFELAVDAVHRKASEPAGGPRREDIVDTMVFKPSDVMLVHFRNVDFNYATKDKFTDSAIAMNSKVNGEHKEKVLQRWEGGDSNSDDYDLESDMSNGWDPNEMFKFNEENYGVKTTYDSSLSSYTVPLEKDNSEEFRQRELRAAQLAREIESSPQYRLRIAMENDDGRTEEEKHSAVQRQGSGRESPSLASREGKYIPLPQRVREGPRGGVRCSSSRGGRPGLSSLPPRGPHHLDNSSPGPGSEARGINGGPSRMSPKAQRPLRGAKTLSSPSNRPSGETSVPPPPAVGRMYPPRSPKSAAPAPISASCPEPPIGSAVPTSSASIPVTSSVSDPGVGSISPASPKISLAPTDVKELSTKEPGRTLEPQELARIAGKVPGLQNEQKRFQLEELRKFGAQFKLQPSSSPENSLDPFPPRILKEEPKGKEKEVDGLLTSEPMGSPVSSKTESVSDKEDKPPLAPSGGTEGPEQPPPPCPSQTGSPPVGLIKGEDKDEGPVAEQVKKSTLNPNAKEFNPTKPLLSVNKSTSTPTSPGPRTHSTPSIPVLTAGQSGLYSPQYISYIPQIHMGPAVQAPQMYPYPVSNSVPGQQGKYRGAKGSLPPQRSDQHQPASAPPMMQAAAAAGPPLVAATPYSSYIPYNPQQFPGQPAMMQPMAHYPSQPVFAPMLQSNPRMLTSGSHPQAIVSSSTPQYPSAEQPTPQALYATVHQSYPHHATQLHAHQPQPATTPTGSQPQSQHAAPSPVQHQAGQAPHLGSGQPQQNLYHPGALTGTPPSLPPGPSAQSPQSSFPQPAAVYAIHHQQLPHGFTNMAHVTQAHVQTGITAAPPPHPGAPHPPQVMLLHPPQSHGGPPQGAVPQSGVPALSASTPSPYPYIGHPQAPLPPPGELKIVLAAT

SEQ ID NO: 10931 - protein, 438 aa, Homo sapiens
MLLPGRARQPPTPQPVQHPGLRRQVEPPGQLLRLFYCTVLVCSKEISALTDFSGYLTKLLQNHTTYACDGDYLNLQCPRHSTISVQSAFYGQDYQMCSSQKPASQREDSLTCVAATTFQKVLDECQNQRACHLLVNSRVFGPDLCPGSSKYLLVSFKCQPNELKNKTVCEDQELKLHCHESKFLNIYSATYGRRTQERDICSSKAERLPPFDCLSYSALQVLSRRCYGKQRCKIIVNNHHFGSPCLPGVKKYLTVTYACVPKNILTAIDPAIANLKPSLKQKDGINFDPSGSKVLRKDGILVSNSLAAFAYIRAHPERAALLFVSSVCIGLALTLCALVIRESCAKDFRDLQLGREQLVPGSDKVEEDSEDEEEEEDPSESDFPGELSGFCRTSYPIYSSIEAAELAERIERREQIIQEIWMNSGLDTSLPRNMGQFY

SEQ ID NO: 10932 - protein, 331 aa, Homo sapiens
MASNFNDIVKQGYVKIRSRKLGIFRRCWLVFKKASSKGPRRLEKFPDEKAAYFRNFHKVTELHNIKNITRLPRETKKHAVAIIFHDETSKTFACESELEAEEWCKHLCMECLGTRLNDISLGEPDLLAAGVQREQNERFNVYLMPTPNLDIYGECTMQITHENIYLWDIHNAKVKLVMWPLSSLRRYGRDSTWFTFESGRMCDTGEGLFTFQTREGEMIYQKVHSATLAIAEQHERLMLEMEQKARLQTSLTEPMTLSKSISLPRSAYWHHITRQNSVGEIYSLQGHGFGSSKMSRAQTFPSYAPEQSEEAQQPLSRSSSYGFSYSSSLIQ

SEQ ID NO: 10933 - protein, 1137 aa, Homo sapiens
MVCGCSALLPLPNPRPTMPATPNFLANPSSSSRWIPLQPMPVAWAFVQKTSALLWLLLLGTSLSPAWGQAKIPLETVKLWADTFGGDLYNTVTKYSGSLLLQKKYKDVESSLKIEEVDGLELVRKFSEDMENMLRRKVEAVQNLVEAAEEADLNHEFNESLVFDYYNSVLINERDEKGNFVELGAEFLLESNAHFSNLPVNTSISSVQLPTNVYNKDPDILNGVYMSEALNAVFVENFQRDPTLTWQYFGSATGFFRIYPGIKWTPDENGVITFDCRNRGWYIQAATSPKDIVILVDVSGSMKGLRMTIAKHTITTILDTLGENDFINIIAYNDYVHYIEPCFKGILVQADRDNREHFKLLVEELMVKGVGVVDQALREAFQILKQFQEAKQGSLCNQAIMLISDGAVEDYEPVFEKYNWPDCKVRVFTYLIGREVSFADRMKWIACNNKGYYTQISTLADTQENVMEYLHVLSRPMVINHDHDIIWTEAYMDSKLLSSQAQSLTLLTTVAMPVFSKKNETRSHGILLGVVGSDVALRELMKLAPRYKLGVHGYAFLNTNNGYILSHPDLRPLYREGKKLKPKPNYNSVDLSEVEWEDQAESLRTAMINRETGTLSMDVKVPMDKGKRVLFLTNDYFFTDISDTPFSLGVVLSRGHGEYILLGNTSVEEGLHDLLHPDLALAGDWIYCITDIDPDHRKLSQLEAMIRFLTRKDPDLECDEELVREVLFDAVVTAPMEAYWTALALNMSEESEHVVDMAFLGTRAGLLRSSLFVGSEKVSDRKFLTPEDEASVFTLDRFPLWYRQASEHPAGSFVFNLRWAEGPESAGEPMVVTASTAVAVTVDKRTAIAAAAGVQMKLEFLQRKFWAATRQCSTVDGPCTQSCEDSDLDCFVIDNNGFILISKRSRETGRFLGEVDGAVLTQLLSMGVFSQVTMYDYQAMCKPSSHHHSAAQPLVSPISAFLTATRWLLQELVLFLLEWSVWGSWYDRGAEAKSVFHHSHKHKKQDPLQPCDTEYPVFVYQPAIREANGIVECGPCQKVFVVQQIPNSNLLLLVTDPTCDCSIFPPVLQEATEVKYNASVKCDRMRSQKLRRRPDSCHAFHPEENAQDCGGASDTSASPPLLLLPVCAWGLLPQLLR

SEQ ID NO: 10934 - protein, 805 aa, Homo sapiens
MANVSKKVSWSGRDRDDEEAAPLLRRTARPGGGTPLLNGAGPGAARQSPRSALFRVGHMSSVELDDELLDPDMDPPHPFPKEIPHNEKLLSLKYESLDYDNSENQLFLEEERRINHTAFRTVEIKRWVICALIGILTGLVACFIDIVVENLAGLKYRVIKGNIDKFTEKGGLSFSLLLWATLNAAFVLVGSVIVAFIEPVAAGSGIPQIKCFLNGVKIPHVVRLKTLVIKVSGVILSVVGGLAVGKEGPMIHSGSVIAAGISQGRSTSLKRDFKIFEYFRRDTEKRDFVSAGAAAGVSAAFGAPVGGVLFSLEEGASFWNQFLTWRIFFASMISTFTLNFVLSIYHGNMWDLSSPGLINFGRFDSEKMAYTIHEIPVFIAMGVVGGVLGAVFNALNYWLTMFRIRYIHRPCLQVIEAVLVAAVTATVAFVLIYSSRDCQPLQGGSMSYPLQLFCADGEYNSMAAAFFNTPEKSVVSLFHDPPGSYNPLTLGLFTLVYFFLACWTYGLTVSAGVFIPSLLIGAAWGRLFGISLSYLTGAAIWADPGKYALMGAAAQLGGIVRMTLSLTVIMMEATSNVTYGFPIMLVLMTAKIVGDVFIEGLYDMHIQLQSVPFLHWEAPVTSHSLTAREVMSTPVTCLRRREKVGVIVDVLSDTASNHNGFPVVEHADDTQPARLQGLILRSQLIVLLKHKVFVERSNLGLVQRRLRLKDFRDAYPRFPPIQSIHVSQDERECTMDLSEFMNPSPYTVPQEASLPRVFKLFRALGLRHLVVVDNRNQVVGLVTRKDLARYRLGKRGLEELSLAQT

SEQ ID NO: 10935 - protein, 2271 aa, Homo sapiens
MGVPKRKASGGQDGAASSAGAAKRARKEELTGVRFKAQLKDPQGPGPGLEAFVSAAKKLPREDVYDVVEGYIKISVECVEIFQLLSGEKRPESETMLIFQVFEAILLRTASDLSHFHVVGTNIVKKLMNNHMKLICESLYASGYRLARACLSLMTAMVTQGPEAARDVCSHFDLNKKTLYTLVTKRDSKGVYDVRQAYVQFALSFLIAGDDSTIVQVLEVKEFIPCIFSSGIKEDRISTINILLSTLKTKVVHNKNITKTQKVRFFTGQLLNHIASLYNWNGITDVNPENVKVSAEEAGKTMVRELVHNFLMDLCCSLKHGINFYDASLGTFGRGGNLTLLHFLLGLKTAADDDLVADLVVNILKVCPDLLNKYFKEVTFSFIPRAKSTWLNNIKLLNKIYEAQPEISRAFQTREFIPLPRLLAMVMVTTVPLVCNKSMFTQALNLDSTSVRHTALSLISVILKRALKTVDHCLNKEVWQESGVYTAVMMEEFVQLFREALSKILPDLNTVVWVWQSLKKQETKQDDKKGQKRSDGPPAACDAHQCDDAETILLKAVLLQVICLYQKVVPHVVMQYNFDFSKLLKGVISEQGLREEVPPILQHHMLKVALELPASKFLWLKAQEGPDAEIIGGERSVFYLLMKMFVTSSHLQLKSLTKLLIMKILRDTGVFEHTWKELELWLEHLENTMEEDKETVIQFLERILLTLVANPYSYTDKASDFVQEASMLQATMTKQEADDMSIPISHIDDVLDMVDVLVEGSEGLDEEIGFTLSEDMILLTFPFSAVVPAALEARNKLLLGTGNEAAENVVTYLTAVLTDLLHTQRDPLALCLLLQAYDKLEPPCLVPCCQQLSRFNRYYSLWIPEQAREAWLLQAQGSPSPPALPLASSFTALLQAAYESQALRDEHIQVQLQATMPHLSMQQVLLAAKQVLLYLRSTVENFGQLGRSVGPPLLQLFLDLLRRLVVHCEQLDAQNQQRCEAARAEADLFLDMESVASLELANDQTLEEVLVAILRHPTLEGWFLALEQQALPPHTLSPVLVKLLATHFSAGVLQLLAASAPILQNIGQLGLLARYSEAITQSVLKELQNRRAGPATSPPKTPPQLEALQELHPYMEGAQLREVTLALLSLPETHLVTQQPTKSPGKERHLNALGKTLVQLLTCSPQDQLQSGELLWSSEYVRGLGALLPTLAVDELDTVLLHTLQRDPVLAPAVGADLLDYCLARRTQAALSIAALLLQESCTHLLWFEQWCLQAGPGLGLQGDLDDFLPLIHVYLQCRTRSHFTRPAGVSSAVIPVLRKTLWRQLQSRLLSTDSPPASGLYQEILAQLVPFARAKDLSVLMDRLPSLLHTPSSHKRWIVADSISAALEGSAEELCAWRRTLLESCVKWLIVSFSGGQQDDDNTQNQEKEMLLRLNALLHALNEVDPGDWQKFVKKGLKFRYQDHTFLKMLLTAVQLLYSPESSVRTKLIQLPVVYVMLMQHSLFLPTLLTSDGEESPDSQVKEALVDLMLTVVEMCPSVCESSHFAVLLGAYGATLSVLDQKILLLLRAYEQNKLSLINFRVLLWGPAAVEHHKTCRSLGRSLWQQPSVGDILRLLDRDRMMQTILHFPQNRRLLPPEDTQELIFKDKSRVDLDGLYDPCFLLQLFSELTRPEFVVDCRKFLDSNALGLTVTALSSYDPQMRAIAYHVLAAYYSHLEGARFQEQSQLLYLLDVVRNGIRTQDMRLTFTLALFIAKAALQILKPEEHMYLKVSNFLLSHEYLNMDKVPGFYQFFYSSDFEQKTEQKWVFGVLRQGIRDKQCYELCARRGIFHIILSFFHSPLCDEAAQNWILEILQNAAQVARSAYEIIRDYSLLTWILHILESKFLETPLLSNVISLLHTLWVTNLGDKAVEWESQRLCQPSSQEPAKRLALHLVNEFLYVLIVLMKHLRPTLAPVQLTNFFGTLDSVLRYRATVIQAFRDMNRFTVNETVLSTKDVLVLLHKWSLIERDLKLQEDLRAAIEKAQARELMKMLKDKNKPVMPARAKGPRGRKRRPGEAEEMADPELMASTLETCKGLLRSILTYWRPVIPGPDPTQEPVDSASPESDAPGPVYAAASLAVSWVLRSVAEHPLSRAEAAGLIGWLKSHILPHPVVVADLLKDSAVRSSIFRLYSRLCGAEGLAGPVQEVACLFNTVMLQLVAAQGRAGSPFHPAMEALSLSSLSEKDEATQASAAFLVSLYIKDIWLGAQRPDTLLTHVRMVCEAADDAPSSEEEAIVVLCKDAASAASDA

SEQ ID NO: 10936 - protein, 186 aa, Homo sapiens
MAGAEWKSLEECLEKHLPLPDLQEVKRVLYGKELRKLDLPREAFEAASREDFELQGYAFEAAEEQLRRPRIVHVGLVQNRIPLPANAPVAEQVSALHRRIKAIVEVAAMCGVNIICFQEAWILRPHHQEPRPPCCYAPSCCLIPSVFPHRSESIRSSPSLYHHLVQAPGSSPLAFVIPSSWSPVPS

SEQ ID NO: 10937 - protein, 655 aa, Homo sapiens
MGRWAWVPSPWPPPGLGPFLLLLLLLLLLPRGFQPQPGGNRTESPEPNATATPAIPTILVTSVTSETPATSAPEAEGPQSGGLPPPPRAVPSSSSPQAQALTEDGRPCRFPFRYGGRMLHACTSEGSAHRKWCATTHNYDRDRAWGYCVEATPPPGGPAALDPCASGPCLNGGSCSNTQDPQSYHCSCPRAFTGKDCGTEKCFDETRYEYLEGGDRWARVRQGHVEQCECFGGRTWCEGTRHTACLSSPCLNGGTCHLIVATGTTVCACPPGFAGRLCNIEPDERCFLGNGTGYRGVASTSASGLSCLAWNSDLLYQELHVDSVGAAALLGLGPHAYCRNPDNDERPWCYVVKDSALSWEYCRLEACESLTRVQLSPDLLATLPEPASPGRQACGRRHKKRTFLRPRIIGGSSSLPGSHPWLAAIYIGDSFCAGSLVHTCWVVSAAHCFSHSPPRDSVSVVLGQHFFNRTTDVTQTFGIEKYIPYTLYSVFNPSDHDLVLIRLKKKGDRCATRSQFVQPICLPEPGSTFPAGHKCQIAGWGHLDENVSGYSSSLREALVPLVADHKCSSPEVYGADISPNMLCAGYFDCKSDACQGDSGGPLACEKNGVAYLYGIISWGDGCGRLHKPGVYTRVANYVDWINDRIRPPRRLVAPS

SEQ ID NO: 10938 - protein, 1376 aa, Homo sapiens
MFRAGEASKRPLPGPSPPRVRSVEVARGRAGYGFTLSGQAPCVLSCVMRGSPADFVGLRAGDQILAVNEINVKKASHEDVVKLIGKCSGVLHMVIAEGVGRFESCSSDEEGGLYEGKGWLKPKLDSKALGINRAERVVEEMQSGGIFNMIFENPSLCASNSEPLKLKQRSLSESAATRFDVGHESINNPNPNMLSKEEISKVIHDDSVFSIGLESHDDFALDASILNVAMIVGYLGSIELPSTSSNLESDSLQAIRGCMRRLRAEQKIHSLVTMKIMHDCVQLSTDKAGVVAEYPAEKLAFSAVCPDDRRFFGLVTMQTNDDGSLAQEEEGALRTSCHVFMVDPDLFNHKIHQGIARRFGFECTADPDTNGCLEFPASSLPVLQFISVLYRDMGELIEGMRARAFLDGDADAHQNNSTSSNSDSGIGNFHQEEKSNRVLVVDLGGSSSRHGPGGSAWDGVGGRGAQPWGAPWTGPFCPDPEGSPPFEAAHQTDRFWDLNKHLGPASPVEVPPASLRSSVPPSKRGTVGAGCGFNQRWLPVHVLREWQCGHTSDQDSYTDSTDGWSSINCGTLPPPMSKIPADRYRVEGSFAQPPLNAPKREWSRKAFGMQSIFGPHRNVRKTKEDKKGSKFGRGTGLTQPSQRTSARRSFGRSKRFSITRSLDDLESATVSDGELTGADLKDCVSNNSLSSNASLPSVQSCRRLRERRVASWAVSFERLLQDPVGVRYFSDFLRKEFSEENILFWQACEYFNHVPAHDKKELSYRAREIFSKFLCSKATTPVNIDSQAQLADDVLRAPHPDMFKEQQLQIFNLMKFDSYTRFLKSPLYQECILAEVEGRALPDSQQVPSSPASKHSLGSDHSSVSTPKKLSGKSKSGRSLNEELGDEDSEKKRKGAFFSWSRTRSTGRSQKKREHGDHADDALHANGGLCRRESQGSVSSAGSLDLSEACRTLAPEKDKATKHCCIHLPDGTSCVVAVKAGFSIKDILSGLCERHGINGAAADLFLVGGDKPLVLHQDSSILESRDLRLEKRTLFRLDLVPINRSVGLKAKPTKPVTEVLRPVVARYGLDLSGLLVRLSGEKEPLDLGAPISSLDGQRVVLEEKDPSRGKASADKQKGVPVKQNTAVNSSSRNHSATGEERTLGKSNSIKIKGENGKNARDPRLSKREESIAKIGKKKYQKINLDEAEEFFELISKAQSNRADDQRGLLRKEDLVLPEFLRLPPGSTELTLPTPAAVAKGFSKRSATGNGRESASQPGEQWEPVQESSDSPSTSPGSASSPPGPPGTTPPGQKSPSGPFCTPQSPVSLAQEGTAQIWKRQSQEVEAGGIQTVEDEHVAELTLMGEGDISSPNSTLLPPPSTPQEVPGPSRPGTSRF

SEQ ID NO: 10939 - protein, 207 aa, Homo sapiens
MPHSHCHSLRSFHNAPPLSAITHGTNPITFEDRLCLPSSFHSRTCFLDNFQETCNETTSCQMTNCEQDLFTDDSCVQSNCFPGVVQTTYSNSRPCERTACQSESSSAGLACVSQPCQSESTQQMGFVAQSCQPASLKGNSCPPKTSKSKNFETLERASSQCQCQSQNPESSSCRPLVNVAPEPQLLESSPGVEPTCCVTGGSQLPSK

SEQ ID NO: 10940 - protein, 1224 aa, Homo sapiens
MKVRLLRQLSAAAKVKAPSGLQGPPQAHQFISLLLEEYGALCQAARSISTFLGTLENEHLKKFQVTWELHNKHLFENLVFSEPLLQSNLPALVSQIRLGTTTHDTCSEDTYSTLLQRYQRSEEELRRVAEEWLECQKRIDAYVDEQMTMKTKQRMLTEDWELFKQRRFIEEQLTNKKAVTGENNFTDTMRHMLSSRLSMPDCPNCNYRRRCACDDCSLSHILTCGIMDPPVTDDIHIHQLPLQVDPAPDYLAERSPPSVSSASSGSGSSSPITIQQHPRLILTDSGSAPTFCSDDEDVAPLSAKFADIYPLSNYDDTEVVANMNGIHSELNGGGENMALKDESPQISSTSSSSSEADDEEADGESSGEPPGAPKEDGVLGSRSPRTEESKADSPPPSYPTQQAEQAPNTCECHVCKQEASGLTPSAMTAGALPPGHQFLSPEKPTHPALHLYPHIHGHVPLHTVPHLPRPLIHPTLYATPPFTHSKALPPAPVQNHTNKHQVFNASLQDHIYPSCFGNTPEWNSSKFISLWGSEVMNDKNWNPGTFLPDTISGSEILGPTLSETRPEALPPPSSNETPAVSDSKEKKNAAKKKCLYNFQDAFMEANKVVMATSSATSSVSCTATTVQSSNSQFRVSSKRPPSVGDVFHGISKEDHRHSAPAAPRNSPTGLAPLPALSPAALSPAALSPASTPHLANLAAPSFPKTATTTPGFVDTRKSFCPAPLPPATDGSISAPPSVCSDPDCEGHRCENGVYDPQQDDGDESADEDSCSEHSSSTSTSTNQKEGKYCDCCYCEFFGHGGPPAAPTSRNYAEMREKLRLRLTKRKEEQPKKMDQISERESVVDHRRVEDLLQFINSSETKPVSSTRAAKRARHKQRKLEEKARLEAEARAREHLHLQEEQRRREEEEDEEEEEDRFKEEFQRLQELQKLRAVKKKKKERPSKDCPKLDMLTRNFQAATESVPNSGNIHNGSLEQTEEPETSSHSPSRHMNHSEPRPGLGADGDAADPVDTRDSKFLLPKEVNGKQHEPLSFFFDIMQHHKEGNGKQKLRQTSKASSEPARRPTEPPKATEGQSKPRAQTESKAKVVDLMSITEQKREERKVNSNNNNKKQLNHIKDEKSNPTPMEPTSPGEHQQNSKLVLAESPQPKGKNKKNKKKKGDRVNNSIDDVFLPKDIDLDSVDMDETEREVEYFKRFCLDSARQTRQRLSINWSNFSLKKATFAAH

SEQ ID NO: 10941 - protein, 759 aa, Homo sapiens
MLEHKYGGHLVSRRAACTIQTAFRQYQLSKNFEKIRNSLLESRLPRRISLRKVRSPTAESLAAEKALMEGYGLVGLPLVRSPSLPPTFAGTLTELEDSFTEQVQSLAKSIDDALSTWSLKTMCSLRESGAYQLHQALQAAAGPPGLEAEGRAPESAGPGPGDDAAETPGLPPAHSGTLMMAFRDVTVQIANQNISVSSSTALSVANCLGAQTVQAPAEPAAGKAEQGETSGREAPEAPAVGREDASAEDSCAEAAASGAADGATAPKTEEEEEEEETAEVGRGAEAEAGDLEQLSSSSTSTKSAKSGSEASASASKDALQAMILSLPRYHCENPASCKSPTLSTDTLRKRLYRIGLNLFNINPDKGIQFLISRGFIPDTPIGVAHFLLQRKGLSRQMIGEFLGNSKKQFNRDVLDCVVDEMDFSSMELDEALRKFQAHIRVQGEAQKVERLIEAFSQRYCMCNPEVVQQFHNPDTIFILAFAIILLNTDMYSPNIKPDRKMMLEDFIRNLRGVDDGADIPRELVVGIYERIQQKELKSNEDHVTYVTKVEKSIVGMKTVLSVPHRRLVCCSRLFEVTDVNKLQKQAAHQREVFLFNDLLVILKLCPKKKSSSTYTFCKSVGLLGMQFQLFENEYYSHGITLVTPLSGSEKKQVLHFCALGSDEMQKFVEDLKESIAEVTELEQIRIEWELEKQQGTKTLSFKPCGAQGDPQSKQGSPTAKREAALRERPAESTVEVLINASPARLTILPISRDTIKSYC

SEQ ID NO: 10942 - protein, 630 aa, Homo sapiens
MALPTARPLLGSCGTPALGSLLFLLFSLGWVQPSRTLAGETGQEAAPLDGVLANPPNISSLSPRQLLGFPCAEVSGLSTERVRELAVALAQKNVKLSTEQLRCLAHRLSEPPEDLDALPLDLLLFLNPDAFSGPQACTRFFSRITKANVDLLPRGAPERQRLLPAALACWGVRGSLLSEADVRALGGLACDLPGRFVAESAEVLLPRLVSCPGPLDQDQQEAARAALQGGGPPYGPPSTWSVSTMDALRGLLPVLGQPIIRSIPQGIVAAWRQRSSRDPSWRQPERTILRPRFRREVEKTACPSGKKAREIDESLIFYKKWELEACVDAALLATQMDRVNAIPFTYEQLDVLKHKLDELYPQGYPESVIQHLGYLFLKMSPEDIRKWNVTSLETLKALLEVNKGHEMSPQAPRRPLPQVATLIDRFVKGRGQLDKDTLDTLTAFYPGYLCSLSPEELSSVPPSSIWAVRPQDLDTCDPRQLDVLYPKARLAFQNMNGSEYFVKIQSFLGGAPTEDLKALSQQNVSMDLATFMKLRTDAVLPLTVAEVQKLLGPHVEGLKAEERHRPVRDWILRQRQDDLDTLGLGLQGGIPNGYLVLDLSMQEALSGTPCLLGPGPVLTVLALLLASTLA

SEQ ID NO: 10943 - protein, 900 aa, Homo sapiens
MENYEALVGFDLCNTPLSSVAQKIMSAMHSGDLVDSKTWGKSTETMEVINKSSVKYSVQLEDRKTQSPEKKDLKSLRSQTSRGSAKLSPQSFSVRLTDQLSADQKQKSISSLTLSSCLIPQYNQEASVLQKKGHKRKHFLMENINNENKGSINLKRKHITYNNLSEKTSKQMALEEDTDDAEGYLNSGNSGALKKHFCDIRHLDDWAKSQLIEMLKQAAALVITVMYTDGSTQLGADQTPVSSVRGIVVLVKRQAEGGHGCPDAPACGPVLEGFVSDDPCIYIQIEHSAIWDQEQEAHQQFARNVLFQTMKCKCPVICFNAKDFVRIVLQFFGNDGSWKHVADFIGLDPRIAAWLIDPSDATPSFEDLVEKYCEKSITVKVNSTYGNSSRNIVNQNVRENLKTLYRLTMDLCSKLKDYGLWQLFRTLELPLIPILAVMESHAIQVNKEEMEKTSALLGARLKELEQEAHFVAGERFLITSNNQLREILFGKLKLHLLSQRNSLPRTGLQKYPSTSEAVLNALRDLHPLPKIILEYRQVHKIKSTFVDGLLACMKKGSISSTWNQTGTVTGRLSAKHPNIQGISKHPIQITTPKNFKGKEDKILTISPRAMFVSSKGHTFLAADFSQIELRILTHLSGDPELLKLFQESERDDVFSTLTSQWKDVPVEQVTHADREQTKKVVYAVVYGAGKERLAACLGVPIQEAAQFLESFLQKYKKIKDFARAAIAQCHQTGCVVSIMGRRRPLPRIHAHDQQLRAQAERQAVNFVVQGSAADLCKLAMIHVFTAVAASHTLTARLVAQIHDELLFEVEDPQIPECAALVRRTMESLEQVQALELQLQVPLKVSLSAGRSWGHLVPLQEAWGPPPGPCRTESPSNSLAAPGSPASTQPPPLHFSPSFCL

SEQ ID NO: 10944 - protein, 1377 aa, Homo sapiens
MDTSSVGGLELTDQTPVLLGSTAMATSLTNVGNSFSGPANPLVSRSNKFQNSSVEDDDDVVFIEPVQPPPPSVPVVADQRTITFTSSKNEELQGNDSKITPSSKELASQKGSVSETIVIDDEEDMETNQGQEKNSSNFIERRPPETKNRTNDVDFSTSSFSRSKVNAGMGNSGITTEPDSEIQIANVTTLETGVSSVNDGQLENTDGRDMNLMITHVTSLQNTNLGDVSNGLQSSNFGVNIQTYTPSLTSQTKTGVGPFNPGRMNVAGDVFQNGESATHHNPDSWISQSASFPRNQKQPGVDSLSPVASLPKQIFQPSVQQQPTKPVKVTCANCKKPLQKGQTAYQRKGSAHLFCSTTCLSSFSHKPAPKKLCVMCKKDITTMKGTIVAQVDSSESFQEFCSTSCLSLYEDKQNPTKGALNKSRCTICGKLTEIRHEVSFKNMTHKLCSDHCFNRYRMANGLIMNCCEQCGEYLPSKGAGNNVLVIDGQQKRFCCQSCVSEYKQVGSHPSFLKEVRDHMQDSFLMQPEKYGKLTTCTGCRTQCRFFDMTQCIGPNGYMEPYCSTACMNSHKTKYAKSQSLGIICHFCKRNSLPQYQATMPDGKLYNFCNSSCVAKFQALSMQSSPNGQFVAPSDIQLKCNYCKNSFCSKPEILEWENKVHQFCSKTCSDDYKKLHCIVTYCEYCQEEKTLHETVNFSGVKRPFCSEGCKLLYKQDFARRLGLRCVTCNYCSQLCKKGATKELDGVVRDFCSEDCCKKFQDWYYKAARCDCCKSQGTLKERVQWRGEMKHFCDQHCLLRFYCQQNEPNMTTQKGPENLHYDQGCQTSRTKMTGSAPPPSPTPNKEMKNKAVLCKPLTMTKATYCKPHMQTKSCQTDDTWRTEYVPVPIPVPVYIPVPMHMYSQNIPVPTTVPVPVPVPVFLPAPLDSSEKIPAAIEELKSKVSSDALDTELLTMTDMMSEDEGKTETTNINSVIIETDIIGSDLLKNSDPETQSSMPDVPYEPDLDIEIDFPRAAEELDMENEFLLPPVFGEEYEEQPRPRSKKKGAKRKAVSGYQSHDDSSDNSECSFPFKYTYGVNAWKHWVKTRQLDEDLLVLDELKSSKSVKLKEDLLSHTTAELNYGLAHFVNEIRRPNGENYAPDSIYYLCLGIQEYLCGSNRKDNIFIDPGYQTFEQELNKILRSWQPSILPDGSIFSRVEEDYLWRIKQLGSHSPVALLNTLFYFNTKYFGLKTVEQHLRLSFGTVFRHWKKNPLTMENKACLRYQVSSLCGTDNEDKITTGKRKHEDDEPVFEQIENTANPSRCPVKMFECYLSKSPQNLNQRMDVFYLQPECSSSTDSPVWYTSTSLDRNTLENMLVRVLLVKDIYDKDNYELDEDTD

SEQ ID NO: 10945 - protein, 528 aa, Homo sapiens
MASMRESDTGLWLHNKLGATDELWAPPSIASLLTAAVIDNIRLCFHGLSSAVKLKLLLGTLHLPRRTVDEMKGALMEIIQLASLDSDPWVLMVADILKSFPDTGSLNLELEEQNPNVQDILGELREKVGECEASAMLPLECQYLNKNALTTLAGPLTPPVKHFQLKRKPKSATLRAELLQKSTETAQQLKRSAGVPFHAKGRGLLRKMDTTTPLKGIPKQAPFRSPTAPSVFSPTGNRTPIPPSRTLLRKERGVKLLDISELDMVGAGREAKRRRKTLDAEVVEKPAKEETVVENATPDYAAGLVSTQKLGSLNNEPALPSTSYLPSTPSVVPASSYIPSSETPPAPSSREASRPPEEPSAPSPTLPAQFKQRAPMYNSGLSPATPTPAAPTSPLTPTTPPAVAPTTQTPPVAMVAPQTQAPAQQQPKKNLSLTREQMFAAQEMFKTANKVTRPEKALILGFMAGSRENPCQEQGDVIQIKLSEHTEDLPKADGQGSTTMLVDTVFEMNYATGQWTRFKKYKPMTNVS

SEQ ID NO: 10946 - protein, 1365 aa, Homo sapiens
MEFSIKQSPLSVQSVVKCIKMKQAPEILGSANGKTPSCEVNRECSVFLSKAQLSSSLQEGVMQKFNGHDALPFIPADKLKDLTSRVFNGEPGAHDAKLRFESQEMKGIGTPPNTTPIKNGSPEIKLKITKTYMNGKPLFESSICGDSAADVSQSEENGQKPENKARRNRKRSIKYDSLLEQGLVEAALVSKISSPSDKKIPAKKESCPNTGRDKDHLLKYNVGDLVWSKVSGYPWWPCMVSADPLLHSYTKLKGQKKSARQYHVQFFGDAPERAWIFEKSLVAFEGEGQFEKLCQESAKQAPTKAEKIKLLKPISGKLRAQWEMGIVQAEEAASMSVEERKAKFTFLYVGDQLHLNPQVAKEAGIAAESLGEMAESSGVSEEAAENPKSVREECIPMKRRRRAKLCSSAETLESHPDIGKSTPQKTAEADPRRGVGSPPGRKKTTVSMPRSRKGDAASQFLVFCQKHRDEVVAEHPDASGEEIEELLRSQWSLLSEKQRARYNTKFALVAPVQAEEDSGNVNGKKRNHTKRIQDPTEDAEAEDTPRKRLRTDKHSLRKRDTITDKTARTSSYKAMEAASSLKSQAATKNLSDACKPLKKRNRASTAASSALGFSKSSSPSASLTENEVSDSPGDEPSESPYESADETQTEVSVSSKKSERGVTAKKEYVCQLCEKPGSLLLCEGPCCGAFHLACLGLSRRPEGRFTCSECASGIHSCFVCKESKTDVKRCVVTQCGKFYHEACVKKYPLTVFESRGFRCPLHSCVSCHASNPSNPRPSKGKMMRCVRCPVAYHSGDACLAAGCSVIASNSIICTAHFTARKGKRHHAHVNVSWCFVCSKGGSLLCCESCPAAFHPDCLNIEMPDGSWFCNDCRAGKKLHFQDIIWVKLGNYRWWPAEVCHPKNVPPNIQKMKHEIGEFPVFFFGSKDYYWTHQARVFPYMEGDRGSRYQGVRGIGRVFKNALQEAEARFREIKLQREARETQESERKPPPYKHIKVNKPYGKVQIYTADISEIPKCNCKPTDENPCGFDSECLNRMLMFECHPQVCPAGEFCQNQCFTKRQYPETKIIKTDGKGWGLVAKRDIRKGEFVNEYVGELIDEEECMARIKHAHENDITHFYMLTIDKDRIIDAGPKGNYSRFMNHSCQPNCETLKWTVNGDTRVGLFAVCDIPAGTELTFNYNLDCLGNEKTVCRCGASNCSGFLGDRPKTSTTLSSEEKGKKTKKKTRRRRAKGEGKRQSEDECFRCGDGGQLVLCDRKFCTKAYHLSCLGLGKRPFGKWECPWHHCDVCGKPSTSFCHLCPNSFCKEHQDGTAFSCTPDGRSYCCEHDLGAASVRSTKTEKPPPEPGKPKGKRRRRRGWRRVTEGK

SEQ ID NO: 10947 - protein, 1384 aa, Homo sapiens
MAAGKASGESEEASPSLTAEEREALGGLDSRLFGFVRFHEDGARTKALLGKAVRCYESLILKAEGKVESDFFCQLGHFNLLLEDYPKALSAYQRYYSLQSDYWKNAAFLYGLGLVYFHYNAFQWAIKAFQEVLYVDPSFCRAKEIHLRLGLMFKVNTDYESSLKHFQLALVDCNPCTLSNAEIQFHIAHLYETQRKYHSAKEAYEQLLQTENLSAQVKATVLQQLGWMHHTVDLLGDKATKESYAIQYLQKSLEADPNSGQSWYFLGRCYSSIGKVQDAFISYRQSIDKSEASADTWCSIGVLYQQQNQPMDALQAYICAVQLDHGHAAAWMDLGTLYESCNQPQDAIKCYLNATRSKSCSNTSALAARIKYLQACKPHHPNTEPVLGLSQTPISQQSLPLHMIPSSQVDDLSSPAKRKRTSSPTKNTSDNWSGGHAVSHPPVQQQAHSWCLTPQKLQHLEQLRANRNNLNPAQKLMLEQLESQFVLMQQHQMRPTGVAQVRSTGIPNGPTADSSLPTNSVSGQQPQLALTRVPSVSQPGVRPACPGQPLANGPFSAGHVPCSTSRTLGSTDTILIGNNHITGSGSNGNVPYLQRNALTLPHNRTNLTSSAEEPWKNQLSNSTQGLHKGQSSHSAGPNGERPLSSTGPSQHLQAAGSGIQNQNGHPTLPSNSVTQGAALNHLSSHTATSGGQQGITLTKESKPSGNILTVPETSRHTGETPNSTASVEGLPNHVHQMTADAVCSPSHGDSKSPGLLSSDNPQLSALLMGKANNNVGTGTCDKVNNIHPAVHTKTDNSVASSPSSAISTATPSPKSTEQTTTNSVTSLNSPHSGLHTINGEGMEESQSPMKTDLLLVNHKPSPQIIPSMSVSIYPSSAEVLKACRNLGKNGLSNSSILLDKCPPPRPPSSPYPPLPKDKLNPPTPSIYLENKRDAFFPPLHQFCTNPNNPVTVIRGLAGALKLDLGLFSTKTLVEANNEHMVEVRTQLLQPADENWDPTGTKKIWHCESNRSHTTIAKYAQYQASSFQESLREENEKRSHHKDHSDSESTSSDNSGRRRKGPFKTIKFGTNIDLSDDKKWKLQLHELTKLPAFVRVVSAGNLLSHVGHTILGMNTVQLYMKVPGSRTPGHQENNNFCSVNINIGPGDCEWFVVPEGYWGVLNDFCEKNNLNFLMGSWWPNLEDLYEANVPVYRFIQRPGDLVWINAGTVHWVQAIGWCNNIAWNVGPLTACQYKLAVERYEWNKLQSVKSIVPMVHLSWNMARNIKVSDPKLFEMIKYCLLRTLKQCQTLREALIAAGKEIIWHGRTKEEPAHYCSICEVEVFDLLFVTNESNSRKTYIVHCQDCARKTSGNLENFVVLEQYKMEDLMQVYDQFTLAPPLPSASS

SEQ ID NO: 10948 - protein, 382 aa, Homo sapiens
MEKCSVGGLELTEQTPALLGNMAMATSLMDIGDSFGHPACPLVSRSRNSPVEDDDDDDDVVFIESIQPPSISAPAIADQRNFIFASSKNEKPQGNYSVIPPSSRDLASQKGNISETIVIDDEEDIETNGGAEKKSSCFIEWGLPGTKNKTNDLDFSTSSLSRSKTKTGVRPFNPGRMNVAGDLFQNGEFATHHSPDSWISQSASFPSNQKQPGVDSLSPVALLRKQNFQPTAQQQLTKPAKITCANCKKPLQKGQTAYQRKGSAHLFCSTTCLSSFSHKRTQNTRSIICKKDASTKKANVILPVESSKSFQEFYSTSCLSPCENNWNLKKGVFNKSRCTICSKLAEVWIFIPKLLFRLTVIILTFKCYYVLFHLHNARVLDV

SEQ ID NO: 10949 - protein, 208 aa, Homo sapiens
MEKCSVGGLELTEQTPALLGNMAMATSLMDIGDSFGHPACPLVSRSRNSPVEDDDDDDDVVFIESIQPPSISAPAIADQRNFIFASSKNEKPQGNYSVIPPSSRDLASQKGNISETIVIDDEEDIETNGGAEKKSSCFIEWGLPGTKNKTNDLDFSTSSLSRSKTKTGVRPFNPGRMNVAGDLFQNGEFATHHSPEMHLQRRLMSFFQ

SEQ ID NO: 10950 - protein, 479 aa, Homo sapiens
MLSRLRVVSTTCTLACRHLHIKEKGKPLMLNPRTNKGMAFTLQERQMLGLQGLLPPKIETQDIQALRFHRNLKKMTSPLEKYIYIMGIQERNEKLFYRILQDDIESLMPIVYTPTVGLACSQYGHIFRRPKGLFISISDRGHVRSIVDNWPENHVKAVVVTDGERILGLGDLGVYGMGIPVGKLCLYTACAGIRPDRCLPVCIDVGTDNIALLKDPFYMGLYQKRDRTQQYDDLIDEFMKAITDRYGRNTLIQFEDFGNHNAFRFLRKYREKYCTFNDDIQGTAAVALAGLLAAQKVISKPISEHKILFLGAGEAALGIANLIVMSMVENGLSEQEAQKKIWMFDKYGLLVKGRKAKIDSYQEPFTHSAPESIPDTFEDAVNILKPSTIIGVAGAGRLFTPDVIRAMASINERPVIFALSNPTAQAECTAEEAYTLTEGRCLFASGSPFGPVKLTDGRVFTPGQGNNVYIFPGYRIPIC

SEQ ID NO: 10951 - protein, 635 aa, Homo sapiens
MARGLPTIASLARLCQKLNRLKPLEDSTMETSLRRCLSTLDLTLLGVGGMVGSGLYVLTGAVAKEVAGPAVLLSFGVAAVASLLAALCYAEFGARVPRTGSAYLFTYVSMGELWAFLIGWNVLLEYIIGGAAVARAWSGYLDSMFSHSIRNFTETHVGSWQVPLLGHYPDFLAAGIILLASAFVSCGARVSSWLNHTFSAISLLVILFIVILGFILAQPHNWSADEGGFAPFGFSGVMAGTASCFYAFVGFDVIAASSEEAQNPRRSVPLAIAISLAIAAGAYILVSTVLTLMVPWHSLDPDSALADAFYQRGYRWAGFIVAAGSICAMNTVLLSLLFSLPRIVYAMAADGLFFQVFAHVHPRTQVPVAGTLAFGLLTAFLALLLDLESLVQFLSLGTLLAYTFVATSIIVLRFQKSSPPSSPGPASPGPLTKQQSSFSDHLQLVGTVHASVPEPGELKPALRPYLGFLDGYSPGAVVTWALGVMLASAITIGCVLVFGNSTLHLPHWGYILLLLLTSVMFLLSLLVLGAHQQQYREDLFQIPMVPLIPALSIVLNICLMLKLSYLTWVRFSIWLLMGLAVYFGYGIRHSKENQRELPGLNSTHYVVFPRGSLEETVQAMQPPSQAPAQDPGHME

SEQ ID NO: 10952 - protein, 612 aa, Homo sapiens
MLKLDNKDVISHPLGYPSESLLSIASMLDSSDSSSQPHWSNELIAEQLQQQVSQLQDQLDAELEDKRKVLLELSREKAQNEDLKLEVTNILQKHKQEVELLQNAATISQPPDRQSEPATHPAVLQENTQIEPSEPKNQEEKKLSQVLNELQVSHAETTLELEKTRDMLILQRKINVCYQEELEAMMTKADNDNRDHKEKLERLTRLLDLKNNRIKQLEGILRSHDLPTSGDFNLTDPAEKPNGSIQVQLDWKFPYIPPESFLKPEAQTKGKDTKDSSKISSEEEKASFPSQDQMASPEVPIEAGQYRSKRKPPHGGERKEKEHQVVSYSRRKHGKRIGVQGKNRMEYLSLNILNGNTPEQVNYTEWKFSETNSFIGDGFKNQHEEEEMTLSHSALKQKEPLHPVNDKESSEQGSEVSEAQTTDSDDVIVPPMSQKYPKADSEKMCIEIVSLAFYPEAEVMSDENIKQVYVEYKFYDLPLSETETPVSLRKPRAGEEIHFHFSKVIDLDPQEQQGRRRFLFDMLNGQDPDQGHLKFTVVSDPLDEEKKECEEVGYAYLQLWQILESGRDILEQELDIVSPEDLATPIGRLKVSLQAAAVLHAIYKEMTEDLFS

SEQ ID NO: 10953 - protein, 429 aa, Homo sapiens
MSGVRPPIMNGPLHPRPLVALLDGRDCTVEMPILKDVATVAFCDAQSTQEIHEKVLNEAVGALMYHTITLTREDLEKFKALRIIVRIGSGFDNIDIKSAGDLGIAVCNVPAASVEETADSTLCHILNLYRRATWLHQALREGTRVQSVEQIREVASGAARIRGETLGIIGLGRVGQAVALRAKAFGFNVLFYDPYLSDGVERALGLQRVSTLQDLLFHSDCVTLHCGLNEHNHHLINDFTVKQMRQGAFLVNTARGGLVDEKALAQALKEGRIRGAALDVHESEPFSFSQGPLKDAPNLICTPHAAWYSEQASIEMREEAAREIRRAITGRIPDSLKNCVNKDHLTAATHWASMDPAVVHPELNGAAYRYPPGVVGVAPTGIPAAVEGIVPSAMSLSHGLPPVAHPPHAPSPGQTVKPEADRDHASDQL

SEQ ID NO: 10954 - protein, 482 aa, Homo sapiens
MNESPQTNEFKGTTEEAPAKESPHTSEFKGAALVSPISKSMLERLSKFEVEDAENVASYDSKIKKIVHSIVSSFAFGIFGVFLVLLDVTLLLADLIFTDSKLYIPLEYRSISLAIGLFFLMDVLLRVFVEGWTHLVRLLRLIILIRIFHLLHQKRQLEKLMRRLVSENKRRYTRDGFDLDLTYVTERIIAMSFPSSGRQSFYRNPIEEVVRFLDKKHRNHYRVYNLCSERAYDPKHFHNRVSRIMIDDHNVPTLHEMVVFTKEVNEWMAQDLENIVAIHCKGGKGRTGTMVCALLIASEIFLTAEESLYYFGERRTNKTHSNKFQGVETPSQNRYVGYFAQVKHLYNWNLPPRRILFIKRFIIYSIRGDVCDLKVQVVMEKKVVFSSTSLGNCSILHDIETDKILINVYDGPPLYDDVKVQFFSSNLPKYYDNCPFFFWFNTSFIQNNRLCLPRNELDNPHKQKAWKIYPPEFAVEILFGEK

SEQ ID NO: 10955 - protein, 600 aa, Homo sapiens
MENSSAASASSEAGSSRSQEIEELERFIDSYVLEYQVQGLLADKTEGDGESERTQSHISQWTADCSEPLDSSCSFSRGRAPPQQNGSKDNSLDMLGTDIWAANTFDSFSGATWDLQPEKLDFTQFHRKVRHTPKQPLPHIDREGCGKGKLEDGDGINLNDIEKVLPAWQGYHPMPHEVEIAHTKKLFRRRRNDRRRQQRPPGGNKPQQHGDHQPGSAKHNRDHQKSYQGGSAPHPSGRPTHHGYSQNRRWHHGNMKHPPGDKGEAGAHRNAKETMTIENPKLEDTAGDTGHSSLEAPRSPDTLAPVASERLPPQQSGGPEVETKRKDSILPERIGERPKITLLQSSKDRLRRRLKEKVPDEVAVETTTPQQNKMDKLIEILNSMRNNSSDVDTKLTTFMEEAQNSTNSEEMLGEIVRTIYQKAVSDRSFAFTAAKLCDKMALFMVEGTKFRSLLLNMLQKDFTVREELQQQDVERWLGFITFLCEVFGTMRSSTGEPFRVLVCPIYTCLRELLQSQDVKEDAVLCCSMELQSTGRLLEEQLPEMMTELLASARDKMLCPSESMLTRSLLLEVIELHANSWNPLTPPITQYYNRTIQKLTA

SEQ ID NO: 10956 - protein, 132 aa, Homo sapiens
MDVFQEGLAMVVQDPLLCDLPIQVTLEEVNSQIALEYGQAMTVRVCKMDGEVMPVVVVQSATVLDLKKAIQRYVQLKQEREGGIQHISWSYVWRTYHLTSAGEKLTEDRKKLRDYGIRNRDEVSFIKKLRQK

SEQ ID NO: 10957 - protein, 740 aa, Homo sapiens
METDESPSPLPCGPAGEAVMESRARPFQALPREQSPPPPLQTSSGAEVMDVGSGGDGQSELPAEDPFNFYGASLLSKGSFSKGRLLIDPNCSGHSPRTARHAPAVRKFSPDLKLLKDVKISVSFTESCRSKDRKVLYTGAERDVRAECGLLLSPVSGDVHACPFGGSVGDGVGIGGESADKKDEENELDQEKRVEYAVLDELEDFTDNLELDEEGAGGFTAKAIVQRDRVDEEALNFPYEDDFDNDVDALLEEGLCAPKKRRTEEKYGGDSDHPSDGETSVQPMMTKIKTVLKSRGRPPTEPLPDGWIMTFHNSGVPVYLHRESRVVTWSRPYFLGTGSIRKHDPPLSSIPCLHYKKMKDNEEREQSSDLTPSGDVSPVKPLSRSAELEFPLDEPDSMGADPGPPDEKDPLGAEAAPGALGQVKAKVEVCKDESVDLEEFRSYLEKRFDFEQVTVKKFRTWAERRQFNREMKRKQAESERPILPANQKLITLSVQDAPTKKEFVINPNGKSEVCILHEYMQRVLKVRPVYNFFECARATLEILIPDFVKQTSEEKPKDSEELEYFNHISIEDSRVYELTSKAGLLSPYQILHECLKRNHGMGDTSIKFEVVPGKNQKSEYVMACGKHTVRGWCKNKRVGKQLASQKILQLLHPHVKNWGSLLRMYGRESSKMVKQETSDKSVIELQQYAKKNKPNLHILSKLQEEMKRLAEEREETRKKPKMSIVASAQPGGEPLCTVDV

SEQ ID NO: 10958 - protein, 850 aa, Homo sapiens
MRLGSGTFATCCVAIEVLGIAVFLRGFFPAPVRSSARAEHGAEPPAPEPSAGASSNWTTLPPPLFSKVVIVLIDALRDDFVFGSKGVKFMPYTTYLVEKGASHSFVAEAKPPTVTMPRIKERETPLPNLLVLCGDHGMSETGSHGASSTEEVNTPLILISSAFERKPGDIRHPKHVQQTDVAATLAIALGLPIPKDSVGSLLFPVVEGRPMREQLRFLHLNTVQLSKLLQENVPSYEKDPGFEQFKMSERLHGNWIRLYLEEKHSEVLFNLGSKVLRQYLDALKTLSLSLSAQVAQYDIYSMMVGTVVVLEVLTLLLLSVPQALRRKAELEVPLSSPGFSLLFYLVILVLSAVHVIVCTSAESSCYFCGLSWLAAGGVMVLASALLCVIVSVLTNVLVGGNTPRKNPMHPSSRWSELDLLILLGTAGHVLSLGASSFVEEEHQTWYFLVNTLCLALSQETYRNYFLGDDGEPPCGLCVEQGHDGATAAWQDGPGCDVLERDKGHGSPSTSEVLRGREKWMVLASPWLILACCRLLRSLNQTGVQWAHRPDLGHWLTSSDHKAELSVLAALSLLVVFVLVQRGCSPVSKAALALGLLGVYCYRAAIGSVRFPWRPDSKDISKGIIEARFVYVFVLGILFTGTKDLLKSQVIAADFKLKTVGLWEIYSGLVLLAALLFRPHNLPVLAFSLLIQTLMTKFIWKPLRHDAAEITVMHYWFGQAFFYFQGNSNNIATVDISAGFVGLDTYVEIPAVLLTAFGTYAGPVLWASHLVHFLSSETRSGSALSHACFCYALICSIPVFTYIVLVTSLRYHLFIWSVFSPKLLYEGMHLLITAAVCVFFTAMDQTRLTQS

SEQ ID NO: 10959 - protein, 334 aa, Homo sapiens
MRYKTSLVMRKRLRLYRNTLKESSSSSGHHGPQLTAASSPSVFPGLHEEPPQASPSRPLNGLLRLGLPGDMYARPEPFPPGPAARSDALAAAAALHGYGGMNLTVNLAAPHGPGAFFRYMRQPIKQELICKWLAADGTATPSLCSKTFSTMHELVTHVTVEHVGGPEQANHICFWEECPRQGKPFKAKYKLVNHIRVHTGEKPFPCPFPGCGKVFARSENLKIHKRTHTGEKPFRCEFEGCERRFANSSDRKKHSHVHTSDKPYTCKVRGCDKCYTHPSSLRKHMKVHGRSPPPSSGYDSATPSALVSPSSDCGHKSQVASSAAVAARTADLSE

SEQ ID NO: 10960 - protein, 948 aa, Homo sapiens
MEERKHETMNPAHVLFDRFVQATTCKGTLKAFQELCDHLELKPKDYRSFYHKLKSKLNYWKAKALWAKLDKRGSHKDYKKGKACTNTKCLIIGAGPCGLRTAIDLSLLGAKVVVIEKRDAFSRNNVLHLWPFTIHDLRGLGAKKFYGKFCAGAIDHISIRQLQLILLKVALILGIEIHVNVEFQGLIQPPEDQENERIGWRALVHPKTHPVSEYEFEVIIGGDGRRNTLEGFRRKEFRGKLAIAITANFINRNTTAEAKVEEISGVAFIFNQKFFQELREATGIDLENIVYYKDDTHYFVMTAKKQSLLDKGVILHDYADTELLLSRENVDQEALLSYAREAADFSTQQQLPSLDFAINHYGQPDVAMFDFTCMYASENAALVREQNGHQLLVALVGDSLLEPFWPMGTGIARGFLAAMDSAWMVRSWSLGTSPLEVLAERESIYRLLPQTTPENVSKNFSQYSIDPVTRYPNINVNFLRPSQVRHLYDTGETKDIHLEMESLVNSRTTPKLTRNESVARSSKLLGWCQRQTDGYAGVNVTDLTMSWKSGLALCAIIHRYRPDLIDFDSLDEQNVEKNNQLAFDIAEKELGISPIMTGKEMASVGEPDKLSMVMYLTQFYEMFKDSLPSSDTLDLNAEEKAVLIASTRSPISFLSKLGQTISRKRSPKDKKEKDLDGAGKRRKTSQSEEEEAPRGHRGERPTLVSTLTDRRMDVAVGNQNKVKYMATQLLAKFEENAPAQSIGIRRQGSMKKEFPQNLGGSDTCYFCQKRVYVMERLSAEGKFFHRSCFKCEYCATTLRLSAYAYDIEDGKFYCKPHYCYRLSGYAQRKRPAVAPLSGKEAKGPLQDGATTDANGRANAVASSTERTPGSGVNGLEEPSIAKRLRGTPERIELENYRLSLRQAEALQEVPEETQAEHNLSSVLDTGAEEDVASRSARRAAGRPPATRP

SEQ ID NO: 10961 - protein, 867 aa, Homo sapiens
MTENKTVSSSSTRDDQTNIGLTCQEVKALREKAWSRTNEGNAMSQSLVLYGASKENSEGFHESKMTNTEGVNKGIYFSYPCRRHSCAVVNIPAPCVNKMISHIQDVESKIQEHLKRFETSFEEWSRTSSTKDLKEDWSVTTPVKEVKPGEKRDEKCPELKQEMETLLSEAIRLIKSLETDRADAEEALKQQRSRKNMINMKIDSWSVWKLQELPLAVQKEHEAYLSDVIELQWHLEDKANQLQHFEKQKTELEEANAKIQADIDYMNEHGPLLDSKQNQELQDLKNHYKKKMEVMDLHRKVNEELEEALEACENARLKAQQIKEEIDKDIYQDEKTIEAYKREIYQLNSLFDHYSSSVINVNTNIEEKEEEVTEAIRETKSSKNELHSLSKMLEDLRRVYDQLTWKQKSHENQYLEAVNDFYAAKKTWDIELSDVAKDFSAISLACTKLTEDNKKLEIDINKITVKTNESIRKKSKYESEIKYLTIMKLKNDKHLKNIYKEAYRIGTLFHLTKHKTDEMEDKIAEVRRKFKGREEFLKKLTQGEVAAGMVLQKKLYSIYEVQALERKELIKNRAICAMSLAELQEPLLQLEDEAERIRSLDKEHSVMLNNIIDQKDLIRRKVGKVKKKLRKKGKKTLDALIETESKRSAIFKDLEATKSKTMIFYAKINELNEELKAKEEEKKSFDQTLEILKNKFITMRFKREHAQTVFDHYMQEKKDCEERIFEEDQRFRVLLAVRQKTLQDTQKIIADSLEENLRLAQEYQQLQITFLKEKDNYFNIYDKQLSLDTSIRDKKQLCQLQRRMHTLWQEHFKLVVLFSQMRLANFQTDSQESIQKILAVQEESSNLMQHILGFFQTLTDGTCENDG

SEQ ID NO: 10962 - protein, 297 aa, Homo sapiens
MIDSEAHEKRPPILTSSKQDISPHITNVGEMKHYLCGCCAAFNNVAITYPIQKVLFRQQLYGIKTRDAVLQLRRDGFRNLYRGILPPLMQKTTTLALMFGLYEDLSCLLRKHVRAPEFATHGVAAVLAGTAEAIFTPLERVQTLLQNHKHHDKFTNTYQAFKALKCHGIGEYYRGLVPILFRNGLSNVLFFGLRGPIKEHLPTATTHSAHLVNDFIGGGLLGAMLGFLCFPINVVKTRLQSQIGGEFQSFPKVFQKIWLERDRKLINLFRGAHLNYHRSLISWGIINATYEFLLKFI

SEQ ID NO: 10963 - protein, 343 aa, Homo sapiens
MSVLRRMMRVSNRSLLAFIFFFSLSSSCLYFIYVAPGIANTYLFMVQARGIMLRENVKTIGHMIRLYTNKNSTLNGTDYPEGNNSSDYLVQTTTYLPENFTYSPYLPCPEKLPYMRGFLNVNVSEVSFDEIHQLFSKDLDIEPGGHWRPKDCKPRWKTGTQPFNRAMLFNVGFKEAMKDSVWDCVIFHDVDHLPENDRNYYGCGEMPRHFAAKLDKYMYILPYKEFFGGVSGLTVEQFRKINGFPNAFWGWGGEDDDLWNRVHYAGYNVTRPEGDLGKYKSIPHHHRGEVQFLGRYKLLRYSKERQYIDGLNNLIYRPKILVDRLYTNISVNLMPELAPIEDY

SEQ ID NO: 10964 - protein, 1195 aa, Homo sapiens
MTVMSLSRDLKDDFHSDTVLSILNEQRIRGILCDVTIIVEDTKFKAHSNVLAASSLYFKNIFWSHTICISSHVLELDDLKAEVFTEILNYIYSSTVVVKRQETVTDLAAAGKKLGISFLEDLTDRNFSNSPGPYVFCITEKGVVKEEKNEKRHEEPAITNGPRITNAFSIIETENSNNMFSPLDLRASFKKVSDSMRTASLCLERTDVCHEAEPVRTLAEHSYAVSSVAEAYRSQPVREHDGSSPGNTGKENCEALAAKPKTCRKPKTFSIPQDSDSATENIPPPPVSNLEVNQERSPQPAAVLTRSKSPNNEGDVHFSREDENQSSDVPGPPAAEVPPLVYNCSCCSKAFDSSTLLSAHMQLHKPTQEPLVCKYCNKQFTTLNRLDRHEQICMRSSHMPIPGGNQRFLENYPTIGQNGGSFTGPEPLLSENRIGEFSSTGSTLPDTDHMVKFVNGQMLYSCVVCKRSYVTLSSLRRHANVHSWRRTYPCHYCNKVFALAEYRTRHEIWHTGERRYQCIFCLETFMTYYILKNHQKSFHAIDHRLSISKKTANGGLKPSVYPYKLYRLLPMKCKRAPYKSYRNSSYENARENSQMNESAPGTYVVQNPHSSELPTLNFQDTVNTLTNSPAIPLETSACQDIPTSANVQNAEGTKWGEEALKMDLDNNFYSTEVSVSSTENAVSSDLRAGDVPVLSLSNSSENAASVISYSGSAPSVIVHSSQFSSVIMHSNAIAAMTSSNHRAFSDPAVSQSLKDDSKPEPDKVGRFASRPKSIKEKKKTTSHTRGEIPEESNYVADPGGSLSKTTNIAEETSKIETYIAKPALPGTSTNSNVAPLCQITVKIGNEAIVKRHILGSKLFYKRGRRPKYQMQEEPLPQGNDPEPSGDSPLGLCQSECMEMSEVFDDASDQDSTDKPWRPYYNYKPKKKSRQLKKMRKVNWRKEHGNRSPSHKCKYPAELDCAVGKAPQDKPFEEEETKEMPKLQCELCDGDKAVGAGNQGRPHRHLTSRPYACELCAKQFQSPSTLKMHMRCHTGEKPYQCKTCGRCFSVQGNLQKHERIHLGLKEFVCQYCNKAFTLNETLKIHERIHTGEKRYHCQFCFQRFLYLSTKRNHEQRHIREHNGKGYACFQCPKICKTAAALGMHQKKHLFKSPSQQEKIGDVCHENSNPLENQHFIGSEDNDQKDNIQTGVENVVL

SEQ ID NO: 10965 - protein, 266 aa, Homo sapiens
MGSRPRSPSAFPAPWWGQQPGGPGPAKRLRLEEPAGPEPRVAPSLEDPAGTPAVGALTSIVVLAAGCALRVPLDDVDLVLELPPTSILRVSLDGHTLILIPEVLLSSVDERSGAQDDSSAGLEVDVFLGALREDVVVEQEVFCASVPEIAAQEEAYEEDADPEFPELQMDSAAGSAAGLYSSARSMFSPYREGPIPEPCALAPNPSSEGHSPGPFFDPEFRLLEPVPSSPLQPLPPSPRVGSPGPHAHPPLPKRPPCKARRRLFQE

SEQ ID NO: 10966 - protein, 175 aa, Homo sapiens
MTRTPVGSARTRPKPRKLGPQRGKALQASSRLSESPALVKKRMPDACTLGRAGIGLPKMCLHMAVRHSKAQKTGPGILQQRQKPPAPRASGGPALLGKRRGCSEAGSASLEPLSSSRAAAGCLNQVPLSPFLAGPRNTRRLPAPERERIELAATLCLEGWPLRCLASKGKLHCVY

SEQ ID NO: 10967 - protein, 525 aa, Homo sapiens
MVLFCLLFLYPAGHCPNPGISLGAVRTGFRFGHGDKVRYRCSSNLVLTGSSERECQGNGVWSGTEPICRQPYSYDFPEDVAPALGTSFSHMLGATNPTQKTKDHENGTGTNTYAALNSVYLMMNNQMRLLGMETMAWQEIRHAIILLTDGKSNMGGSPKTAVDHIREILNINQKRNDYLDIYAIGVGKLDVDWRELNELGSKKDGERHAFILQDTKALHQVFEHMLDVSKLTDTICGVGNMSANASDQERTPWHVTIKPKSQETCRGALISDQWVLTAAHCFRDGNDHSLWRVNVGDPKSQWGKEFLIEKAVISPGFDVFAKKNQGILEFYGDDIALLKLAQKVKMSTHARPICLPCTMEANLALRRPQGSTCRDHENELLNKQSVPAHFVALNGSKLNINLKMGVEWTSCAEVVSQEKTMFPNLTDVREVVTDQFLCSGTQEDESPCKGESGGAVFLERRFRFFQVGLVSWGLYNPCLGSADKNSRKRAPRSKVPPPRDFHINLFRMQPWLRQHLGDVLNFLPL

SEQ ID NO: 10968 - protein, 1258 aa, Homo sapiens
MITSELPVLQDSTNETTAHSDAGSELEETEVKGKRKRGRPGRPPSTNKKPRKSPGEKSRIEAGIRGAGRGRANGHPQQNGEGEPVTLFEVVKLGKSAMQSVVDDWIESYKQDRDIALLDLINFFIQCSGCRGTVRIEMFRNMQNAEIIRKMTEEFDEDSGDYPLTMPGPQWKKFRSNFCEFIGVLIRQCQYSIIYDEYMMDTVISLLTGLSDSQVRAFRHTSTLAAMKLMTALVNVALNLSIHQDNTQRQYEAERNKMIGKRANERLELLLQKRKELQENQDEIENMMNSIFKGIFVHRYRDAIAEIRAICIEEIGVWMKMYSDAFLNDSYLKYVGWTLHDRQGEVRLKCLKALQSLYTNRELFPKLELFTNRFKDRIVSMTLDKEYDVAVEAIRLVTLILHGSEEALSNEDCENVYHLVYSAHRPVAVAAGEFLHKKLFSRHDPQAEEALAKRRGRNSPNGNLIRMLVLFFLESELHEHAAYLVDSLWESSQELLKDWECMTELLLEEPVQGEEAMSDRQESALIELMVCTIRQAAEAHPPVGRGTGKRVLTAKERKTQIDDRNKLTEHFIITLPMLLSKYSADAEKVANLLQIPQYFDLEIYSTGRMEKHLDALLKQIKFVVEKHVESDVLEACSKTYSILCSEEYTIQNRVDIARSQLIDEFVDRFNHSVEDLLQEGEEADDDDIYNVLSTLKRLTSFHNAHDLTKWDLFGNCYRLLKTGIEHGAMPEQIVVQALQCSHYSILWQLVKITDGSPSKEDLLVLRKTVKSFLAVCQQCLSNVNTPVKEQAFMLLCDLLMIFSHQLMTGGREGLQPLVFNPDTGLQSELLSFVMDHVFIDQDEENQSMEGDEEDEANKIEALHKRRNLLAAFSKLIIYDIVDMHAAADIFKHYMKYYNDYGDIIKETLSKTRQIDKIQCAKTLILSLQQLFNELVQEQGPNLDRTSAHVSGIKELARRFALTFGLDQIKTREAVATLHKDGIEFAFKYQNQKGQEYPPPNLAFLEVLSEFSSKLLRQDKKTVHSYLEKFLTEQMMERREDVWLPLISYRNSLVTGGEDDRMSVNSGSSSSKTSSVRNKKGRPPLHKKRVEDESLDNTWLNRTDTMIQTPGPLPAPQLTSTVLRENSRPMGDQIQEPESEHGSEPDFLHNPQMQISWLGQPKLEDLNRKDRTGMNYMKVRTGVRHAVRGLMEEDAEPIFEDVMMSSRSQLEDMNEEFEDTMVIDLPPSRNRRERAELRPDFFDSAAIIEDDSGFGMPMF

SEQ ID NO: 10969 - protein, 532 aa, Homo sapiens
MEGDSYHNATTVNGTPVNHQPLERHRLWEVITIAAVTAVVSLITIVGNVLVMISFKVNSQLKTVNNYYLLSLACADLIIGIFSMNLYTTYILMGRWALGSLACDLWLALDYVASNASVMNLLVISFDRYFSITRPLTYRAKRTPKRAGIMIGLAWLISFILWAPAILCWQYLVGKRTVPLDECQIQFLSEPTITFGTAIAAFYIPVSVMTILYCRIYRETEKRTKDLADLQGSDSVTKAEKRKPAHRALFRSCLRCPRPTLAQRERNQASWSSSRRSTSTTGKPSQATGPSANWAKAEQLTTCSSYPSSEDEDKPATDPVLQVVYKSQGKESPGEEFSAEETEETFVKAETEKSDYDTPNYLLSPAAAHRPKSQKCVAYKFRLVVKADGNQETNNGCHKVKIMPCPFPVAKEPSTKGLNPNPSHQMTKRKRVVLVKERKAAQTLSAILLAFIITWTPYNIMVLVSTFCDKCVPVTLWHLGYWLCYVNSTVNPICYALCNRTFRKTFKMLLLCRWKKKKVEEKLYWQGNSKLP

SEQ ID NO: 10970 - protein, 701 aa, Homo sapiens
MMSIQEKSKENSSKVTKKSDDKNSETEIQDSQKNLAKKSGPKETIKSQAKSSSESKINQPELETRMSTRSSKAASNDKATKSINKNTVTVRGYSQESTKKKLSQKKLVHENPKANEQLNRRSQRLQQLTEVSRRSLRSREIQGQVQAVKQSLPPTKKEQCSSTQSKSNKTSQKHVKRKVLEVKSDSKEDENLVINEVINSPKGKKRKVEHQTACACSSQCTQGSEKCPQKTTRRDETKPVPVTSEVKRSKMATSVVPKKNEMKKSVHTQVNTNTTLPKSPQPSVPEQSDNELEQAGKSKRGSILQLCEEIAGEIESDNVEVKKESSQMESVKEEKPTEIKLEETSVERQILHQKETNQDVQCNRFFPSRKTKPVKCILNGINSSAKKNSNWTKIKLSKFNSVQHNKLDSQVSPKLGLLRTSFSPPALEMHHPVTQSTFLGTKLHDRNITCQQEKMKEINSEEVKINDITVEINKTTERAPENCHLANEIKPSDPPLDNQMKHSFDSASNKNFSQCLESKLENSPVENVTAASTLLSQAKIDTGENKFPGSAPQQHSILSNQTSKSSDNRETPRNHSLPKCNSHLEITIPKDLKLKEAEKTDEKQLIIDAGQKRFGAVSCNVCGMLYTASNPEDETQHLLFHNQFISAVKYVVLLINHHECGSEEEFITSLFLSMFNFRYTQRSFSFPIRFLEGLEERKNSG

SEQ ID NO: 10971 - protein, 372 aa, Homo sapiens
MRVMAPRALLLLLSGGLALTETWACSHSMRYFDTAVSRPGRGEPRFISVGYVDDTQFVRFDSDAASPRGEPRAPWVEQEGPEYWDRETQKYKRQAQADRVSLRNLRGYYNQSEDGSHTLQRMSGCDLGPDGRLLRGYDQSAYDGKDYIALNEDLRSWTAADTAAQITQRKLEAARAAEQLRAYLEGTCVEWLRRYLENGKETLQRAEPPKTHVTHHPLSDHEATLRCWALGFYPAEITLTWQRDGEDQTQDTELVETRPAGDGTFQKWAAVVVPSGQEQRYTCHMQHEGLQEPLTLSWEPSSQPTIPIMGIVAGLAVLVVLAVLGAVVTAMMCRRKSSGHFLPTGGKGGSCSQAACSNSAQGSDESLITCKA

SEQ ID NO: 10972 - protein, 645 aa, Homo sapiens
MLKFQEAAKCVSGSTAISTYPKTLIARRYVLQQKLGSGSFGTVYLVSDKKAKRGEELKVLKEISVGELNPNETVQANLEAQLLSKLDHPAIVKFHASFVEQDNFCIITEYCEGRDLDDKIQEYKQAGKIFPENQIIEWFIQLLLGVDYMHERRILHRDLKSKNVFLKNNLLKIGDFGVSRLLMGSCDLATTLTGTPHYMSPEALKHQGYDTKSDIWSLACILYEMCCMNHAFAGSNFLSIVLKIVEGDTPSLPERYPKELNAIMESMLNKNPSLRPSAIEILKIPYLDEQLQNLMCRYSEMTLEDKNLDCQKEAAHIINAMQKRIHLQTLRALSEVQKMTPRERMRLRKLQAADEKARKLKKIVEEKYEENSKRMQELRSRNFQQLSVDVLHEKTHLKGMEEKEEQPEGRLSCSPQDEDEERWQGREEESDEPTLENLPESQPIPSMDLHELESIVEDATSDLGYHEIPEDPLVAEEYYADAFDSYCEESDEEEEEIALERPEKEIRNEGSQPAYRTNQQDSDIEALARCLENVLGCTSLDTKTITTMAEDMSPGPPIFNSVMARTKMKRMRESAMQKLGTEVFEEVYNYLKRARHQNASEAEIRECLEKVVPQASDCFEVDQLLYFEEQLLITMGKEPTLQNHL

SEQ ID NO: 10973 - protein, 2703 aa, Homo sapiens
MQGHTGRLLKSLCFISLSFLLLHIIFHITLVSLEAQHRIAPGYNCSTWEKTFRQIGFESLKGADAGNGIRVFVPDIGMFIASLTIWLLCRNIVQKPVTDEAAQSNPEFENEELAEGEKIDSEEALIYEEDFNGGDGVEGELEESTKLKMFRRLASVASKLKEFIGNMITTAGKVVVTILLGSSGMMLPSLTSSVYFFVFLGLCTWWSWCRTFDPLLFSCLCVLLAIFTAGHLIGLYLYQFQFFQEAVPPNDYYARLFGIKSVIQTDCSSTWKIIVNPDLSWYHHANPILLLVMYYTLATLIRIWLQEPLVQDEGTKEEDKALACSPIQITAGRRRSLWYATHYPTDERKLLSMTQDDYKPSDGLLVTVNGNPVDYHTIHPSLPMENGPGKADLYSTPQYRWEPSDESSEKREEEEEEKEEFEEERSREEKRSIKVHAMVSVFQFIMKQSYICALIAMMAWSITYHSWLTFVLLIWSCTLWMIRNRRKYAMISSPFMVVYGNLLLILQYIWSFELPEIKKVPGFLEKKEPGELASKILFTITFWLLLRQHLTEQKALQEKEALLSEVKIGSQENEEKDEELQDIQVEGEPKEEEEEEAKEEKQERKKVEQEEAEEEDEQDIMKVLGNLVVAMFIKYWIYVCGGMFFFVSFEGKIVMYKIIYMVLFLFCVALYQVHYEWWRKILKYFWMSVVIYTMLVLIFIYTYQFENFPGLWQNMTGLKKEKLEDLGLKQFTVAELFTRIFIPTSFLLVCILHLHYFHDRFLELTDLKSIPSKEDNTIYRLAHPEGSLPDLTMMHLTASLEKPEVRKLAEPGEEKLEGYSEKAQKGDLGKDSEESEEDGEEEEESEEEEETSDLRNKWHLVIDRLTVLFLKFLEYFHKLQVFMWWILELHIIKIVSSYIIWVSVKEARVSLFNYVFLISWAFALPYAKLRRLASSVCTVWTCVIIVCKMLYQLQTIKPENFSVNCSLPNENQTNIPFNELNKSLLYSAPIDPTEWVGLRKSSPLLVYLRNNLLMLAILAFEVTIYRHQEYYRGRNNLTAPVSRTIFHDITRLHLDDGLINCAKYFINYFFYKFGLETCFLMSVNVIGQRMDFYAMIHACWLIAVLYRRRRKAIAEIWPKYCCFLACIITFQYFICIGIPPAPCRDYPWRFKGASFNDNIIKWLYFPDFIVRPNPVFLVYDFMLLLCASLQRQIFEDENKAAVRIMAGDNVEICMNLDAASFSQHNPVPDFIHCRSYLDMSKVIIFSYLFWFVLTIIFITGTTRISIFCMGYLVACFYFLLFGGDLLLKPIKSILRYWDWLIAYNVFVITMKNILSIGACGYIGTLVHNSCWLIQAFSLACTVKGYQMPAANSPCTLPSGEAGIIWDSICFAFLLLQRRVFMSYYFLHVVADIKASQILASRGAELFQATIVKAVKARIEEEKKSMDQLKRQMDRIKARQQKYKKGKERMLSLTQEPGEGQDMQKLSEEDDEREADKQKAKGKKKQWWRPWVDHASMVRSGDYYLFETDSEEEEEEELKKEDEEPPRRSAFQFVYQAWITDPKTALRQRHKEKKRSAREERKRRRKGSKEGPVEWEDREDEPIKKKSDGPDNIIKRIFNILKFTWVLFLATVDSFTTWLNSISREHIDISTVLRIERCMLTREIKKGNVPTRESIHMYYQNHIMNLSRESGLDTIDEHPGAASGAQTAHRMDSLDSHDSISSEPTQCTMLYSRQGTTETIEEVEAEQEEEAGSTAPEPREAKEYEATGYDVGAMGAEEASLTPEEELTQFSTLDGDVEAPPSYSKAVSFEHLSFGSQDDSAGKNRMAVSPDDSRTDKLGSSILPPLTHELTASELLLKKMFHDDELEESEKFYVGQPRFLLLFYAMYNTLVARSEMVCYFVIILNHMVSASMITLLLPILIFLWAMLSVPRPSRRFWMMAIVYTEVAIVVKYFFQFGFFPWNKNVEVNKDKPYHPPNIIGVEKKEGYVLYDLIQLLALFFHRSILKCHGLWDEDDMTESGMAREESDDELSLGHGRRDSSDSLKSINLAASVESVHVTFPEQQTAVRRKRSGSSSEPSQRSSFSSNRSQRGSTSTRNSSQKGSSVLSIKQKGKRELYMEKLQEHLIKAKAFTIKKTLEIYVPIKQFFYNLIHPEYSAVTDVYVLMFLADTVDFIIIVFGFWAFGKHSAAADITSSLSEDQVPGPFLVMVLIQFGTMVVDRALYLRKTVLGKVIFQVILVFGIHFWMFFILPGVTERKFSQNLVAQLWYFVKCVYFGLSAYQIRCGYPTRVLGNFLTKSYNYVNLFLFQGFRLVPFLTELRAVMDWVWTDTTLSLSSWICVEDIYAHIFILKCWRESEKRYPQPRGQKKKKVVKYGMGGMIIVLLICIVWFPLLFMSLIKSVAGVINQPLDVSVTITLGGYQPIFTMSAQQSQLKVMDQQSFNKFIQAFSRDTGAMQFLENYEKEDITVAELEGNSNSLWTISPPSKQKMIHELLDPNSSFSVVFSWSIQRNLSLGAKSEIATDKLSFPLKNITRKNIAKMIAGNSTESSKTPVTIEKIYPYYVKAPSDSNSKPIKQLLSENNFMDITIILSRDNTTKYNSEWWVLNLTGNRIYNPNSQALELVVFNDKVSPPSLGFLAGYGIMGLYASVVLVIGKFVREFFSGISHSIMFEELPNVDRILKLCTDIFLVRETGELELEEDLYAKLIFLYRSPETMIKWTREKTN

SEQ ID NO: 10974 - protein, 125 aa, Homo sapiens
MGTSSIFLCVLFLCGALGLTMSPARGRLRCYICGFTKPCHPVPTECRDDEACGISIGTSGKSCLSRAQCPLPGYATYWLHSYTLWHHCCEQDLCNIAASPQQLTSLLASLPLFVASFAGRGHLLH

SEQ ID NO: 10975 - protein, 301 aa, Homo sapiens
MGARQSRASSKDKGPKRMLFTGRRQKFSPWDDALLSGRDPRSLLKRGMHHVSFSLVTRGMTDIPDFLWGLSEVQKLNLSHNQLRVLPPEVGKLTRIVVLNLCGNRLKSLPREVSLLQCLKVLFVNMNCLTEVPAELSLCRKLEVLSLSHNCLSQLPACFADLSRLRKLNLSNNFFAHIPMCVFSLKELIFLHVGSNRLENIAESIQHLASLQIFIAEGNNIHSFPRSLCLVTSLELLNLNNNDIQTLPSELHLLCRLVRIAWNPMDKGLHISHNPLSKPLPELVEGGLEMLFGYLKDKKHT

SEQ ID NO: 10976 - protein, 729 aa, Homo sapiens
MEVEDSGGVVLTAYHSYARAQPPNAESRCAPRAAASHPLSRKSIPRCRRINRMLSNESLHPPAFSRSNSEASVDSASMEDFWREIESIKDSSMGGQEEPPPAEVTPVDEGELEAEWLQDVGLSTLISGDEEEDGKALLSTLTRTQAAAVQKRYHTYTQTMRKKDKQSIRDVRDIFGVSESPPRDTCGNHTNQLDGTKEERELPRVIKTSGSMPDDASLNSTTLSDASQDKEGSFAVPRSDSVAILETIPVLPVHSNGSPEPGQPVQNAISDDDFLEKNIPPEAEELSFEVSYSEMVTEALKRNKLKKSEIKKEDYVLTKFNVQKTRFGLTEAGDLSAEDMKKIRHLSLIELTAFFDAFGIQLKRNKTEKVKGRDNGIFGVPLTVLLDGDRKKDPGVKVPLVLQKFFEKVEESGLESEGIFRLSGCTAKVKQYREELDAKFNADKFKWDKMCHREAAVMLKAFFRELPTSLFPVEYIPAFISLMERGPHVKVQFQALHLMVMALPDANRDAAQALMTFFNKVIANESKNRMSLWNISTVMAPNLFFSRSKHSDYEELLLANTAAHIIRLMLKYQKILWKVPSFLITQVRRMNEATMLLKKQLPSVRKLLRRKTLERETASPKTSKVLQKSPSARRMSDVPEGVIRVHAPLLSKVSMAIQLNNQTKAKDILAKFQYENSHGSSECIKIQNQRLYEIGGNIGEHCLDPDAYILDVYRINPQAEWVIKPQQSS

SEQ ID NO: 10977 - protein, 736 aa, Homo sapiens
MSSLQALCSGLPLRPLPENRGRQAGVPHAPVRTPSLSPVEKQLALRNALRYFPPDVQELLAPEFAQELQLYGHIYMYRFCPDIEMRAYPIEQYPCQTKVAAAIMHMIMNNLDPAVAQFPQELVTYGGNGQVFSNWAQFWLTMFYLSKMTEEQTLVMYSGHPLGLFPSSRSAPRLVITNGMVIPNYSSRTEYEKLFALGVTMYGQMTAGSYCYIGPQGIVHGTVLTVLNAARRYLGIEDLAGKVFVTSGLGGMSGAQAKAAVIVGCIGVIAEVDKAALEKRHRQGWLMEVTDSLDRCIQRLRVLQLGLQQALGWAGLPAALGLCVLSCFVNLAPLGEGRCLAPSGFSRPLLGAPVLLLCPSREARKKKEVLSLGYHGNVVALWERLVHELDTTGECLVDLGSDQTSCHNPFNGGYYPVQLSFTEAQSLMASNPAVFKDLVQESLRRQVSAINRLAEEKFFFWDYGNAFLLEAQRAGADVEKKGAGRTEFRYPSYVQHIMGDIFSQGFGPFRWVCTSGDPQDLAVTDELATSVLEEAIADGVKVSVKLQYMDNIRWIREAARHRLVVGSQARILYSDQKGRVAIAVAINQAIACRRIKAPVVLSRDHHDVSGTDSPFRETSNIYDGSAFCADMAVQNFVGDACRGATWVALHNGGGVGWGEVINGGFGLVLDGTPEAEGRARLMLSWDVSNGVARRCWSGNQKAYEIICQTMQENSTLVVTLPHKVEDERVLQQALQL

SEQ ID NO: 10978 - protein, 461 aa, Homo sapiens
MVVTQLNLEFCFQGKKLRGFSCELTRSPHGVLPESFFTIMCQVVVPILLSGLCMMTAGLVMNTIQHWPVFVEVKDLLTLVPPLVGLKGNLEMTLASRLSTAANTGQIDDPQEQHRVISSNLALIQVQATVVGLLAAVAALLLGVVSREEVDVAKVELLCASSVLTAFLAAFALGVLMVCIVIGARKLGVNPDNIATPIAASLGDLITLSILALVSSFFYRHKDSRYLTPLVCLSFAALTPVWVLIAKQSPPIVKILKFGWFPIILAMVISSFGGLILSKTVSKQQYKGMAIFTPVICGVGGNLVAIQTSRISTYLHMWSAPGVLPLQMKKFWPNPCSTFCTSEINSMSARVLLLLVVPGHLIFFYIIYLVEGQSVINSQTFVVLYLLAGLIQVTILLYLAEVMVRLTWHQALDPDNHCIPYLTGLGDLLGTGLLALCFFTDWLLKSKAELGGISELASGPP

SEQ ID NO: 10979 - protein, 256 aa, Homo sapiens
MGHTRRQGTSPSKCPYLNFFQLLVLAGLSHFCSGVIHVTKEVKEVATLSCGHNVSVEELAQTRIYWQKEKKMVLTMMSGDMNIWPEYKNRTIFDITNNLSIVILALRPSDEGTYECVVLKYEKDAFKREHLAEVTLSVKADFPTPSISDFEIPTSNIRRIICSTSGGFPEPHLSWLENGEELNAINTTVSQDPETELYAVSSKLDFNMTTNHSFMCLIKYGHLRVNQTFNWNTSFAPRCRERRRNERLRRESVRPV

SEQ ID NO: 10980 - protein, 400 aa, Homo sapiens
MASLSQLSGHLNYTCGAENSTGASQARPHAYYALSYCALILAIVFGNGLVCMAVLKERALQTTTNYLVVSLAVADLLVATLVMPWVVYLEVTGGVWNFSRICCDVFVTLDVMMCTASILNLCAISIDRYTAVVMPVHYQHGTGQSSCRRVALMITAVWVLAFAVSCPLLFGFNTTGDPTVCSISNPDFVIYSSVVSFYLPFGVTVLVYARIYVVLKQRRRKRILTRQNSQCNSVRPGFPQQTLSPDPAHLELKRYYSICQDTALGGPGFQERGGELKREEKTRNSLSPTIAPKLSLEVRKLSNGRLSTSLKLGPLQPRGVPLREKKATQMVAIVLGAFIVCWLPFFLTHVLNTHCQTCHVSPELYSATTWLGYVNSALNPVIYTTFNIEFRKAFLKILSC

SEQ ID NO: 10981 - protein, 497 aa, Homo sapiens
MMAAVPPGLEPWNRVRIPKAGNRSAVTVQNPGAALDLCIAAVIKECHLVILSLKSQTLDAETDVLCAVLYSNHNRMGRHKPHLALKQVEQCLKRLKNMNLEGSIQDLFELFSSKVLYKGVLKRLILLYEPLFGLLQEVARIQPMPYFKDFTFPSDITEFLGQPYFEAFKKKMPIAFAAKGINKLLNKLFLINEQSPRASEETLLGISKKAKQMKINVQNNVDLGQPVKNKRVFKEESSEFDVRAFCNQLKHKATQETSFDFKCSQSRLKTTKYSSQKVIGTPHAKSFVQRFREAESFTQLSEEIQMAVVWCRSKKLKAQAIFLGNKLLKSNRLKHLEAQGTSLPKKLECIKTSICNHLLRGSGIKTSKHHLRQRRSQNKFLRRQRKPQRKLQSTLLREIQQFSQGTRKSATDTSAKWRLSHCTVHRTDLYPNSKQLLNSGVSMPVIQTKEKMIHENLRGIHENETDSWTVMQINKNSTSGTIKETDDIDDIFALMGV

SEQ ID NO: 10982 - protein, 178 aa, Homo sapiens
MEHKDDDDDDVSFAKWMSSFWGHSWREEDQRGLRERHRLQATSHRKTSLPCPLPVLPRIPSSDCHPRRHSHEDQEFRCRSHVRDYRKYSEDGSFKEPLESKGRSHSKIEKFSESFERQLCFRTKRSASLGPESRKERNERECLRMEIKSRKKVEEERSSRKEEHGEAHMAPLFEKGPE

SEQ ID NO: 10983 - protein, 893 aa, Homo sapiens
MVVDEQQRLTAQLTLQRQKIQELTTNAKETHTKLALAEARVQEEEQKATRLEKELQTQTTKFHQDQDTIMAKLTNEDSQNRQLQQKLAALSRQIDELEETNRSLRKAEEELQDIKEKISKGEYGNAGIMAEVEELRKRVLDMEGKDEELIKMEEQCRDLNKRLERETLQSKDFKLEVEKLSKRIMALEKLEDAFNKSKQECYSLKCNLEKERMTTKQLSQELESLKVRIKELEAIESRLEKTEFTLKEDLTKLKTLTVMFVDERKTMSEKLKKTEDKLQAASSQLQVEQNKVTTVTEKLIEETKRALKSKTDVEEKMYSVTKERDDLKNKLKAEEEKGNDLLSRVNMLKNRLQSLEAIEKDFLKNKLNQDSGKSTTALHQENNKIKELSQEVERLKLKLKDMKAIEDDLMKTEDEYETLERRYANERDKAQFLSKELEHVKMELAKYKLAEKTETSHEQWLFKRLQEEEAKSGHLSREVDALKEKIHEYMATEDLICHLQGDHSVLQKKLNQQENRNRDLGREIENLTKELERYRHFSKSLRPSLNGRRISDPQVFSKEVQTEAVDNEPPDYKSLIPLERAVINGQLYEESENQDEDPNDEGSVLSFKCSQSTPCPVNRKLWIPWMKSKEGHLQNGKMQTKPNANFVQPGDLVLSHTPGQPLHIKVTPDHVQNTATLEITSPTTESPHSYTSTAVIPNCGTPKQRITILQNASITPVKSKTSTEDLMNLEQGMSPITMATFARAQTPESCGSLTPERTMSPIQVLAVTGSASSPEQGRSPEPTEISAKHAIFRVSPDRQSSWQFQRSNSNSSSVITTEDNKIHIHLGSPYMQAVASPVRPASPSAPLQDNRTQGLINGALNKTTNKVTSSITITPTATPLPRQSQITVSNIYN

SEQ ID NO: 10984 - protein, 308 aa, Homo sapiens
MAEENHTMKNEFILTGFTDHPELKTLLFVVFFAIYLITVVGNISLVALIFTHRRLHTPMYIFLGNLALVDSCCACAITPKMLENFFSENKRISLYECAVQFYFLCTVETADCFLLAAMAYDRYVAICNPLQYHIMMSKKLCIQMTTGAFIAGNLHSMIHVGLVFRLVFCGSNHINHFYCDILPLYRLSCVDPYINELVLFIFSGSVQVFTIGSVLISYLYILLTIFKMKSKEGRAKAFSTCASHFLSVSLFYGSLFFMYVRPNLLEEGDKDIPAAILFTIVVPLLNPFIYSLRNREVISVLRKILMKK

SEQ ID NO: 10985 - protein, 310 aa, Homo sapiens
MEEENATLLTEFVLTGFLYQPQWKIPLFLAFLVIYLITIMGNLGLIAVIWKDPHLHIPMYLLLGNLAFVDAWISSTVTPKMLNNFLAKSKMISLSECKIQFFSIAIGVTTECFLLATMAYDRYVAICKPLLYPAIMTNGLCIRLLILSYIAGILHALIHEGFLFRLTFCNSNIVHHIYCDTIPLSKISCTDSSINFLMVFIFSGSIQVFSIVTILISYTFVLFTVLEKKSDKGVRKAFSTCGAHLFSVCLYYGPLLLMYVGPASPQADGQNMVEPLFYTVIIPLLNPIIYSLRNKQVIVSFIKMLKRNGI

SEQ ID NO: 10986 - protein, 404 aa, Homo sapiens
MIWKRSAVLRFYSVCGLLLQAAASKNKVKGSQGQFPLTQNVTVVEGGTAILTCRVDQNDNTSLQWSNPAQQTLYFDDKKALRDNRIELVRASWHELSISVSDVSLSDEGQYTCSLFTMPVKTSKAYLTVLGVPEKPQISGFSSPVMEGDLMQLTCKTSGSKPAADIRWFKNDKEIKDVKYLKEEDANRKTFTVSSTLDFRVDRSDDGVAVICRVDHESLNATPQVAMQVLEIHYTPSVKIIPSTPFPQEGQPLILTCESKGKPLPEPVLWTKDGGELPDPDRMVVSGRELNILFLNKTDNGTYRCEATNTIGQSSAEYVLIVHDPNALAGQNGPDHALIGGIVAVVVFVTLCSIFLLGRYLARHKGTYLTNEAKGAEDAPDADTAIINAEGSQVNAEEKKEYFI

SEQ ID NO: 10987 - protein, 1070 aa, Homo sapiens
MARPVRGGLGAPRRSPCLLLLWLLLLRLEPVTAAAGPRAPCAAACTCAGDSLDCGGRGLAALPGDLPSWTRSLNLSYNKLSEIDPAGFEDLPNLQEVYLNNNELTAVPSLGAASSHVVSLFLQHNKIRSVEGSQLKAYLSLEVLDLSLNNITEVRNTCFPHGPPIKELNLAGNRIGTLELGAFDGLSRSLLTLRLSKNRITQLPVRAFKLPRLTQLDLNRNRIRLIEGLTFQGLNSLEVLKLQRNNISKLTDGAFWGLSKMHVLHLEYNSLVEVNSGSLYGLTALHQLHLSNNSIARIHRKGWSFCQKLHELVLSFNNLTRLDEESLAELSSLSVLRLSHNSISHIAEGAFKGLRSLRVLDLDHNEISGTIEDTSGAFSGLDSLSKLLLLEPSQSAGCSSPSQPHMSAGGRTLFGNKIKSVAKRAFSGLEGLEHLNLGGNAIRSVQFDAFVKMKNLKELHISSDSFLCDCQLKWLPPWLIGRMLQAFVTATCAHPESLKGQSIFSVPPESFVCDDFLKPQIITQPETTMAMVGKDIRFTCSAASSSSSPMTFAWKKDNEVLTNADMENFVHVHAQDGEVMEYTTILHLRQVTFGHEGRYQCVITNHFGSTYSHKARLTVNVLPSFTKTPHDITIRTTTMARLECAATGHPNPQIAWQKDGGTDFPAAQTPSLVVPLEDRVVSVGETVALQCKATGNPPPRITWFKGDRPLSLTERHHLTPDNQLLVVQNVVAEDAGRYTCEMSNTLGTERAHSQLSVLPAAGCRKDGTTVGIFTIAVVSSIVLTSLVWVCIIYQTRKKSEEYSVTNTDETVVPPDVPSYLSSQGTLSDRQETVVRTEGGPQANGHIESNGVCPRDASHFPEPDTHSVACRQPKLCAGSAYHKEPWKAMEKAEGTPGPHKMEHGGRVVCSDCNTEVDCYSRGQAFHPQPVSRDSAQPSAPNGPEPGGSDQEHSPHHQCSRTAAGSCPECQGSLYPSNHDRMLTAVKKKPMASLDGKGDSSWTLARLYHPDSTELQPASSLTSGSPERAEAQYLLVSNGHLPKACDASPESTPLTGQLPGKQRVPLLLAPKS

SEQ ID NO: 10988 - protein, 1353 aa, Homo sapiens
MLDPSSSEEESDEIVEEESGKEVLGSAPSGARLSPSRTSEGSAGSAGLGGGGAGAGAGVGAGGGGGSGASSGGGAGGLQPSSRAGGGRPSSPSPSVVSEKEKEELERLQKEEEERKKRLQLYVFVMRCIAYPFNAKQPTDMARRQQKISKQQLQTVKDRFQAFLNGETQIMADEAFMNAVQSYYEVFLKSDRVARMVQSGGCSANDSREVFKKHIEKRVRSLPEIDGLSKETVLSSWMAKFDAIYRGEEDPRKQQARMTASAASELILSKEQLYEMFQNILGIKKFEHQLLYNACQLDNPDEQAAQIRRELDGRLQMADQIARERKFPKFVSKEMENMYIEELKSSVNLLMANLESMPVSKGGEFKLQKLKRSHNASIIDMGEESENQLSKSDVVLSFSLEVVIMEVQGLKSLAPNRIVYCTMEVEGGEKLQTDQAEASKPTWGTQGDFSTTHALPAVKVKLFTESTGVLALEDKELGRVILHPTPNSPKQSEWHKMTVSKNCPDQDLKIKLAVRMDKPQNMKHSGYLWAIGKNVWKRWKKRFFVLVQVSQYTFAMCSYREKKAEPQELLQLDGYTVDYTDPQPGLEGGRAFFNAVKEGDTVIFASDDEQDRILWVQAMYRATGQSHKPVPPTQVQKLNAKGGNVPQLDAPISQFYADRAQKHGMDEFISSNPCNFDHASLFEMVQRLTLDHRLNDSYSCLGWFSPGQVFVLDEYCARNGVRGCHRHLCYLRDLLERAENGAMIDPTLLHYSFAFCASHVHGNRPDGIGTVTVEEKERFEEIKERLRVLLENQITHFRYCFPFGRPEGALKATLSLLERVLMKDIVTPVPQEEVKTVIRKCLEQAALVNYSRLSEYAKIEENQKDAENVGRLITPAKKLEDTIRLAELVIEVLQQNEEHHAEPHVDKGEAFAWWSDLMVEHAETFLSLFAVDMDAALEVQPPDTWDSFPLFQLLNDFLRTDYNLCNGKFHKHLQDLFAPLVVRYVDLMESSIAQSIHRGFERESWEPVKSLTSNLPNVNLPNVNLPKVPNLPVNIPLGIPQMPTFSAPSWMAAIYDADNGSGTSEDLFWKLDALQTFIRDLHWPEEEFGKHLEQRLKLMASDMIESCVKRTRIAFEVKLQKTSRSTDFRVPQSICTMFNVMVDAKAQSTKLCSMEMGQEHQYHSKIDELIEETVKEMITLLVAKFVTILEGVLAKLSRYDEGTLFSSFLSFTVKAASKYVDVPKPGMDVADAYVTFVRHSQDVLRDKVNEEMYIERLFDQWYNSSMNVICTWLTDRMDLQLHIYQLKTLIRMVKKTYRDFRLQGVLDSTLNSKTYETIRNRLTVEEATASVSEGGGLQGISMKDSDEEDEEDD

SEQ ID NO: 10989 - protein, 498 aa, Homo sapiens
MAFMEKPPAGKVLLDDTVPLTAAIEASQSLQSHTIVRRYSDFDLLNNSLQIAGLSLPLPPKKLIGNMDREFIAERQKGLQNYLNVITTNHILSNCELVKKFLDPNNYSANYTEIALQQVSMFFRSEPKWEVVEPLKDIGWRIRKKYFLMKIKNQPKERLVLSWADLGPDKYLSDKDFQCLIKLLPSCLHPYIYRVTFATANESSALLIRMFNEKGTLKDLIYKAKPKDPFLKKYCNPKKIQGLELQQIKTYGRQILEVLKFLHDKGFPYGHLHASNVMLDGDTCRLLDLENSLLGLPSFYRSYFSQFRKINTLESVDVHCFGHLLYEMTYGRPPDSVPVDSFPPAPSMAVVAVLESTLSCEACKNGMPTISRLLQMPLFSDVLLTTSEKPQFKIPTKLKEALRIAKECIEKRLIEEQKQIHQHRRLTRAQSHHGSEEERKKRKILARKKSKRSALENSEEHSAKYSNSNNSAGSGASSPLTSPSSPTPPSTSVEHAPF

SEQ ID NO: 10990 - protein, 515 aa, Homo sapiens
MAFMEKPPAGKVLLDDTVPLTAAIEASQSLQSHTEYIIRVQRGISVENSWQIVRRYSDFDLLNNSLQIAGLSLPLPPKKLIGNMDREFIAERQKGLQNYLNVITTNHILSNCELVKKFLDPNNYSANYTEIALQQVSMFFRSEPKWEVVEPLKDIGWRIRKKYFLMKIKNQPKERLVLSWADLGPDKYLSDKDFQCLIKLLPSCLHPYIYRVTFATANESSALLIRMFNEKGTLKDLIYKAKPKDPFLKKYCNPKKIQGLELQQIKTYGRQILEVLKFLHDKGFPYGHLHASNVMLDGDTCRLLDLENSLLGLPSFYRSYFSQFRKINTLESVDVHCFGHLLYEMTYGRPPDSVPVDSFPPAPSMAVVAVLESTLSCEACKNGMPTISRLLQMPLFSDVLLTTSEKPQFKIPTKLKEALRIAKECIEKRLIEEQKQIHQHRRLTRAQSHHGSEEERKKRKILARKKSKRSALENSEEHSAKYSNSNNSAGSGASSPLTSPSSPTPPSTSVEHAPF

SEQ ID NO: 10991 - protein, 506 aa, Homo sapiens
MPSALAIFTCRPNSHPFQERHVYLDEPIKIGRSVARCRPAQNNATFDCKVLSRNHALVWFDHKTGKFYLQDTKSSNGTFINSQRLSRGSEESPPCEILSGDIIQFGVDVTENTRKVTHGCIVSTIKLFLPDGMEARLRSDVIHAPLPSPVDKVAANTPSMYSQELFQLSQYLQEALHREQMLEQKLATLQRLLAITQEASDTSWQALIDEDRLLSRLEVMGNQLQACSKNQTEDSLRKELIALQEDKHNYETTAKESLRRVLQEKIEVVRKLSEVERSLSNTEDECTHLKEMNERTQEELRELANKYNGAVNEIKDLSDKLKVAEGKQEEIQQKGQAEKKELQHKIDEMEEKEQELQAKIEALQADNDFTNERLTALQVRLEHLQEKTLKECSSLGIQVDDFLPKINGSTEKEKLIVEGHLTKAVEETKLSKENQTRAKESDFSDTLSPSKEKSSDDTTDAQMDEQDLNEPLAKVSLLKGTLTCFYDIVNQGIKSPFAIKSVLDIM

SEQ ID NO: 10992 - protein, 502 aa, Homo sapiens [sequence omitted]

SEQ ID NO: 10993 - protein, 740 aa, Homo sapiens
MGLADASGPRDTQALLSATQAMDLRRRDYHMERPLLNQEHLEELGRWGSAPRTHQWRTWLQCSRARAYALLLQHLPVLVWLPRYPVRDWLLGDLLSGLSVAIMQLPQGLAYALLAGLPPVFGLYSSFYPVFIYFLFGTSRHISVGTFAVMSVMVGSVTESLAPQALNDSMINETARDAARVQVASTLSVLVGLFQVGLGLIHFGFVVTYLSEPLVRGYTTAAAVQVFVSQLKYVFGLHLSSHSGPLSLIYTVLEVCWKLPQSKVGTVVTAAVAGVVLVVVKLLNDKLQQQLPMPIPGELLTLIGATGISYGMGLKHRFEVDVVGNIPAGLVPPVAPNTQLFSKLVGSAFTIAVVGFAIAISLGKIFALRHGYRVDSNQELVALGLSNLIGGIFQCFPVSCSMSRSLVQESTGGNSQVAGAISSLFILLIIVKLGELFHDLPKAVLAAIIIVNLKGMLRQLSDMRSLWKANRADLLIWLVTFTATILLNLDLGLVVAVIFSLLLVVVRTQMPHYSVLGQVPDTDIYRDVAEYSEAKEVRGVKVFRSSATVYFANAEFYSDALKQRCGVDVDFLISQKKKLLKKQEQLKLKQLQKEEKLRKQAGPLLSACLAPQQVSSGDKMEDATANGQEDSKAPDGSTLKALGLPQPDFHSLILDLGALSFVDTVCLKSLKNIFHDFREIEVEVYMAACHSPVVSQLEAGHFFDASITKKHLFASVHDAVTFALQHPRPVPDSPVSVTRL

SEQ ID NO: 10994 - protein, 760 aa, Homo sapiens
KTDAANRYTAVADKPSKRSNDGKSKKVKNSSPEKHILENKIDATKIHVPMETTGDQGIEGMAYMDENRNITFTCPRTPSELINKSSPLEVLESAACEKLPTPTPQVVKEGDSFPDTLAKNGQEIAPAQISKSLMVDNYTKDGVPGQERPKGPSAVVPSTSTGGVALPITTAIETVNIHGDHSLKNKAELADSMKNEAGIDEGHVIGESESVHSGASKHSVEKVTELAKGHLLPGVPVEDQSLPGEARALEGYADRGNFPAHPVNEEKETKEGSVAVQIPDLLEDKAQKLSFCEDQNAQDRNSKGSDSLNKKVDLTLLSPKSENDKLKEISLACKITELESVSLPTPEIQSDFLHSKVEAPPSEVADTLVIMTASKGVRLPEPKDKILETPQKMTEKSESKTPGEGKKEDKSRMAEPMKGYMRPTKSRGLTPLLPKSTIQEQERHKQLKSAGIARPEEGRPVVSGTGNDITTPPNKELPPSPEKKTKPLATTQPAKTSTSKAKTQPTSLPKQPAPTTIGGLNKKPMSLASGLVPAAPPKRPAVASARPSILPSKDVKPKPIADAKAPEKRASPSKPASAPASRSGSKSTQTVAKTTTAAAVASTGPSSRSPSTLLPKKPTAIKTEGKPAEVKKMTAKSVPADLSRPKSTSTSSMKKTTTLSGTAPAAGVVPSRVKATPMPSRPSTTPFIDKKPTSAKPSSTTPRLSRLATNTSAPDLKNVRSKAKVEKKTEAAATTRKPESNAVTKTAGPIASAQKQPAGK

SEQ ID NO: 10995 - protein, 566 aa, Homo sapiens
MGRAGGGGPGRGPPPLLLFLGAALVLASGAVPAREAGSAVEAEELVKGSPAWEPPANDTREEAGPPAAGEDEASWTAPGGELAGPEEVLQESAAVTGTAWLEADSPGLGGVTAEAGSGDAQALPATLQAPHEVLGQSIMPPAIPEATEASGPPSPTPGDKLSPASELPKESPLEVWLNLGGSTPDPQGPELTYPFQGTLEPQPASDIIDIDYFEGLDGEGRGADLGSFPGSPGTSENHPDTEGETPSWSLLDLYDDFTPFDESDFYPTTSFYDDLDEEEEEEEDDKDAVGGGDLEDENELLVPTGKPGLGPGTGQPTSRWHAVPPQHTLGSVPGSSIALRPRPGEPGRDLASSENGTECRSGFVRHNGSCRSVCDLFPSYCHNGGQCYLVENIGAFCRCNTQDYIWHKGMRCESIITDFQVMCVAVGSAALVLLLLFMMTVFFAKKLYLLKTENTKLRRTNKFRTPSELHNDNFSLSTIAEGSHPNVRKLCNTPRTSSPHARALAHYDNVICQDDPSAPHKIQEVLKSCLKEEESFNIQNSMSPKLEGGKGDQADLDVNCLQNNLT

SEQ ID NO: 10996 - protein, 868 aa, Homo sapiens
MASFPETDFQICLLCKEMCGSPAPLSSNSSASSSSSQTSTSSGGGGGGPGAAARRLHVLPCLHAFCRPCLEAHRLPAAGGGAAGEPLKLRCPVCDQKVVLAEAAGMDALPSSAFLLSNLLDAVVATADEPPPKNGRAGAPAGAGGHSNHRHHAHHAHPRASASAPPLPQAPQPPAPSRSAPGGPAASPSALLLRRPHGCSSCDEGNAASSRCLDCQEHLCDNCVRAHQRVRLTKDHYIERGPPGPGAAAAAQQLGLGPPFPGPPFSILSVFPERLGFCQHHDDEVLHLYCDTCSVPICRECTMGRHGGHSFIYLQEALQDSRALTIQLLADAQQGRQAIQLSIEQAQTVAEQVEMKAKVVQSEVKAVTARHKKALEERECELLWKVEKIRQVKAKSLYLQVEKLRQNLNKLESTISAVQQVLEEGRALDILLARDRMLAQVQELKTVRSLLQPQEDDRVMFTPPDQALYLAIKSFGFVSSGAFAPLTKATGDGLKRALQGKVASFTVIGYDHDGEPRLSGGDLMSAVVLGPDGNLFGAEVSDQQNGTYVVSYRPQLEGEHLVSVTLCNQHIENSPFKVVVKSGRSYVGIGLPGLSFGSEGDSDGKLCRPWGVSVDKEGYIIVADRSNNRIQVFKPCGAFHHKFGTLGSRPGQFDRPAGVACDASRRIVVADKDNHRIQIFTFEGQFLLKFGEKGTKNGQFNYPWDVAVNSEGKILVSDTRNHRIQLFGPDGVFLNKYGFEGALWKHFDSPRGVAFNHEGHLVVTDFNNHRLLVIHPDCQSARFLGSEGTGNGQFLRPQGVAVDQEGRIIVADSRNHRVQMFESNGSFLCKFGAQGSGFGQMDRPSGIAITPDGMIVVVDFGNNRILVF

SEQ ID NO: 10997 - protein, 632 aa, Homo sapiens
MLREEAAQKRKEKEPGMALPQGHLTFRDVAIEFSLEEWKCLDPTQRALYRAMMLENYRNLHSVDISSKCMMKKFSSTAQGNTEVDTGTLERHESHHIGDFCFQKIGKDIHDFEFQWQEDKRNSHEATMTQIKKLTGSTDRYDRRHPGNKPIKDQLGLSFHSHLPELHIFQTKGKVGNQVEKSINDASSVLTSQRISSRPKIHISNNYENNFFHSSLLTLKQEVHIREKSFQCNESGKAFNCSSLLRKHQIIYLGGKQYKCDVCGKVFNQKRYLACHHRCHTGEKPYKCNECGKVFNQQSNLASHHRLHTGEKPYKCEECDKVFSRKSNLERHRRIHTGEKPYKCKVCEKAFRRDSHLTQHTRIHTGEKPYKCNECGKAFSGQSTLIHHQAIHGIGKLYKCNDCHKVFSNATTIANHWRIHNEERSYKCNKCGKFFRRRSYLVVHWRTHTGEKPYKCNECGKTFHHNSALVIHKAIHTGEKPYKCNECGKTFRHNSALVIHKAIHTGEKPYKCNECGKVFNQQATLARHHRLHTGEKPYKCEECDTVFSRKSHHETHKRIHTGEKPYKCDDFDEAFSQASSYAKQRRIHMGEKHHKCDDCGKAFTSHSHRIRHQRIHTGQKSYKCHKRGKVFS

SEQ ID NO: 10998 - protein, 419 aa, Homo sapiens
MGKRLDQPQMYPQYTYYYPHYLQTKSYAPAPHPMAPPSPSTNSSSNNSSNNSSGEQLSKTNLYIRGLPPGTTDQDLIKLCQPYGKIVSTKAILDKNTNQCKGYGFVDFDSPAAAQKAVASLKANGVQAQMAKQQEQDPTNLYISNLPISMDEQELENMLKPFGHVISTRILRDANGVSRGVGFARMESTEKCEVVIQHFNGKYLKTPPGIPAPSEPLLCKFADGGQKKRQNQSKYTQNGRPWPREGEAGMALTYDPTAAIQNGFYSSPYSIATNRMIPQTSITPFIAASPVSTYQGAVITPTMDHPMSMQPANMMGPLTQQMNHLSLGTTGTIQSQDRIMILHQLLCQYMTAAAPMQGTYIPQYTPVPPTAVSIEGVVADTSPQTVAPSSQDTSGQQQQIAVDTSNEHAPAYSYQQSKP

SEQ ID NO: 10999 - protein, 437 aa, Homo sapiens
MGKRLDQPQMYPQYTYYYPHYLQTKQSYAPAPHPMAPPSPSTNSSSNNSSNNSSGEQLSKTNLYIRGLPPGTTDQDLIKLCQPYGKIVSTKAILDKNTNQCKGYGFVDFDSPAAAQKAVASLKANGVQAQMAKQQEQDPTNLYISNLPISMDEQELENMLKPFGHVISTRILRDANGVSRGVGFARMESTEKCEVVIQHFNGKYLKTPPGIPAPSEPLLCKFADGGQKKRQNQSKYTQNGRPWPREGEAGMALTYDPTAAIQNGFYSSPYSIATNRMIPQTSITPFIAASPVSTYQVQSTSWMPHPPYVMQPTGAVITPTMDHPMSMQPANMMGPLTQQMNHLSLGTTGTIQSQDRIMILHQLLCQYMTAAAPMQGTYIPQYTPVPPTAVSIEGVVADTSPQTVAPSSQDTSGQQQQIAVDTSNEHAPAYSYQQSKP

SEQ ID NO: 11000 - protein, 418 aa, Homo sapiens
PEVLKSEPYGEKADVWAVGCILYQMATLSPPFYSTNMLSLATKIVEAVYEPVPEGIYSEKVTDTISRCLTPDAEARPDIVEVSSMISDVMMKYLDNLSTSQLSLEKKLERERRRTQRYFMEANRNTVTCHHELAVLSHETFEKASLSSSSSGAASLKSELSESADLPPEGFQASYGKDEDRACDEILSDDNFNLENAEKDTYSEVDDELDISDNSSSSSSSPLKESTFNILKRSFSASGGERQSQTRDFTGGTGSRPRPASAGIAVSQRKVRQISDPIQQILIQLHKIIYITQLPPALHHNLKRRVIERFKKSLFSQQSNPCNLKSEIKKLSQGSPEPIEPNFFTADYHLLHRSSGGNSLSPNDPTGLPTSIELEEGITYEQMQTVIEEVLEESGYYNFTSNRYHSYPWGTKNHPTKR

SEQ ID NO: 11001 - protein, 474 aa, Homo sapiens
MVPVQPAEPPEVLKSEPYGEKADVWAVGCILYQMATLSPPFYSTNMLSLATKIVEAVYEPVPEGIYSEKVTDTISRCLTPDAEARPDIVEVSSMISDVMMKYLDNLSTSQLSLEKKLERERRRTQRYFMEANRNTVTCHHELAVLSHETFEKASLSSSSSGAASLKSELSESADLPPEGFQASYGKDEDRACDEILSDDNFNLENAEKDTYSEVDDELDISDNSSSSSSSPLKESTFNILKRSFSASGGERQSQTRDFTGGTGSRPRPALLPLDLLLKVPPHMLRAHIKEIEAELVTGWQSHSLPAVILRNLKDHASAGIAVSQRKVRQISDPIQQILIQLHKIIYITQLPPALHHNLKRRVIERFKKSLFSQQSNPCNLKSEIKKLSQGSPEPIEPNFFTADYHLLHRSSGGNSLSPNDPTGLPTSIELEEGITYEQMQTVIEEVLEESGYYNFTSNRYHSYPWGTKNHPTKR

SEQ ID NO: 11002 - protein, 402 aa, Homo sapiens
MTTSGHACPVPAVNGHMTHYPATPYPLLFPPVIGGLSLPPLHGLHGHPPPSGCSTPSPATIETQSTSSEELVPSPPSPLPPPRVYKPCFVCQDKSSGYHYGVSACEGCKGFFRRSIQKNMIYTCHRDKNCVINKVTRNRCQYCRLQKCFEVGMSKESVRNDRNKKKKETSKQECTESYEMTAELDDLTEKIRKAHQETFPSLCQLGKYTTNSSADHRVRLDLGLWDKFSELATKCIIKIVEFAKRLPGFTGLTIADQITLLKAACLDILILRICTRYTPEQDTMTFSDGLTLNRTQMHNAGFGPLTDLVFTFANQLLPLEMDDTETGLLSAICLICGDRQDLEEPTKVDKLQEPLLEALKIYIRKRRPSKPHMFPKILMKITDLRSISAKGAERVITLKMEI

SEQ ID NO: 11003 - protein, 445 aa, Homo sapiens
MTGSSFSLAHLLIISGLLCYSAGCLALPSLDQKKRGGHKACCLLTPPPPPLFPPPFFRGGRSPLLSPDMKNLMLELETSQSPCMQGSLGSPGPPGPQGPPGLPGKTGPKGEKGELGRPGRKGRPGPPGVPGMPGPIGWPGPEGPRGEKGDLGMMGLPGSRGPMGSKGYPGSRGEKGSRGEKGDLGPKGEKGFPGFPGMLGQKGEMGPKGEPGIAGHRGPTGRPGKRGKQGQKGDSGVMGPPGKPGPSGQPGRPGPPGPPPAGQLIMGPKGERGFPGPPGRCLCGPTMNVNNPSYGESVYGPSSPRVPVIFVVNNQEELERLNTQNAIAFRRDQRSLYFKDSLGWLPIQLTPFYPVDYTADQHGTCGDGLLQPGEECDDGNSDVGDDCIRCHRAYCGDGHRHEGVEDCDGSDFGYLTCETYLPGSYGDLQCTQYCYIDSTPCRYFT

SEQ ID NO: 11004 - protein, 421 aa, Homo sapiens
MVVLNPMTLGIYLQLFFLSIVSQPTFINSVLPISAALPSLDQKKRGGHKACCLLTPPPPPLFPPPFFRGGRSPGPPGLPGKTGPKGEKGELGRPGRKGRPGPPGVPGMPGPIGWPGPEGPRGEKGDLGMMGLPGSRGPMGSKGYPGSRGEKGSRGEKGDLGPKGEKGFPGFPGMLGQKGEMGPKGEPGIAGHRGPTGRPGKRGKQGQKGDSGVMGPPGKPGPSGQPGRPGPPGPPPAGQLIMGPKGERGFPGPPGRCLCGPTMNVNNPSYGESVYGPSSPRVPVIFVVNNQEELERLNTQNAIAFRRDQRSLYFKDSLGWLPIQLTPFYPVDYTADQHGTCGDGLLQPGEECDDGNSDVGDDCIRCHRAYCGDGHRHEGVEDCDGSDFGYLTCETYLPGSYGDLQCTQYCYIDSTPCRYFT

SEQ ID NO: 11005 - protein, 455 aa, Homo sapiens
MVVLNPMTLGIYLQLFFLSIVSQPTFINSVLPISAALPSLDQKKRGGHKACCLLTPPPPPLFPPPFFRGGRSPLLSPDMKNLMLELETSQSPCMQGSLGSPGPPGPQGPPGLPGKTGPKGEKGELGRPGRKGRPGPPGVPGMPGPIGWPGPEGPRGEKGDLGMMGLPGSRGPMGSKGYPGSRGEKGSRGEKGDLGPKGEKGFPGFPGMLGQKGEMGPKGEPGIAGHRGPTGRPGKRGKQGQKGDSGVMGPPGKPGPSGQPGRPGPPGPPPAGQLIMGPKGERGFPGPPGRCLCGPTMNVNNPSYGESVYGPSSPRVPVIFVVNNQEELERLNTQNAIAFRRDQRSLYFKDSLGWLPIQLTPFYPVDYTADQHGTCGDGLLQPGEECDDGNSDVGDDCIRCHRAYCGDGHRHEGVEDCDGSDFGYLTCETYLPGSYGDLQCTQYCYIDSTPCRYFT

SEQ ID NO: 11006 - protein, 467 aa, Homo sapiens
MDRRKKPLDVTASSLVDLKAELFRKQEEFKQEKLLKDSGVFGKPKTTNKKPSIWSKQNVGVSNRAEKDAEQKIEEQKTLDKAREKLEEKAKLYEKMTKGDFIDEEVEDMYLVDFTQKIIDKRKEMEASGAHRDSQKAGERDDDEENLPEGEIPPPQDPSEEWVDYVDSLGRSRRCMRKDLPDLLEMDKNLQGRLFISPANEKTLLSEDMRKELQRQQWEEEEREALKRPMGPVHYEDIRENEARQLGVGYFAFARDKELRNKQMKTLEMLREQTTDQRTKRENIKEKRKAILEARLAKLRQKKMKKSKEGGTEEENRDGDVIGPLPPEPEAVPTPRPAAQSSKVEVIVQERKDTKPGVPHIREWDRGKEFSFGYWSKRQSDLRAERDPEFAPPSDYFVGQKRTGFSSSQAWSRPGPAQSDPGQCPDQSHGPSPEHTSPTPAPDNPPQAPTVTFKTLDDMISYYKQVT

SEQ ID NO: 11007 - protein, 368 aa, Homo sapiens
MREPVLTWCVPLELLCSHPLPLSAFLKSQVKLYTYRACAGKDEMGKMVSVINTVDTSHEDMIHDAQMDYYGTRLATCSSDRSVKIFDVRNGGQILIADLRGHEGPVWQVAWAHPMYGNILASCSYDRKVIIWREENGTWEKSHEHAGHDSSVNSVCWAPHDYGLILACGSSDGAISLLTYTGEGQWEVKKINNAHTIGCNAVSWAPAVVPGSLIDHPSGQKPNYIKRFASGGCDNLIKLWKEEEDGQWKEEQKLEAHSDWVRDVAWAPSIGLPTSTIASCSQDGRVFIWTCDDASSNTWSPKLLHKFNDVVWHVSWSITANILAVSGGDNKVTLWKESVDGQWVCISDVNKGQGSVSASVTEGQQNEQ

SEQ ID NO: 11008 - protein, 705 aa, Homo sapiens
MPVPWFLLSLALGRSPVVLSLERLVGPQDATHCSPGLSCRLWDSDILCLPGDIVPAPGPVLAPTHLQTELVLRCQKETDCDLCLRVAVHLAVHGHWEEPEDEEKFGGAADSGVEEPRNASLQAQVVLSFQAYPTARCVLLEVQVPAALVQFGQSVGSVVYDCFEAALGSEVRIWSYTQPRYEKELNHTQQLPALPWLNVSADGDNVHLVLNVSEEQHFGLSLYWNQVQGPPKPRWHKNLTGPQIITLNHTDLVPCLCIQVWPLEPDSVRTNICPFREDPRAHQNLWQAARLQLLTLQSWLLDAPCSLPAEAALCWRAPGGDPCQPLVPPLSWENVTVDKVLEFPLLKGHPNLCVQVNSSEKLQLQECLWADSLGPLKDDVLLLETRGPQDNRSLCALEPSGCTSLPSKASTRAARLGEYLLQDLQSGQCLQLWDDDLGALWACPMDKYIHKRWALVWLACLLFAAALSLILLLKKDHAKGWLRLLKQDVRSGAAARGRAALLLYSADDSGFERLVGALASALCQLPLRVAVDLWSRRELSAQGPVAWFHAQRRQTLQEGGVVVLLFSPGAVALCSEWLQDGVSGPGAHGPHDAFRASLSCVLPDFLQGRAPGSYVGACFDRLLHPDAVPALFRTVPVFTLPSQLPDFLGALQQPRAPRSGRLQERAEQVSRALQPALDSYFHPPGTPAPGRGVGPGAGPGAGDGT

SEQ ID NO: 11009 - protein, 1220 aa, Homo sapiens
MGVDFDVKTFCHNLRATKPPYECPVETCRKVYKSYSGIEYHLYHYDHDNPPPPQQTPLRKHKKKGRQSRPANKQSPSPSEVSQSPGREVMSYAQAQRMVEVDLHGRVHRISIFDNLDVVSEDEEAPEEAPENGSNKENTETPAATPKSGKHKNKEKRKDSNHHHHHNVSASTTPKLPEVVYRELEQDTPDAPPRPTSYYRYIEKSAEELDEEVEYDMDEEDYIWLDIMNERRKTEGVSPIPQEIFEYLMDRLEKESYFESHNKGDPNALVDEDAVCCICNDGECQNSNVILFCDMCNLAVHQECYGVPYIPEGQWLCRRCLQSPSRAVDCALCPNKGGAFKQTDDGRWAHVVCALWIPEVCFANTVFLEPIDSIEHIPPARWKLTCYICKQRGSGACIQCHKANCYTAFHVTCAQQAGLYMKMEPVRETGANGTSFSVRKTAYCDIHTPPGSARRLPALSHSEGEEDEDEEEDEGKGWSSEKVKKAKAKSRIKMKKARKILAEKRAAAPVVSVPCIPPHRLSKITNRLTIQRKSQFMQRLHSYWTLKRQSRNGVPLLRRLQTHLQSQRNCDQVGRDSEDKNWALKEQLKSWQRLRHDLERARLLVELIRKREKLKRETIKVQQIAMEMQLTPFLILLRKTLEQLQEKDTGNIFSEPVPLSEVTELDEVPDYLDHIKKPMDFFTMKQNLEAYRYLNFDDFEEDFNLIVSNCLKYNAKDTIFYRAAVRLREQGGAVLRQARRQAEKMGIDFETGMHIPHSLAGDEATHHTEDAAEEERLVLLENQKHLPVEEQLKLLLERLDEVNASKQSVGRSRRAKMIKKEMTALRRKLAHQRETGRDGPERHGPSSRGSLTPHPAACDKDGQTDSAAEESSSQETSKGLGPNMSSTPAHEVGRRTSVLFSKKNPKTAGPPKRPGRPPKNRESQMTPSHGGSPVGPPQLPIMSSLRQRKRGRSPRPSSSSDSDSDKSTEDPPMDLPANGFSGGNQPVKKSFLVYRNDCSLPRSSSDSESSSSSSSSAASDRTSTTPSKQGRGKPSFSRGTFPEDSSEDTSGTENEAYSVGTGRGVGHSMVRKSLGRGAGWLSEDEDSPLDALDLVWAKCRGYPSYPALIIDPKMPREGMFHHGVPIPVPPLEVLKLGEQMTQEAREHLYLVLFFDNKRTWQWLPRTKLVPLGVNQDLDKEKMLEGRKSNIRKSVQIAYHRALQHRSKVQGEQSSETSDSD

SEQ ID NO: 11010 - protein, 553 aa, Homo sapiens
MSLGGASERSVPATKIEITVSCRNLLDLDTFSKSDPMVVLYTQSRASQEWREFGRTEVIDNTLNPDFVRKFVLDYFFEEKQNLRFDVYNVDSKTNISKPKDFLGQAFLALGEVIGGQGSRVERTLTGVPGKKCGTILLTAEELSNCRDIATMQLCANKLDKKDFFGKSDPFLVFYRSNEDGTFTICHKTEVVKNTLNPVWQPFSIPVRALCNGDYDRTVKIDVYDWDRDGSHDFIGEFTTSYRELSKAQNQFTVYEVLNPRKKCKKKKYVNSGTVTLLSFSVDSEFTFVDYIKGGTQLNFTVAIDFTASNGNPLQPTSLHYMSPYQLSAYAMALKAVGEIIQDYDSDKLFPAYGFGAKLPPEGRISHQFPLNNNDEDPNCAGIEGVLESYFQSLRTVQLYGPTYFAPVINQVARAAAKISDGSQYYVLLIITDGVISDMTQTKEAIVSASSLPMSIIIVGVGPAMFEAMEELDGDDVRVSSRGRYAERDIVQFVPFRDYVDRSGNQVLSMARLAKDVLAEIPEQLLSYMRTRDIQPRPPPPANPSPIPAPEQP

SEQ ID NO: 11011 - protein, 1099 aa, Homo sapiens
MSSQTKFKKDKEIIAEYEAQIKEIRTQLVEQFKCLEQQSESRLQLLQDLQEFFRRKAEIELEYSRSLEKLAERFSSKIRSSREHQFKKDQYLLSPVNCWYLVLHQTRRESRDHATLNDIFMNNVIVRLSQISEDVIRLFKKSKEIGLQMHEELLKVTNELYTVMKTYHMYHAESISAESKLKEAEKQEEKQFNKSGDLSMNLLRHEDRPQRRSSVKKIEKMKEKRQAKYSENKLKCTKARNDYLLNLAATNAAISKYYIHDVSDLIDCCDLGFHASLARTFRTYLSAEYNLETSRHEGLDVIENAVDNLDSRSDKHTVMDMCNQVFCPPLKFEFQPHMGDEVCQVSAQQPVQTELLMRYHQLQSRLATLKIENEEVRKTLDATMQTLQDMLTVEDFDVSDAFQHSRSTESVKSAASETYMSKINIAKRRANQQETEMFYFTKFKEYVNGSNLITKLQAKHDLLKQTLGEGERAECGTTRPPCLPPKPQKMRRPRPLSVYSHKLFNGSMEAFIKDSGQAIPLVVESCIRYINLYGLQQQGIFRVPGSQVEVNDIKNSFERGEDPLVDDQNERDINSVAGVLKLYFRGLENPLFPKERFQDLISTIKLENPAERVHQIQQILVTLPRVVIVVMRYLFAFLNHLSQYSDENMMDPYNLAICFGPTLMHIPDGQDPVSCQAHINEVIKTIIIHHEAIFPSPRELEGPVYEKCMAGGEEYCDSPHSEPGAIDEVDHDNGTEPHTSDEEVEQIEAIAKFDYMGRSPRELSFKKGASLLLYHRASEDWWEGRHNGVDGLIPHQYIVVQDMDDAFSDSLSQKADSEASSGPLLDDKASSKNDLQSPTEHISDYGFGGVMGRVRLRSDGAAIPRRRSGGDTHSPPRGLGPSIDTPPRAAACPSSPHKIPLTRGRIESPEKRRMATFGSAGSINYPDKKALSEGHSMRSTCGSTRHSSLGDHKSLEAEALAEDIEKTMSTALHELRELERQNTVKQAPDVVLDTLEPLKNPPGPVSSEPASPLHTIVIRDPDAAMRRSSSSSTEMMTTFKPALSARLAGAQLRPPPMRPVRPVVQHRSSSSSSSGVGSPAVTPTEKMFPNSSADKSGTM

SEQ ID NO: 11012 - protein, 684 aa, Homo sapiens
MFAEAAKTTRPCGMAEFKEKPEAPTEQLDVACGQENLPVGAWPPGAAPAPFQYTPDHVVGPGADIDPTQITFPGCICVKTPCLPGTCSCLRHGENYDDNSCLRDIGSGGKYAEPVFECNVLCRCSDHCRNRVVQKGLQFHFQVFKTHKKGWGLRTLEFIPKGRFVCEYAGEVLGFSEVQRRIHLQTKSDSNYIIAIREHVYNGQVMETFVDPTYIGNIGRFLNHSCEPNLLMIPVRIDSMVPKLALFAAKDIVPEEELSYDYSGRYLNLTVSEDKERLDHGKLRKPCYCGAKSCTAFLPFDSSLYCPVEKSNISCGNEKEPSMCGSAPSVFPSCKRLTLETMKMMLDKKQIRAIFLFEFKMGRKAAETTRNINNAFGPGTANERTVQWWFKKFCKGDESLEDEERSGRPSEVDNDQLRAIIEADPLTTTREVAEELNVNHSTVVRHLKQIGKVKKLDKWVPHELTENQKNRRFEVSSSLILRNHNEPFLDRIVTCDEKWILYDNRRRSAQWLDQEEAPKHFPKPILHPKKVMVTIWWSAAGLIHYSFLNPGETITSEKYAQEIDEMNQKLQRLQLALVNRKGPILLHDNARPHVAQPTLQKLNELGYEVLPHPPYSPDLLPTNYHVFKHLNNFLQGKRFHNQQDAENAFQEFVESQSTDFYATGINQLISRWQKCVDCNGSYFD

SEQ ID NO: 11013 - protein, 2391 aa, Homo sapiens
MTDLLRSVVTVIDVFYKYTKQDGECGTLSKGELKELLEKELHPVLKNPDDPDTVDVIMHMLDRDHDRRLDFTEFLLMIFKLTMACNKVLSKEYCKASGSKKHRRGHRHQEEESETEEDEEDTPGHKSGYRHSSWSEGEEHGYSSGHSRGTVKCRHGSNSRRLGRQGNLSSSGNQEGSQKRYHRSSCGHSWSGGKDRHGSSSVELRERINKSHISPSRESGEEYESGSGSNSWERKGHGGLSCGLETSGHESNSTQSRIREQKLGSSCSGSGDSGRRSHACGYSNSSGCGRPQNASSSCQSHRFGGQGNQFSYIQSGCQSGIKGGQGHGCVSGGQPSGCGQPESNPCSQSYSQRGYGARENGQPQNCGGQWRTGSSQSSCCGQYGSGGSQSCSNGQHEYGSCGRFSNSSSSNEFSKCDQYGSGSSQSTSFEQHGTGLSQSSGFEQHVCGSGQTCGQHESTSSQSLGYDQHGSSSGKTSGFGQHGSGSGQSSGFGQCGSGSGQSSGFGQHGSVSGQSSGFGQHGSVSGQSSGFGQHESRSRQSSYGQHGSGSSQSSGYGQYGSRETSGFGQHGLGSGQSTGFGQYGSGSGQSSGFGQHGSGSGQSSGFGQHESRSGQSSYGQHSSGSSQSSGYGQHGSRQTSGFGQHGSGSSQSTGFGQYGSGSGQSSGFGQHVSGSGQSSGFGQHESRSGHSSYGQHGFGSSQSSGYGQHGSSSGQTSGFGQHELSSGQSSSFGQHGSGSGQSSGFGQHGSGSGQSSGFGQHESRSGQSSYGQHSSGSSQSSGYGQHGSRQTSGFGQHGSGSSQSTGFGQYGSGSGQSAGFGQHGSGSGQSSGFGQHESRSHQSSYGQHGSGSSQSSGYGQHGSSSGQTSGFGQHRSSSGQYSGFGQHGSGSGQSSGFGQHGTGSGQYSGFGQHESRSHQSSYGQHGSGSSQSSGYGQHGSSSGQTFGFGQHRSGSGQSSGFGQHGSGSGQSSGFGQHESGSGKSSGFGQHESRSSQSNYGQHGSGSSQSSGYGQHGSSSGQTTGFGQHRSSSGQYSGFGQHGSGSDQSSGFGQHGTGSGQSSGFGQYESRSRQSSYGQHGSGSSQSSGYGQHGSNSGQTSGFGQHRPGSGQSSGFGQYGSGSGQSSGFGQHGSGTGKSSGFAQHEYRSGQSSYGQHGTGSSQSSGCGQHESGSGPTTSFGQHVSGSDNFSSSGQHISDSGQSTGFGQYGSGSGQSTGLGQGESQQVESGSTVHGRQETTHGQTINTTRHSQSGQGQSTQTGSRVTRRRRSSQSENSDSEVHSKVSHRHSEHIHTQAGSHYPKSGSTVRRRQGTTHGQRGDTTRHGHSGHGQSTQTGSRTSGRQRFSHSDATDSEVHSGVSHRPHSQEQTHSQAGSQHGESESTVHERHETTYGQTGEATGHGHSGHGQSTQRGSRTTGRRGSGHSESSDSEVHSGGSHRPQSQEQTHGQAGSQHGESGSTVHGRHGTTHGQTGDTTRHAHYHHGKSTQRGSSTTGRRGSGHSESSDSEVHSGGSHTHSGHTHGQSGSQHGESESIIHDRHRITHGQTGDTTRHSYSGHEQTTQTGSRTTGRQRTSHSESTDSEVHSGGSHRPHSREHTYGQAGSQHEEPEFTVHERHGTTHGQIGDTTGHSHSGHGQSTQRGSRTTGRQRSSHSESSDSEVHSGVSHTHTGHTHGQAGSQHGQSESIVPERHGTTHGQTGDTTRHAHYHHGLTTQTGSRTTGRRGSGHSEYSDSEGYSGVSHTHSGHTHGQARSQHGESESIVHERHGTIHGQTGDTTRHAHSGHGQSTQTGSRTTGRRSSGHSEYSDSEGHSGFSQRPHSRGHTHGQAGSQHGESESIVDERHGTTHGQTGDTSGHSQSGHGQSTQSGSSTTGRRRSGHSESSDSEVHSGGSHTHSGHTHSQARSQHGESESTVHKRHQTTHGQTGDTTEHGHPSHGQTIQTGSRTTGRRGSGHSEYSDSEGPSGVSHTHSGHTHGQAGSHYPESGSSVHERHGTTHGQTADTTRHGHSGHGQSTQRGSRTTGRRASGHSEYSDSEGHSGVSHTHSGHAHGQAGSQHGESGSSVHERHGTTHGQTGDTTRHAHSGHGQSTQRGSRTAGRRGSGHSESSDSEVHSGVSHTHSGHTYGQARSQHGESGSAIHGRQGTIHGQTGDTTRHGQSGHGQSTQTGSRTTGRQRSSHSESSDSEVHSEASPTHSGHTHSQAGSRHGQSGSSGHGRQGTTHGQTGDTTRHAHYGYGQSTQRGSRTTGRRGSGHSESSDSEVHSWGSHTHSGHIQGQAGSQQRQPGSTVHGRLETTHGQTGDTTRHGHSGYGQSTQTGSRSSRASHFQSHSSERQRHGSSQVWKHGSYGPAEYDYGHTGYGPSGGSRKSISNSHLSWSTDSTANKQLSRH

SEQ ID NO: 11014 - protein, 565 aa, Homo sapiens
MASNNHWFQSSQVPSFAQMLKKNLPVQPATKTITTPTGWSSESYGLSKMASKVTQVTGNFPEPLLSKNLSSISNPVLPPKKIPKEFIMKYKRGEINPVSALHQFAQMQRVQLDLKETVTTGNVMGPYFAFCAVVDGIQYKTGLGQNKKESRSNAAKLALDELLQLDEPEPRILETSGPPPFPAEPVVLSELAYVSKVHYEGRHIQYAKISQIVKERFNQLISNRSEYLKYSSSLAAFIIERAGQHEVVAIGTGEYNYSQDIKPDGRVLHDTHAVVTARRSLLSKNPAMMEKSIFCTEPTSNLLTLKQNINICLYMNQLPKGSAQIKSQLRLNPHSISAFEANEELCLHVAVEGKIYLTVYCPKDGVNRISSMSSSDKLTRWEVLGVQGALLSHFIQPVYISSILIGDGNCSDTRGLEIAIKQRVDDALTSKLPMFYLVNRPHISLVPSAYPLQMNLEYKFLSLNWAQGDVSLEIVDGLSGKITESSPFKSGMSMASRLCKAAMLSRFNLLAKEAKKELLEAGTYHAAKCMSASYQEAKCKLKSYLQQHGYGSWIVKSPCIEQFNM

SEQ ID NO: 11015 - protein, 559 aa, Homo sapiens
MLLFPQVAVKTEPMSSSETASTTADGSLNNFSGSAIGSSSFSPRPTHQFSPPQIYPSNRPYPHILPTPSSQTMAAYGQTQFTTGMQQATAYATYPQPGQPYGISSYGALWAGIKTEGGLSQSQSPGQTGFLSYGTSFSTPQPGQAPYSYQMQGSSFTTSSGIYTGNNSLTNSSGFNSSQQDYPSYPSFGQGQYAQYYNSSPYPAHYMTSSNTSPTTPSTNATYQLQEPPSGITSQAVTDPTAEYSTIHSPSTPIKDSDSDRLRRGSDGKSRGRGRRNNNPSPPPDSDLERVFIWDLDETIIVFHSLLTGSYANRYGRDPPTSVSLGLRMEEMIFNLADTHLFFNDLEECDQVHIDDVSSDDNGQDLSTYNFGTDGFPAAATSANLCLATGVRGGVDWMRKLAFRYRRVKEIYNTYKNNVGGLLGPAKREAWLQLRAEIEALTDSWLTLALKALSLIHSRTNCVNILVTTTQLIPALAKVLLYGLGIVFPIENIYSATKIGKESCFERIIQRFGRKVVYVVIGDGVEEEQGAKKHAMPFWRISSHSDLMALHHALELEYL

SEQ ID NO: 11016 - protein, 558 aa, Homo sapiens
MLLFPQVAVKTEPMSSSETASTTADGSLNNFSGSAIGSSSFSPRPTHQFSPPQIYPSKPYPHILPTPSSQTMAAYGQTQFTTGMQQATAYATYPQPGQPYGISSYGALWAGIKTEGGLSQSQSPGQTGFLSYGTSFSTPQPGQAPYSYQMQGSSFTTSSGIYTGNNSLTNSSGFNSSQQDYPSYPSFGQGQYAQYYNSSPYPAHYMTSSNTSPTTPSTNATYQLQEPPSGITSQAVTDPTAEYSTIHSPSTPIKDSDSDRLRRGSDGKSRGRGRRNNNPSPPPDSDLERVFIWDLDETIIVFHSLLTGSYANRYGRDPPTSVSLGLRMEEMIFNLADTHLFFNDLEECDQVHIDDVSSDDNGQDLSTYNFGTDGFPAAATSANLCLATGVRGGVDWMRKLAFRYRRVKEIYNTYKNNVGGLLGPAKREAWLQLRAEIEALTDSWLTLALKALSLIHSRTNCVNILVTTTQLIPALAKVLLYGLGIVFPIENIYSATKIGKESCFERIIQRFGRKVVYVVIGDGVEEEQGAKKHAMPFWRISSHSDLMALHHALELEYL

SEQ ID NO: 11017 - protein, 591 aa, Homo sapiens
MEMQDLTSPHSRLSGSSESPSGPKLGNSHINSNSMTPNGTEVKTEPMSSSETASTTADGSLNNFSGSAIGSSSFSPRPTHQFSPPQIYPSKPYPHILPTPSSQTMAAYGQTQFTTGMQQATAYATYPQPGQPYGISSYGALWAGIKTEGGLSQSQSPGQTGFLSYGTSFSTPQPGQAPYSYQMQGSSFTTSSGIYTGNNSLTNSSGFNSSQQDYPSYPSFGQGQYAQYYNSSPYPAHYMTSSNTSPTTPSTNATYQLQEPPSGITSQAVTDPTAEYSTIHSPSTPIKDSDSDRLRRGSDGKSRGRGRRNNNPSPPPDSDLERVFIWDLDETIIVFHSLLTGSYANRYGRDPPTSVSLGLRMEEMIFNLADTHLFFNDLEECDQVHIDDVSSDDNGQDLSTYNFGTDGFPAAATSANLCLATGVRGGVDWMRKLAFRYRRVKEIYNTYKNNVGGLLGPAKREAWLQLRAEIEALTDSWLTLALKALSLIHSRTNCVNILVTTTQLIPALAKVLLYGLGIVFPIENIYSATKIGKESCFERIIQRFGRKVVYVVIGDGVEEEQGAKKHAMPFWRISSHSDLMALHHALELEYL

SEQ ID NO: 11018 - protein, 394 aa, Homo sapiens
MAAPSPGPREVLAPSPEAGCRAVTSSRRGLLWRLRDKQSRLGLFEISPGHELHGMTCMMQAGLWAATQVSMDHPPTGPPSRDDFSEVLTQVHEGFELGTLAGPAFAWLRRSLGLAEEDYQAALGPGGPYLQFLSTSKSKASFFLSHDQRFFLKTQGRREVQALLAHLPRYVQHLQRHPHSLLARLLGVHSLRVDRGKKTYFIVMQSVFYPAGRISERYDIKGCEVSRWVDPAPEGSPLVLVLKDLNFQGKTINLGPQRSWFLRQMELDTTFLRELNVLDYSLLIAFQRLHEDERGPGSSLIFRTARSVQGAQSPEESRAQNRRLLPDAPNALHILDGPEQRYFLGVVDLATVYGLRKRLEHLWKTLRYPGRTFSTVSPARYARRLCQWVEAHTE

SEQ ID NO: 11019 - protein, 382 aa, Homo sapiens
MLDTNLILLPLFQFIVPKEWNSKYRPVCIHLAGTGDHHYWRRRTLMARPMIKEARMASLLLENPYYGCRKPKDQVRSSLKNVSDLFVMGGALVLESAALLHWLEREGYGPLGMTGISMGGHMASLAVSNWPKPMPLIPCLSWSTASGVFTTGVLSKSINWRELEKQYYTQTVYEEEIIHMLEYCGTDSFKMGQEFVKHFTSSADKLTNLNLVSRTLNLDISNQVVSQKPADCHNSSKTSVSATSEGLLLQDTSKMKRFNQTLSTNKSGYTSRNPQSYHLLSKEQSRNSLRKESLIFMKGVMDECTHVANFSVPVDPSLIIVVQAKEDAYIPRTGVRSLQEIWPGCEIRYLEGGHISAYLFKQGLFRQAIYDAFDRFLHKYAN

SEQ ID NO: 11020 - protein, 1686 aa, Homo sapiens
MPGGPSPRSPAPLLRPLLLLLCALAPGAPGPAPGRATEGRAALDIVHPVRVDAGGSFLSYELWPRALRKRDVSVRRDAPAFYELQYRGRELRFNLTANQHLLAPGFVSETRRRGGLGRAHIRAHTPACHLLGEVQDPELEGGLAAISACDGLKGVFQLSNEDYFIEPLDSAPARPGHAQPHVVYKRQAPERLAQRGDSSAPSTCGVQVYPELESRRERWEQRQQWRRPRLRRLHQRSVSKEKWVETLVVADAKMVEYHGQPQVESYVLTIMNMVAGLFHDPSIGNPIHITIVRLVLLEDEEEDLKITHHADNTLKSFCKWQKSINMKGDAHPLHHDTAILLTRKDLCAAMNRPCETLGLSHVAGMCQPHRSCSINEDTGLPLAFTVAHELGHSFGIQHDGSGNDCEPVGKRPFIMSPQLLYDAAPLTWSRCSRQYITRFLDRGWGLCLDDPPAKDIIDFPSVPPGVLYDVSHQCRLQYGAYSAFCEDMDNVCHTLWCSVGTTCHSKLDAAVDGTRCGENKWCLSGECVPVGFRPEAVDGGWSGWSAWSICSRSCGMGVQSAERQCTQPTPKYKGRYCVGERKRFRLCNLQACPAGRPSFRHVQCSHFDAMLYKGQLHTWVPVVNDVNPCELHCRPANEYFAEKLRDAVVDGTPCYQVRASRDLCINGICKNVGCDFEIDSGAMEDRCGVCHGNGSTCHTVSGTFEEAEGLGYVDVGLIPAGAREIRIQEVAEAANFLALRSEDPEKYFLNGGWTIQWNGDYQVAGTTFTYARRGNWENLTSPGPTKEPVWIQLLFQESNPGVHYEYTIHREAGGHDEVPPPVFSWHYGPWTKCTVTCGRGVQRQNVYCLERQAGPVDEEHCDPLGRPDDQQRKCSEQPCPARWWAGEWQLCSSSCGPGGLSRRAVLCIRSVGLDEQSALEPPACEHLPRPPTETPCNRHVPCPATWAVGNWSQCSVTCGEGTQRRNVLCTNDTGVPCDEAQQPASEVTCSLPLCRWPLGTLGPEGSGSGSSSHELFNEADFIPHHLAPRPSPASSPKPGTMGNAIEEEAPELDLPGPVFVDDFYYDYNFINFHEDLSYGPSEEPDLDLAGTGDRTPPPHSHPAAPSTGSPVPATEPPAAKEEGVLGPWSPSPWPSQAGRSPPPPSEQTPGNPLINFLPEEDTPIGAPDLGLPSLSWPRVSTDGLQTPATPESQNDFPVGKDSQSQLPPPWRDRTNEVFKDDEEPKGRGAPHLPPRPSSTLPPLSPVGSTHSSPSPDVAELWTGGTVAWEPALEGGLGPVDSELWPTVGVASLLPPPIAPLPEMKVRDSSLEPGTPSFPTPGPGSWDLQTVAVWGTFLPTTLTGLGHMPEPALNPGPKGQPESLSPEVPLSSRLLSTPAWDSPANSHRVPETQPLAPSLAEAGPPADPLVVRNAGWQAGNWSECSTTCGLGAVWRPVRCSSGRDEDCAPAGRPQPARRCHLRPCATWHSGNWSKCSRSCGGGSSVRDVQCVDTRDLRPLRPFHCQPGPAKPPAHRPCGAQPCLSWYTSSWRECSEACGGGEQQRLVTCPEPGLCEEALRPNTTRPCNTHPCTQWVVGPWGQCSGPCGGGVQRRLVKCVNTQTGLPEEDSDQCGHEAWPESSRPCGTEDCEPVEPPRCERDRLSFGFCETLRLLGRCQLPTIRTQCCRSCSPPSHGAPSRGHQRVARR

SEQ ID NO: 11021 - protein, 198 aa, Homo sapiens
MDQSSEGCMKKISSVNLDKLINDFSQIEKKMVETNGKNNILDIQLEKSNCLLKVMQAKEVSIKEECATLHNIIKGLQQTIEYQQNLKVELNEEKHKELIEKKEMEISELNAKLRSQEKEKQNEIIKLQLEFDAKLARVQTKSKSYQDSTVLPQSIYRRKLQHFQEEKNKEIAILRNTIRDLEQRLSVGKDSHLKRRRF

SEQ ID NO: 11022 - protein, 548 aa, Homo sapiens
MEDGRALEGTLSELAAETDLPVVFVKQRKIGGHGPTLKAYQEGRLQKLLKMNGPEDLPKSYDYDLIIIGGGSGGLAAAKEAAQYGKKVMVLDFVTPTPLGTRWGLGGTCVNVGCIPKKLMHQAALLGQALQDSRNYGWKVEETVKHDWDRMIEAVQNHIGSLNWGYRVALREKKVVYENAYGQFIGPHRIKATNNKGKEKIYSAERFLIATGERPRYLGIPGDKEYCISSDDLFSLPYCPGKTLVVGASYVALECAGFLAGIGLDVTVMVRSILLRGFDQDMANKIGEHMEEHGIKFIRQFVPIKVEQIEAGTPGRLRVVAQSTNSEEIIEGEYNTVMLAIGRDACTRKIGLETVGVKINEKTGKIPVTDEEQTNVPYIYAIGDILEDKVELTPVAIQAGRLLAQRLYAGSTVKCDYENVPTTVFTPLEYGACGLSEEKAVEKFGEENIEVYHSYFWPLEWTIPSRDNNKCYAKIICNTKDNERVVGFHVLGPNAGEVTQGFAAALKCGLTKKQLDSTIGIHPVCAEVFTTLSVTKRSGASILQAGCG

SEQ ID NO: 11023 - protein, 765 aa, Homo sapiens
MNTSGDPAQTGPEGCRGTMSAEEDARWLRWVTQQFKTIAGEDGEISLQEFKAALHVKESFFAERFFALFDSDRSGTITLQELQEALTLLIHGSPMDKLKFLFQVYDIDVCARQGASAGTEWGAGAGPHWASSPLGTGSGSIDPDELRTVLQSCLRESAISLPDEKLDQLTLALFESADADGNGAITFEELRDELQRFPGVMENLTISAAHWLTAPAPRPRPRRPRQLTRAYWHNHRSQLFCLATYAGLHVLLFGLAASAHRDLGASVMVAKGCGQCLNFDCSFIAVLMLRRCLTWLRATWLAQVLPLDQNIQFHQLMGYVVVGLSLVHTVAHTVNFVLQAQAEASPFQFWELLLTTRPGIGWVHGSASPTGVALLLLLLLMFICSSSCIRRSGHFEVFYWTHLSYLLVWLLLIFHGPNFWKWLLVPGILFFLEKAIGLAVSRMAAVCIMEVNLLPSKVTHLLIKRPPFFHYRPGDYLYLNIPTIARYEWHPFTISSAPEQKDTIWLHIRSQGQWTNRLYESFKASDPLGRGSKRLSRSVTMRKSQRSSKGSEILLEKHKFCNIKCYIDGPYGTPTRRIFASEHAVLIGAGIGITPFASILQSIMYRHQKRKHTCPSCQHSWIEGVQDNMKLHKVDFIWINRDQRSFEWFVSLLTKLEMDQAEEAQYGRFLELHMYMTSALGKNDMKAIGLQMALDLLANKEKKDSITGLQTRTQPGRPDWSKVFQKVAAEKKGKVQVFFCGSPALAKVLKGHCEKFGFRFFQENF

SEQ ID NO: 11024 - protein, 2551 aa, Homo sapiens
MMLQHLVIFCLGLVVQNFCSPAETTGQARRCDRKSLLTIRTECRSCALNLGVKCPDGYTMITSGSVGVRDCRYTFEVRTYSLSLPGCRHICRKDYLQPRCCPGRWGPDCIECPGGAGSPCNGRGSCAEGMEGNGTCSCQEGFGGTACETCADDNLFGPSCSSVCNCVHGVCNSGLDGDGTCECYSAYTGPKCDKPIPECAALLCPENSRCSPSTEDENKLECKCLPNYRGDGKYCDPINPCLRKICHPHAHCTYLGPNRHSCTCQEGYRGDGQVCLPVDPCQINFGNCPTKSTVCKYDGPGQSHCECKEHYQNFVPGVGCSMTDICKSDNPCHRNANCTTVAPGRTECICQKGYVGDGLTCYGNIMERLRELNTEPRGKWQGRLTSFISLLDKAYAWPLSKLGPFTVLLPTDKGLKGFNVNELLVDNKAAQYFVKLHIIAGQMNIEYMNNTDMFYTLTGKSGEIFNSDKDNQIKLKLHGGKKKVKIIQGDIIASNGLLHILDRAMDKLEPTFESNNEQTIMTMLQPRYSKFRSLLEETNLGHALDEDGVGGPYTIFVPNNEALNNMKDGTLDYLLSPEGSRKLLELVRYHIVPFTQLEVATLISTPHIRSMANQLIQFNTTDNGQILANDVAMEEIEITAKNGRIYTLTGVLIPPSIVPILPHRCDETKREMKLGTCVSCSLVYWSRCPANSEPTALFTHRCVYSGRFGSLKSGCARYCNATVKIPKCCKGFYGPDCNQCPGGFSNPCSGNGQCADSLGGNGTCICEEGFQGSQCQFCSDPNKYGPRCNKKCLCVHGTCNNRIDSDGACLTGTCRDGSAGRLCDKQTSACGPYVQFCHIHATCEYSNGTASCICKAGYEGDGTLCSEMDPCTGLTPGGCSRNAECIKTGTGTHTCVCQQGWTGNGRDCSEINNCLLPSAGGCHDNASCLYVGPGQNECECKKGFRGNGIDCEPITSCLEQTGKCHPLASCQSTSSGVWSCVCQEGYEGDGFLCYGNAAVELSFLSEAAIFNRWINNASLQPTLSATSNLTVLVPSQQATEDMDQDEKSFWLSQSNIPALIKYHMLLGTYRVADLQTLSSSDMLATSLQGNFLHLAKVDGNITIEGASIVDGDNAATNGVIHIINKVLVPQRRLTGSLPNLLMRLEQMPDYSIFRGYIIQYNLANAIEAADAYTVFAPNNNAIENYIREKKVLSLEEDVLRYHVVLEEKLLKNDLHNGMHRETMLGFSYFLSFFLHNDQLYVNEAPINYTNVATDKGVIHGLGKVLEIQKNRCDNNDTTIIRGRCRTCSSELTCPFGTKSLGNEKRRCIYTSYFMGRRTLFIGCQPKCVRTVITRECCAGFFGPQCQPCPGNAQNVCFGNGICLDGVNGTGVCECGEGFSGTACETCTEGKYGIHCDQACSCVHGRCNQGPLGDGSCDCDVGWRGVHCDNATTEDNCNGTCHTSANCLTNSDGTASCKCAAGFQGNGTICTAINACEISNGGCSAKADCKRTTPGRRVCTCKAGYTGDGIVCLEINPCLENHGGCDKNAECTQTGPNQAACNCLPAYTGDGKVCTLINVCLTKNGGCSEFAICNHTGQVERTCTCKPNYIGDGFTCRGSIYQELPKNPKTSQYFFQLQEHFVKDLVGPGPFTVFAPLSAAFDEEARVKDWDKYGLMPQVLRYHVVACHQLLLENLKLISNATSLQGEPIVISVSQSTVYINNKAKIISSDIISTNGIVHIIDKLLSPKNLLITPKDNSGRILQNLTTLATNNGYIKFSNLIQDSGLLSVITDPIHTPVTLFWPTDQALHALPAEQQDFLFNQDNKDKLKEYLKFHVIRDAKVLAVDLPTSTAWKTLQGSELSVKCGAGRDIGDLFLNGQTCRIVQRELLFDLGVAYGIDCLLIDPTLGGRCDTFTTFDASGECGSCVNTPSCPRWSKPKGVKQKCLYNLPFKRNLEGCRERCSLVIQIPRCCKGYFGRDCQACPGGPDAPCNNRGVCLDQYSATGECKCNTGFNGTACEMCWPGRFGPDCLPCGCSDHGQCDDGITGSGQCLCETGWTGPSCDTQAVLPAVCTPPCSAHATCKENNTCECNLDYEGDGITCTVVDFCKQDNGGCAKVARCSQKGTKVSCSCQKGYKGDGHSCTEIDPCADGLNGGCHEHATCKMTGPGKHKCECKSHYVGDGLNCEPEQLPIDRCLQDNGQCHADAKCVDLHFQDTTVGVFHLRSPLGQYKLTFDKAREACANEAATMATYNQLSYAQKAKYHLCSAGWLETGRVAYPTAFASQNCGSGVVGIVDYGPRPNKSEMWDVFCYRMKDVNCTCKVGYVGDGFSCSGNLLQVLMSFPSLTNFLTEVLAYSNSSARGRAFLEHLTDLSIRGTLFVPQNSGLGENETLSGRDIEHHLANVSMFFYNDLVNGTTLQTRLGSKLLITASQDPLQPTETRFVDGRAILQWDIFASNGIIHVISRPLKAPPAPVTLTHTGLGAGIFFAIILVTGAVALAAYSYFRINRRTIGFQHFESEEDINVAALGKQQPENISNPLYESTTSAPPEPSYDPFTDSEERQLEGNDPLRTL

SEQ ID NO: 11025 - protein, 1179 aa, Homo sapiens
MARRSQSSSQGDNPLAPGYLPPHYKEYYRLAVDALAEGGSEAYSRFLATEGAPDFLCPEELEHVSRHLRPPQYVTREPPEGSLLDVDMDGSSGTYWPVNSDQAVPELDLGWPLTFGFQGTEVTTLVQPPPPDSPSIKDEARRMIRSAQQVVAVVMDMFTDVDLLSEVLEAAARRVPVYILLDEMNAQHFLDMADKCRVNLQHVDFLRVRTVAGPTYYCRTGKSFKGHVKEKFLLVDCAVVMSGSYSFMWSFEKIHRSLAHVFQGELVSSFDEEFRILFAQSEPLVPSAAALARMDAYALAPYAGAGPLVGVPGVGAPTPFSFPKRAHLLFPPPREEGLGFPSFLDPDRHFLSAFRREEPPRMPGGALEPHAGLRPLSRRLEAEAGPAGELAGARGFFQARHLEMDAFKRHSFATEGAGAVENFAAARQVSRQTFLSHGDDFRFQTSHFHRDQLYQQQYQWDPQLTPARPQGLFEKLRGGRAGFADPDDFTLGAGPRFPELGPDGHQRLDYVPSSASREVRHGSDPAFAPGPRGLEPSGAPRPNLTQRFPCQAAARPGPDPAPEAEPERRGGPEGRAGLRRWRLASYLSGCHGEDGGDDGLPAPMEAEAYEDDVLAPGGRAPAGDLLPSAFRVPAAFPTKVPVPGPGSGGNGPEREGPEEPGLAKQDSFRSRLNPLVQRSSRLRSSLIFSTSQAEGAAGAAAATEKVQLLHKEQTVSETLGPGGEAVRSAASTKVAELLEKYKGPARDPGGGAGAITVASHSKAVVSQAWREEVAAPGAVGGERRSLESCLLDLRDSFAQQLHQEAERQPGAASLTAAQLLDTLGRSGSDRLPSRFLSAQSHSTSPQGLDSPLPLEGSGAHQVLHNESKGSPTSAYPERKGSPTPGFSTRRGSPTTGFIEQKGSPTSAYPERRGSPVPPVPERRSSPVPPVPERRGSLTLTISGESPKAGPAEEGPSGPMEVLRKGSLRLRQLLSPKGERRMEDEGGFPVPQENGQPESPRRLSLGQGDSTEAATEERGPRARLSSATANALYSSNLRDDTKAILEQISAHGQKHRAVPAPSPGPTHNSPELGRPPAAGVLAPDMSDKDKCSAIFRSDSLGTQGRLSRTLPASAEERDRLLRRMESMRKEKRVYSRFEVFCKKEEASSPGAGEGPAEEGTRDSKVGKFVPKILGTFKSKK

SEQ ID NO: 11026 - protein, 1113 aa, Homo sapiens
MESKAWESNNEDLLSSSGVTSNGGSSSSFFVSSIRGTIIENTSSAGTLTQVPFFPKYEVELDSPRKIIPSPGKEHFERVLEEYSHQVKDLQRRLNESNELHEKQKFYLRQSVIDLQTKLQEMQMERDAMADIRRRESQSQEDLRNQLQNTVHELEAAKCLKEDMLKDSNTQIEQLRKMMLSHEGVLQEIRSILVDFEEASGKKICEHDSMSTLHFRSLGSAISKILRELDTEISYLKGRIFPVEDQLEALKSESQNKIELLLQQHQDRIEQLISEHEVEITGLTEKASSARSQANSIQSQMEIIQEQARNQNSMYMRQLSDLESTVSQLRSELREAKRMYEDKTEELEKQLVLANSELTEARTERDQFSQESGNLDDQLQKLLADLHKREKELSLEKEQNKRLWDRDTGNSITIDHLRRELDNRNMEVQRLEALLKALKSECQGQMERQMAAIQGKNESLEKVSSLTAQLESTKEMLRKVVEELTAKKMTLESSERTISDLTTSLQEKERAIEATNAEITKLRSRVDLKLQELQHLKNEGDHLRNVQTECEALKLQMTEKDKVIEILRQQIENMTQLVGQHGRTAGAMQVEKAQLEKEINDRRMELKELKILKDKKDAKIRELEARVSDLELEKVKLVNAGSERLRAVKDIKQERDQLLNEVKTSRSELNNLSEEYEVLKRNFRNKSEEMEMTTNKLKMQLKSAQSELEQTRNTLKSMEGSDGHAMKVAMGMQKQITAKRGQIDALQSKIQFLEEAMTNANKEKHFLKEEKSKLSQELSTVATEKNKMAGELEVLRSQERRLKEKVTNMEVALDKASLQFAECQDIIQRQEQESVRLKLQHTLDIKELQGPGYTSNSSLKPRLLQPASVTRSHSNVPSSQSTASFLSHHSTKANTLKEDPTRDLKQLLQELRSVINEEPAVSLSKTEEDGRTSLGALEDRVRDCITESSLRSDMCHRSNNSLRDSTEGSKSSETLSREPVTLHAGDREDPSGCFTFTSAASPSVKNSASRSFNSSPKKSPVHSLLTSSVEGSIGSTSQYRSAKPIHSSDSVKDSQSPPIETTGKTCRKLQNRLESLQTLVEDLQLKNQAMSSMIRNQEKRIQKVKDQEKMLLK

SEQ ID NO: 11027 - protein, 537 aa, Homo sapiens
MSAPKLLSLGCIFFPLLLFQQARAQFPRQCATVEALRSGMCCPDLSPVSGPGTDRCGSSSGRGRCEAVTADSRPHSPQYPHDGRDDREVWPLRFFNRTCHCNGNFSGHNCGTCRPGWRGAACDQRVLIVRRNLLDLSKEEKNHFVRALDMAKRTTHPLFVIATRRSEEILGPDGNTPQFENISIYNYFVWTHYYSVKKTFLGVGQESFGEVDFSHEGPAFLTWHRYHLLRLEKDMQEMLQEPSFSLPYWNFATGKNVCDICTDDLMGSRSNFDSTLISPNSVFSQWRVVCDSLEDYDTLGTLCNSTEDGPIRRNPAGNVARPMVQRLPEPQDVAQCLEVGLFDTPPFYSNSTNSFRNTVEGYSDPTGKYDPAVRSLHNLAHLFLNGTGGQTHLSPNDPIFVLLHTFTDAVFDEWLRRYNADISTFPLENAPIGHNRQYNMVPFWPPVTNTEMFVTAPDNLGYTYEIQWPSREFSVPEIIAIAVVGALLLVALIFGTASYLIRARRSMDEANQPLLTDQYQCYAEEYEKLQNPNQSVV

SEQ ID NO: 11028 - protein, 318 aa, Homo sapiens
MATYCDDLGPSSAPPGQAQATAHPPGYEPGDLGAVGGGPLLWVNAPALSPKSYASGPGPAPPYAAPSYGAPGPLLGAPGGLAGADLAWLSLSGQQELLRLVRPPYSYSALIAMAIQSAPLRKLTLSQIYQYVAGNFPFYKRSKAGWQNSIRHNLSLNDCFKKVPRDEDDPGKGNYWTLDPNCEKMFDNGNFRRKRKRRAEASAAVRSGARSVGGAEAPALEPPSAACLDLQASPSPSAPEAATCFSGFASAMSALAGGLGTFPGGLAGDFSFGRRPPTVATHAPQTLNPSPGFAPGHQTAAAGFRLSHLLYSREGTEV

SEQ ID NO: 11029 - protein, 447 aa, Homo sapiens
MPAPALPTSAMAVQVPLWHHYLQAIRSREAPRAQDFQRAENVLLTVLERVHALDPRFIVDYSRGLEAFQFALRSSEDPMDMEVPLWVDAEALLIEEPEATQPEDGLELCHLGVPREGAGLERWTTEDTFTASSEGDAKCRGHIVPSKVLCVLKDLLVAAIVHCKHHSLIAPGSLNAASLREEQLHLSLLVSSGWRTISFHVVPVVRRKLGAPALEGVQQMPGFPEGSLRRILSQGVDLVPASAQLWRTSTDYLLTRLLGELGSLQGHRLDSLSILDRVNHESWRDSGQTDGLTFGHLKMVLLWASVLFLAPEDWAELQGAVYRLLVVLLCCLATRKLPHFLHPQRNLLQGSGLDLGAIYQRVEGFASQPEAALRIHATHLGRSPPPRIGSGLKALLQLPASDPTYWATAYFDVLLDKFQVFNIQDKDRISAMQSIFQKTRTLGGEES

SEQ ID NO: 11030 - protein, 2015 aa, Homo sapiens
MAGMSQRPPSMYWCVGPEESAVCPERAMETLNGAGDTGGKPSTRGGDPAARSRRTEGIRAAYRRGDRGGARDLLEEACDQCASQLEKGQLLSIPAAYGDLEMVRYLLSKRLVELPTEPTDDNPAVVAAYFGHTAVVQELLESLPGPCSPQRLLNWMLALACQRGHLGVVKLLVLTHGADPESYAVRKNEFPVIVRLPLYAAIKSGNEDIAIFLLRHGAYFCSYILLDSPDPSKHLLRKYFIEASPLPSSYPGKTALRVKWSHLRLPWVDLDWLIDISCQITELDLSANCLATLPSVIPWGLINLRKLNLSDNHLGELPGVQSSDEIICSRLLEIDISSNKLSHLPPGFLHLSKLQKLTASKNCLEKLFEEENATNWIGLRKLQELDISDNKLTELPALFLHSFKSLNSLNVSRNNLKVFPDPWACPLKCCKASRNALECLPDKMAVFWKNHLKDVDFSENALKEVPLGLFQLDALMFLRLQGNQLAALPPQEKWTCRQLKTLDLSRNQLGKNEDGLKTKRIAFFTTRGRQRSGTEAASVLEFPAFLSESLEVLCLNDNHLDTVPPSVCLLKSLSELYLGNNPGLRELPPELGQLGNLWQLDTEDLTISNVPAEIQKEGPKAMLSYLRAQLRKAEKCKLMKMIIVGPPRQGKSTLLEILQTGRAPQVVHGEATIRTTKWELQRPAGSRAKVESVEFNVWDIGGPASMATVNQCFFTDKALYVVVWNLALGEEAVANLQFWLLNIEAKAPNAVVLVVGTHLDLIEAKFRVERIATLRAYVLALCRSPSGSRATGFPDITFKHLHEISCKSLEGQEGLRQLIFHVTCSMKDVGSTIGCQRLAGRLIPRSYLSLQEAVLAEQQRRSRDDDVQYLTDRQLEQLVEQTPDNDIKDYEDLQSAISFLIETGTLLHFPDTSHGLRNLYFLDPIWLSECLQRIFNIKGSRSVAKNGVIRAEDLRMLLVGTGFTQQTEEQYFQFLAKFEIALPVANDSYLLPHLLPSKPGLDTHGMRHPTANTIQRVFKMSFVPVGFWQRFIARMLISLAEMDLQLFENKKNTKSRNRKVTIYSFTGNQRNRCSTFRVKRNQTIYWQEGLLVTFDGGYLSVESSDVNWKKKKSGGMKIVCQSEVRDFSAMAFITDHVNSLIDQWFPALTATESDGTPLMEQYVPCPVCETAWAQHTDPSEKSEDVQYFDMEDCVLTAIERDFISCPRHPDLPVPLQELVPELFMTDFPARLFLENSKLEHSEDEGSVLGQGGSGTVIYRARYQGQPVAVKRFHIKKFKNFANVPADTMLRHLRATDAMKNFSEFRQEASMLHALQHPCIVALIGISIHPLCFALELAPLSSLNTVLSENARDSSFIPLGHMLTQKIAYQIASGLAYLHKKNIIFCDLKSDNILVWSLDVKEHINIKLSDYGISRQSFHEGALGVEGTPGYQAPEIRPRIVYDEKVDMFSYGMVLYELLSGQRPALGHHQLQIAKKLSKGIRPVLGQPEEVQFRRLQALMMECWDTKPEKRPLALSVVSQMKDPTFATFMYELCCGKQTAFFSSQGQEYTVVFWDGKEESRNYTVVNTEKGLMEVQRMCCPGMKVSCQLQVQRSLWTATEDQKIYIYTLKGMCPLNTPQQALDTPAVVTCFLAVPVIKKNSYLVLAGLADGLVAVFPVVRGTPKDSCSYLCSHTANRSKFSIADEDARQNPYPVKAMEVVNSGSEVWYSNGPGLLVIDCASLEICRRLEPYMAPSMVTSVVCSSEGRGEEVVWCLDDKANSLVMYHSTTYQLCARYFCGVPSPLRDMFPVRPLDTEPPAASHTANPKVPEGDSIADVSIMYSEELGTQILIHQESLTDYCSMSSYSSSPPRQAARSPSSLPSSPASSSSVPFSTDCEDSDMLHTPGAASDRSEHDLTPMDGETFSQHLQAVKILAVRDLIWVPRRGGDVIVIGLEKDSGAQRGRVIAVLKARELTPHGVLVDAAVVAKDTVVCTFENENTEWCLAVWRGWGAREFDIFYQSYEELGRLEACTRKRR

SEQ ID NO: 11031 - protein, 340 aa, Homo sapiens
MEAHEIIEEPHITMDAEKHPPSKDPSAEDLQENHISESFLKPSTSETPLEPHTSESPLVPSPSQIPLEAHSPETHQEPSISETPSETPTYEASLDSPISVVPEKHLTLPPQSRDYVCLSSSDTLKEDLSSESSSNEVPWTRRSTHLSESESLPEHCLSGPSSQVQVDTTEKQEEEAGEVEKGVDASDSTAHTAQPGHQLGNTARPVFPARQTELVEVAKAMHREEFGAQVNNLFQWEKDAALNAIQTDRIRNSSSGILAPAHLHCDCLYLALSTKPPWCKGALALQAISIKTEEAKPKATSRQALDPDRLWVSTLAGAAPITYGTVSGLGMSPDAFVDTC

SEQ ID NO: 11032 - protein, 432 aa, Homo sapiens
MAERTMAMPTQIPADGDTQKENNIRCLTTIGHFGFECLPNQLVSRSIRQGFTFNILCVGETGIGKSTLIDTLFNTNLKDNKSSHFYSNVGLQIQTYELQESNVQLKLTVVETVGYGDQIDKEASYQPIVDYIDAQFEAYLQEELKIKRSLFEYHDSRVHVCLYFISPTGHSLKSLDLLTMKNLDSKVNIIPLIAKADTISKNDLQTFKNKIMSELISNGIQIYQLPTDEETAAQANSSVSGLLPFAVVGSTDEVKVGKRMVRGRHYPWGVLQVENENHCDFVKLRDMLLCTNMENLKEKTHTQHYECYRYQKLQKMGFTDVGPNNQPVSFQEIFEAKRQEFYDQCQREEEELKQRFMQRVKEKEATFKEAEKELQDKFEHLKMIQQEEIRKLEEEKKQLEGEIIDFYKMKAASEALQTQLSTDTKKDKHRKK

SEQ ID NO: 11033 - protein, 373 aa, Homo sapiens
MSSGNYQQSEALSKPTFSEEQASALVESVFGLKVSKVRPLPSYDDQNFHVYVSKTKDGPTEYVLKISNTKASKNPDLIEVQNHIIMFLKAAGFPTASVCHTKGDNTASLVSVDSGSEIKSYLVRLLTYLPGRPIAELPVSPQLLYEIGKLAAKLDKTLQRFHHPKLSSLHRENFIWNLKNVPLLEKYLYALGQNRNREIVEHVIHLFKEEVMTKLSHFRECINHGDLNDHNILIESSKSASGNAEYQVSGILDFGDMSYGYYVFEVAITIMYMMIESKSPIQVGGHVLAGFESITPLTAVEKGALFLLVCSRFCQSLVMAAYSCQLYPENKDYLMVTAKTGWKHLQQMFDMGQKAVEEIWFETAKSYESGISM

SEQ ID NO: 11034 - protein, 872 aa, Homo sapiens
MGLKARRAAGAAGGGGDGGGGGGGAANPAGGDAAAAGDEERKVGLAPGDVEQVTLALGAGADKDGTLLLEGGGRDEGQRRTPQGIGLLAKTPLSRPVKRNNAKYRRIQTLIYDALERPRGWALLYHALVFLIVLGCLILAVLTTFKEYETVSGDWLLLLETFAIFIFGAEFALRIWAAGCCCRYKGWRGRLKFARKPLCMLDIFVLIASVPVVAVGNQGNVLATSLRSLRFLQILRMLRMDRRGGTWKLLGSAICAHSKELITAWYIGFLTLILSSFLVYLVEKDVPEVDAQGEEMKEEFETYADALWWGLITLATIGYGDKTPKTWEGRLIAATFSLIGVSFFALPAGILGSGLALKVQEQHRQKHFEKRRKPAAELIQAAWRYYATNPNRIDLVATWRFYESVVSFPFFRKEQLEAASSQKLGLLDRVRLSNPRGSNTKGKLFTPLNVDAIEESPSKEPKPVGLNNKERFRTAFRMKAYAFWQSSEDAGTGDPMAEDRGYGNDFPIEDMIPTLKAAIRAVRILQFRLYKKKFKETLRPYDVKDVIEQYSAGHLDMLSRIKYLQTRIDMIFTPGPPSTPKHKKSQKGSAFTFPSQQSPRNEPYVARPSTSEIEDQSMMGKFVKVERQVQDMGKKLDFLVDMHMQHMERLQVQVTEYYPTKGTSSPAEAEKKEDNRYSDLKTIICNYSETGPPEPPYSFHQVTIDKVSPYGFFAHDPVNLPRGGPSSGKVQATPPSSATTYVERPTVLPILTLLDSRVSCHSQADLQGPYSDRISPRQRRSITRDSDTPLSLMSVNHEELERSPSGFSISQDRDDYVFGPNGGSSWMREKRYLAEGETDTDTDPFTPSGSMPLSSTGDGISDSVWTPSNKPI

SEQ ID NO: 11035 - protein, 355 aa, Homo sapiens
MKKFSRMPKSEGGSGGGAAGGGAGGAGAGAGCGSGGSSVGVRVFAVGRHQVTLEESLAEGGFSTVFLVRTHGGIRCALKRMYVNNMPDLNVCKREITIMKELSGHKNIVGYLDCAVNSISDNVWEVLILMEYCRAGQVVNQMNKKLQTGFTEPEVLQIFCDTCEAVARLHQCKTPIIHRDLKVENILLNDGGNYVLCDFGSATNKFLNPQKDGVNVVEEEIKKYTTLSYRAPEMINLYGGKPITTKADIWALGCLLYKLCFFTLPFGESQVAICDGNFTIPDNSRYSRNIHCLIRFMLEPDPEHRPDIFQVSYFAFKFAKKDCPVSNINKCCKQLLRHGALLTEILLFLQLFLNR

SEQ ID NO: 11036 - protein, 657 aa, Homo sapiens
MFVGVARHSGSQDEVSRGVEPLEAARAQPAKDRRAKGTPKSSKPGKKHRYLRLLPEALIRFGGFRKRKKAKSSVSKKPGEVDDSLEQPCGLGCLVSTCCECCNNIRCFMIFYCILLICQGVVFGLIDVSIGDFQKEYQLKTIEKLALEKSYDISSGLVAIFIAFYGDRKKVIWFVASSFLIGLGSLLCAFPSINEENKQSKVGIEGIAECTSMIGYALGYVLGAPLVKVPENTTSATNTTVNNGSPEWLWTWWINFLFAAVVAWCTLIPLSCFPNNMPGSTRIKARKRKQLHFFDSRLKDLKLGTNIKDLCAALWILMKNPVLICLALSKATEYLVIIGASEFLPIYLENQFILTPTVATTLAGLVLIPGGALGQLLGGVIVSTLEMSCKALMRFIMVTSVISLILLVFIIFVRCNPVQFAGINEDYDGTGKLGNLTAPCNEKCRCSSSIYSSICGRDDIEYFSPCFAGCTYSKAQNQKKMYYNCSCIKEGLITADAEGDFIDARPGKCDAKCYKLPLFIAFIFSTLIFSGFSGVPIVLAMTRVVPDKLRSLALGVSYVILRIFGTIPGPSIFKMSGETSCILRDVNKCGHTGRCWIYNKTKMAFLLVGICFLCKLCTIIFTTIAFFIYKRRLNENTDFPDVTVKNPKVKKKEETDL

SEQ ID NO: 11037 - protein, 464 aa, Homo sapiens
MAMTAGTTTTFPMSNHTRERVTVAKLTLENFYSNLILQHEERETRQKKLEVAMEEEGLADEEKKLRRSQHARKETEFLRLKRTRLGLDDFESLKVIGRGAFGEVRLVQKKDTGHIYAMKILRKSDMLEKEQVAHIRAERDILVEADGAWVVKMFYSFQDKRNLYLIMEFLPGGDMMTLLMKKDTLTEEETQFYISETVLAIDAIHQLGFIHRDIKPDNLLLDAKGHVKLSDFGLCTGLKKAHRTEFYRNLTHNPPSDFSFQNMNSKRKAETWKKNRRQLAYSTVGTPDYIAPEVFMQTGYNKLCDWWSLGVIMYEMLIGYPPFCSETPQETYRKVMNWKETLVFPPEVPISEKAKDLILRFCIDSENRIGNSGVEEIKGHPFFEGVDWEHIRERPAAIPIEIKSIDDTSNFDDFPESDILQPVPNTTEPDYKSKDWVFLNYTYKRFEGLTQRGSIPTYMKAGKL

SEQ ID NO: 11038 - protein, 1548 aa, Homo sapiens
MLRARPEALMLLGALLTGSLGPSGSQDALSLPWEVQRYDGWFNNLRHHERGAVGCRLQRRVPANYADGVYQALEEPQLPNPRRLSNAATRGIAGLPSLHNRTVLGVFFGYHVLSDVVSVETPGCPAEFLNIRIPPGDPVFDPDQRGDVVLPFQRSRWDPETGRSPSNPRDLANQVTGWLDGSAIYGSSHSWSDALRSFSGGQLASGPDPAFPRDSQNPLLMWAAPDPATGQNGPRGLYAFGAERGNREPFLQALGLLWFRYHNLWAQRLARQHPDWEDEELFQHARKRVIATYQNIAVYEWLPSFLQKTLPEYTGYRPFLDPSISPEFVVASEQFFSTMVPPGVYMRNASCHFRKVLNKGFQSSQALRVCNNYWIRENPNLNSTQEVNELLLGMASQISELEDNIVVEDLRDYWPGPGKFSRTDYVASSIQRGRDMGLPSYSQALLAFGLDIPRNWSDLNPNVDPQVLEATAALYNQDLSQLELLLGGLLESHGDPGPLFSAIVLDQFVRLRDGDRYWFENTRNGLFSKKEIEDIRNTTLRDVLVAVINIDPSALQPNVFVWHKGAPCPQPKQLTTDGLPQCAPLTVLDFFEGSSPGFAITIIALCCLPLVSLLLSGVVAYFRGREHKKLQKKLKESVKKEAAKDGVPAMEWPGPKERSSPIIIQLLSDRCLQVLNRHLTVLRVVQLQPLQQVNLILSNNRGCRTLLLKIPKEYDLVLLFSSEEERGAFVQQLWDFCVRWALGLHVAEMSEKELFRKAVTKQQRERILEIFFRHLFAQVLDINQADAGTLPLDSSQKVREALTCELSRAEFAESLGLKPQDMFVESMFSLADKDGNGYLSFREFLDILVVFMKGSPEDKSRLMFTMYDLDENGFLSKDEFFTMMRSFIEISNNCLSKAQLAEVVESMFRESGFQDKEELTWEDFHFMLRDHDSELRFTQLCVKGGGGGGNGIRDIFKQNISCRVSFITRTPGERSHPQGLGPPAPEAPELGGPGLKKRFGKKAAVPTPRLYTEALQEKMQRGFLAQKLQQYKRFVENYRRHIVCVAIFSAICVGVFADRAYYYGFASPPSDIAQTTLVGIILSRGTAASVSFMFSYILLTMCRNLITFLRETFLNRYVPFDAAVDFHRWIAMAAVVLAILHSAGHAVNVYIFSVSPLSLLACIFPNVFVNDGSKLPQKFYWWFFQTVPGMTGVLLLLVLAIMYVFASHHFRRRSFRGFWLTHHLYILLYALLIIHGSYALIQLPTFHIYFLVPAIIYGGDKLVSLSRKKVEISVVKAELLPSGVTYLQFQRPQGFEYKSGQWVRIACLALGTTEYHPFTLTSAPHEDTLSLHIRAVGPWTTRLREIYSSPKGNGCAGYPKLYLDGPFGEGHQEWHKFEVSVLVGGGIGVTPFASILKDLVFKSSLGSQMLCKKIYFIWVTRTQRQFEWLADIIQEVEENDHQDLVSVHIYVTQLAEKFDLRTTMLYICERHFQKVLNRSLFTGLRSITHFGRPPFEPFFNSLQEVHPQVRKIGVFSCGPPGMTKNVEKACQLVNRQDRAHFMHHYENF

SEQ ID NO: 11039 - protein, 547 aa, Homo sapiens
MMEEEELEFVEELEAVLQLTPEVQLAIEQVFPSQDPLDRADFNAVEYINTLFPTEQSLANIDEVVNKIRLKIRRLDDNIRTVVRGQTNVGQDGRQALEEAQKAIQQLFGKIKDIKDKAEKSEQMVKEITRDIKQLDHAKRHLTTSITTLNHLHMLAGGVDSLEAMTRRRQYGEVANLLQGVMNVLEHFHKYMGIPQIRQLSERVKAAQTELGQQILADFEEAFPSQGTKVAWLDKIDRRYAWIKRQLVDYEEKYGRMFPREWCMAERIAVEFCHVTRAELAKIMRTRAKEIEVKLLLFAIQRTTNFEGFLAKRFSGCTLTDGTLKKLESPPPSTNPFLEDEPTPEMEELATEKGDLDQPKKPKAPDNPFHGIVSKCFEPHLYVYIESQDKNLGELIDRFVADFKAQGPPKPNTDEGGAVLPSCADLFVYYKKCMVQCSQLSTGEPMIALTTIFQKYLREYAWKILSGNLPKTTTSSGGLTISSLLKEKEGSEVAKFTLEELCLICNILSTAEYCLATTQQLEEKLKEKVDRHLQQYSAAGSGSGCCL

SEQ ID NO: 11040 - protein, 2040 aa, Homo sapiens
MSNRPNNNPGGSLRRSQRNTAGAQPQDDSIGGRSHLGQAKHKGYSPPESRKSNSKAPKVQSNTTSELSRGHLSKRSCSSSSAVIVPQPEDPDRANTSERQKTGQVPKKDNSRGVKRSASPDYNRTNSPSSAKKPKALQHTESPSETNKPHSKSKKRHLDQEQQLKSAQSPSTSKAHTRKSGATGGSRSQKRKRTESSCVKSGSGSESTGAEERSAKPTKLASKSATSAKAGCSTITDSSSAASTSSSSSAVASASSTVPPGARVKQGKDQNKARRSRSASSPSPRRSSREKEQSKTGGSSKFDWAARFSPKVSLPKTKLSLPGSSKSETSKPGPSGLQAKLASLRKSTKKRSESPPAELPSLRRSTRQKTTGSCASTSRRGSGLGKRGAAEARRQEKMADPESNQEAVNSSAARTDEAPQGAAASSSVAGAVGMTTSGESESDDSEMGRLQALLEARGLPPHLFGPLGPRMSQLFHRTIGSGASSKAQQLLQGLQASDESQQLQAVIEMCQLLVMGNEETLGGFPVKSVVPALITLLQMEHNFDIMNHACRALTYMMEALPRSSAVVVDAIPVFLEKLQVIQCIDVAEQALTALEMLSRRHSKAILQAGGLADCLLYLEFFSINAQRNALAIAANCCQSITPDEFHFVADSLPLLTQRLTHQDKKSVESTCLCFARLVDNFQHEENLLQQVASKDLLTNVQQLLVVTPPILSSGMFIMVVRMFSLMCSNCPTLAVQLMKQNIAETLHFLLCGASNGSCQEQIDLVPRSPQELYELTSLICELMPCLPKEGIFAVDTMLKKGNAQNTDGAIWQWRDDRGLWHPYNRIDSRIIEQINEDTGTARAIQRKPNPLANSNTSGYSESKKDDARAQLMKEDPELAKSFIKTLFGVLYEVYSSSAGPAVRHKCLRAILRIIYFADAELLKDVLKNHAVSSHIASMLSSQDLKIVVGALQMAEILMQKLPDIFSVYFRREGVMHQVKHLAESESLLTSPPKACTNGSGSMGSTTSVSSGTATAATHAAADLGSPSLQHSRDDSLDLSPQGRLSDVLKRKRLPKRGPRRPKYSPPRDDDKVDNQAKSPTTTQSPKSSFLASLNPKTWGRLSTQSNSNNIEPARTAGGSGLARAASKDTISNNREKIKGWIKEQAHKFVERYFSSENMDGSNPALNVLQRLCAATEQLNLQVDGGAECLVEIRSIVSESDVSSFEIQHSGFVKQLLLYLTSKSEKDAVSREIRLKRFLHVFFSSPLPGEEPIGRVEPVGNAPLLALVHKMNNCLSQMEQFPVKVHDFPSGNGTGGSFSLNRGSQALKFFNTHQLKCQLQRHPDCANVKQWKGGPVKIDPLALVQAIERYLVVRGYGRVREDDEDSDDDGSDEEIDESLAAQFLNSGNVRHRLQFYIGEHLLPYNMTVYQAVRQFSIQAEDERESTDDESNPLGRAGIWTKTHTIWYKPVREDEESNKDCVGGKRGRAQTAPTKTSPRNAKKHDELWHDGVCPSVSNPLEVYLIPTPPENITFEDPSLDVILLLRVLHAISRYWYYLYDNAMCKEIIPTSEFINSKLTAKANRQLQDPLVIMTGNIPTWLTELGKTCPFFFPFDTRQMLFYVTAFDRDRAMQRLLDTNPEINQSDSQDSRVAPRLDRKKRTVNREELLKQAESVMQDLGSSRAMLEIQYENEVGTGLGPTLEFYALVSQELQRADLGLWRGEEVTLSNPKGSQEGTKYIQNLQGLFALPFGRTAKPAHIAKVKMKFRFLGKLMAKAIMDFRLVDLPLGLPFYKWMLRQETSLTSHDLFDIDPVVARSVYHLEDIVRQKKRLEQDKSQTKESLQYALETLTMNGCSVEDLGLDFTLPGFPNIELKKGGKDIPVTIHNLEEYLRLVIFWALNEGVSRQFDSFRDGFESVFPLSHLQYFYPEELDQLLCGSKADTWDAKTLMECCRPDHGYTHDSRAVKFLFEILSSFDNEQQRLFLQFVTGSPRLPVGGFRSLNPPLTIVRKTFESTENPDDFLPSVMTCVNYLKLPDYSSIEIMREKLLIAAREGQQSFHLS

SEQ ID NO: 11041 - protein, 1722 aa, Homo sapiens
MSNRPNNNPGGSLRRSQRNTAGAQPQDDSIGGSRRGSGLGKRGAAEARRQEKMADPESNQEAVNSSAARTDEAPQGAAASSSVAGAVGMTTSGESESDDSEMGRLQALLEARGLPPHLFGPLGPRMSQLFHRTIGSGASSKAQQLLQGLQASDESQQLQAVIEMCQLLVMGNEETLGGFPVKSVVPALITLLQMEHNFDIMNHACRALTYMMEALPRSSAVVVDAIPVFLEKLQVIQCIDVAEQALTALEMLSRRHSKAILQAGGLADCLLYLEFFSINAQRNALAIAANCCQSITPDEFHFVADSLPLLTQRLTHQDKKSVESTCLCFARLVDNFQHEENLLQQVASKDLLTNVQQLLVVTPPILSSGMFIMVVRMFSLMCSNCPTLAVQLMKQNIAETLHFLLCGASNGSCQEQIDLVPRSPQELYELTSLICELMPCLPKEGIFAVDTMLKKGNAQNTDGAIWQWRDDRGLWHPYNRIDSRIIEAAHQVGEDEISLSTLGRVYTIDFNSMQQINEDTGTARAIQRKPNPLANSNTSGYSESKKDDARAQLMKEDPELAKSFIKTLFGVLYEVYSSSAGPAVRHKCLRAILRIIYFADAELLKDVLKNHAVSSHIASMLSSQDLKIVVGALQMAEILMQKLPDIFSVYFRREGVMHQVKHLAESESLLTSPPKACTNGSGSMGSTTSVSSGTATAATHAAADLGSPSLQHSRDDSLDLSPQGRLSDVLKRKRLPKRGPRRPKYSPPRDDDKVDNQAKSPTTTQSPKSSFLASLNPKTWGRLSTQSNSNNIEPARTAGGSGLARAASKDTISNNREKIKGWIKEQAHKFVERYFSSENMDGSNPALNVLQRLCAATEQLNLQVDGGAECLVEIRSIVSESDVSSFEIQHSGFVKQLLLYLTSKSEKDAVSREIRLKRFLHVFFSSPLPGEEPIGRVEPVGNAPLLALVHKMNNCLSQMEQFPVKVHDFPSGNGTGGSFSLNRGSQALKFFNTHQLKCQLQRHPDCANVKQWKGGPVKIDPLALVQAIERYLVVRGYGRVREDDEDSDDDGSDEEIDESLAAQFLNSGNVRHRLQFYIGEHLLPYNMTVYQAVRQFSIQAEDERESTDDESNPLGRAGIWTKTHTIWYKPVREDEESNKDCVGGKRGRAQTAPTKTSPRNAKKHDELWHDGVCPSVSNPLEVYLIPTPPENITFEDPSLDVILLLRVLHAISRYWYYLYDNAMCKEIIPTSEFINSKLTAKANRQLQDPLVIMTGNIPTWLTELGKTCPFFFPFDTRQMLFYVTAFDRDRAMQRLLDTNPEINQSDSQDSRVAPRLDRKKRTVNREELLKQAESVMQDLGSSRAMLEIQYENEVGTGLGPTLEFYALVSQELQRADLGLWRGEEVTLSNPKGSQEGTKYIQNLQGLFALPFGRTAKPAHIAKVKMKFRFLGKLMAKAIMDFRLVDLPLGLPFYKWMLRQETSLTSHDLFDIDPVVARSVYHLEDIVRQKKRLEQDKSQTKESLQYALETLTMNGCSVEDLGLDFTLPGFPNIELKKGGKDIPVTIHNLEEYLRLVIFWALNEGVSRQFDSFRDGFESVFPLSHLQYFYPEELDQLLCGSKADTWDAKTLMECCRPDHGYTHDSRAVKFLFEILSSFDNEQQRLFLQFVTGSPRLPVGGFRSLNPPLTIVRKTFESTENPDDFLPSVMTCVNYLKLPDYSSIEIMREKLLIAAREGQQSFHLS

SEQ ID NO: 11042 - protein, 1620 aa, Homo sapiens
MGAIGLLWLLPLLLSTAAVGSGMGTGQRAGSPAAGPPLQPREPLSYSRLQRKSLAVDFVVPSLFRVYARDLLLPPSSSELKAGRPEARGSLALDCAPLLRLLGPAPGVSWTAGSPAPAEARTLSRVLKGGSVRKLRRAKQLVLELGEEAILEGCVGPPGEAAVGLLQFNLSELFSWWIRQGEGRLRIRLMPEKKASEVGREGRLSAAIRASQPRLLFQIFGTGHSSLESPTNMPSPSPDYFTWNLTWIMKDSFPFLSHRSRYGLECSFDFPCELEYSPPLHDLRNQSWSWRRIPSEEASQMDLLDGPGAERSKEMPRGSFLLLNTSADSKHTILSPWMRSSSEHCTLAVSVHRHLQPSGRYIAQLLPHNEAAREILLMPTPGKHGWTVLQGRIGRPDNPFRVALEYISSGNRSLSAVDFFALKNCSEGTSPGSKMALQSSFTCWNGTVLQLGQACDFHQDCAQGEDESQMCRKLPVGFYCNFEDGFCGWTQGTLSPHTPQWQVRTLKDARFQDHQDHALLLSTTDVPASESATVTSATFPAPIKSSPCELRMSWLIRGVLRGNVSLVLVENKTGKEQGRMVWHVAAYEGLSLWQWMVLPLLDVSDRFWLQMVAWWGQGSRAIVAFDNISISLDCYLTISGEDKILQNTAPKSRNLFERNPNKELKPGENSPRQTPIFDPTVHWLFTTCGASGPHGPTQAQCNNAYQNSNLSVEVGSEGPLKGIQIWKVPATDTYSISGYGAAGGKGGKNTMMRSHGVSVLGIFNLEKDDMLYILVGQQGEDACPSTNQLIQKVCIGENNVIEEEIRVNRSVHEWAGGGGGGGGATYVFKMKDGVPVPLIIAAGGGGRAYGAKTDTFHPERLENNSSVLGLNGNSGAAGGGGGWNDNTSLLWAGKSLQEGATGGHSCPQAMKKWGWETRGGFGGGGGGCSSGGGGGGYIGGNAASNNDPEMDGEDGVSFISPLGILYTPALKVMEGHGEVNIKHYLNCSHCEVDECHMDPESHKVICFCDHGTVLAEDGVSCIVSPTPEPHLPLSLILSVVTSALVAALVLAFSGIMIVYRRKHQELQAMQMELQSPEYKLSKLRTSTIMTDYNPNYCFAGKTSSISDLKEVPRKNITLIRGLGHGAFGEVYEGQVSGMPNDPSPLQVAVKTLPEVCSEQDELDFLMEALIISKFNHQNIVRCIGVSLQSLPRFILLELMAGGDLKSFLRETRPRPSQPSSLAMLDLLHVARDIACGCQYLEENHFIHRDIAARNCLLTCPGPGRVAKIGDFGMARDIYRASYYRKGGCAMLPVKWMPPEAFMEGIFTSKTDTWSFGVLLWEIFSLGYMPYPSKSNQEVLEFVTSGGRMDPPKNCPGPVYRIMTQCWQHQPEDRPNFAIILERIEYCTQDPDVINTALPIEYGPLVEEEEKVPVRPKDPEGVPPLLVSQQAKREEERSPAAPPPLPTTSSGKAAKKPTAAEISVRVPRGPAVEGGHVNMAFSQSNPPSELHKVHGSRNKPTSLWNPTYGSWFTEKPTKKNNPIAKKEPHDRGNLGLEGSCTVPPNVATGRLPGASLLLEPSSLTANMKEVPLFRLRHFPCGNVNYGYQQQGLPLEAATAPGAGHYEDTILKSKNSMNQPGP

SEQ ID NO: 11043 - protein, 630 aa, Homo sapiens
MSTNNALRVFWKSREWNMKTSTFDSDEDILLLPKRKRFRKKKSRPVRHTKRHEEEQVYEQGTTLPCSICKHEIDLTGIFLHKKQHVALATLGFQWMGRKKPQPSVIAVQRQFMISKLLSSFMFTEKTLQSINNAFELLWKKQIPAYYKIFDNIDRSVIYSQKICHLLIKGVGICEDRNSTWKADMNDKFTVVSNFGNKPNVCFFGLFDGHHGASAAELTSMELPVLLLHQLSKFDPSYQMTTDEQQIINSFYTVFREEYAAIEDLFSAINKTEAVRCEYEDTHKAFAKAFWRMDRLLGLGRKEVSRVQWSGCSAVTCILEGKPKSPYAHKNWKRKNTHDGLAESSPSQEMPKIISGILHVANTGNVQAVLCRNGKGFCLTKEHTTRNTNERRRILQNGAVISSNEPYGLVEGQVKTTRGLGFHGNLKLKKSIIPAPQTISVPIDDLCQFLIVATNGLWEVLDKEEVTALAMTTFHMYKETYCPIIPNKSPSKGPLLFSTSEPNLTKSQSNIHVLFQYKSVSEVRVSTTNSKENLSDSNYSKYCIYNPENVETFPAETTHRKPCSEKVTDRPTSVNDVATNEKESDTKSFYEGAAEYVSHELVNAALLAGSRDNITVMVIFLNGSEYQLLT

SEQ ID NO: 11044 - protein, 1272 aa, Homo sapiens
MEPPGGSLGPGRGTRDKKKGRSPDELPSAGGDGGKSKKFTLKRLMADELERFTSMRIKKEKEKPNSAHRNSSASYGDDPTAQSLQDVSDEQVLVLFEQMLLDMNLNEEKQQPLREKDIIIKREMVSQYLYTSKAGMSQKESSKSAMMYIQELRSGLRDMPLLSCLESLRVSLNNNPVSWVQTFGAEGLASLLDILKRLHDEKEETAGSYDSRNKHEIIRCLKAFMNNKFGIKTMLETEEGILLLVRAMDPAVPNMMIDAAKLLSALCILPQPEDMNERVLEAMTERAEMDEVERFQPLLDGLKSGTTIALKVGCLQLINALITPAEELDFRVHIRSELMRLGLHQVLQDLREIENEDMRVQLNVFDEQGEEDSYDLKGRLDDIRMEMDDFNEVFQILLNTVKDSKAEPHFLSILQHLLLVRNDYEARPQYYKLIEECISQIVLHKNGADPDFKCRHLQIEIEGLIDQMIDKTKVEKSEAKAAELEKKLDSELTARHELQVEMKKMESDFEQKLQDLQGEKDALHSEKQQIATEKQDLEAEVSQLTGEVAKLTKELEDAKKEMASLSAAAITVPPSVPSRAPVPPAPPLPGDSGTIIPPPPAPGDSTTPPPPPPPPPPPPPLPGGVCISSPPSLPGGTAISPPPPLSGDATIPPPPPLPEGVGIPSPSSLPGGTAIPPPPPLPGSARIPPPPPPLPGSAGIPPPPPPLPGEAGMPPPPPPLPGGPGIPPPPPFPGGPGIPPPPPGMGMPPPPPFGFGVPAAPVLPFGLTPKKLYKPEVQLRRPNWSKLVAEDLSQDCFWTKVKEDRFENNELFAKLTLTFSAQTKTSKAKKDQEGGEEKKSVQKKKVKELKVLDSKTAQNLSIFLGSFRMPYQEIKNVILEVNEAVLTESMIQNLIKQMPEPEQLKMLSELKDEYDDLAESEQFGVVMGTVPRLRPRLNAILFKLQFSEQVENIKPEIVSVTAACEELRKSESFSNLLEITLLVGNYMNAGSRNAGAFGFNISFLCKLRDTKSTDQKMTLLHFLAELCENDYPDVLKFPDELAHVEKASRVSAENLQKNLDQMKKQISDVERDVQNFPAATDEKDKFVEKMTSFVKDAQEQYNKLRMMHSNMETLYKELGEYFLFDPKKLSVEEFFMDLHNFRNMFLQAVKENQKRRETEEKMRRAKLAKEKAEKERLEKQQKREQLIDMNAEGDETGVMDSLLEALQSGAAFRRKRGPRQANRKAGCAVTSLLASELTKDDAMAAVPAKVSKNSETFPTILEEAKELVGRAS

SEQ ID NO: 11045 - protein, 1263 aa, Homo sapiens [sequence omitted]

SEQ ID NO: 11046 - protein, 1274 aa, Homo sapiens
MSGSCAAPGPGSGSSPAACRFAHYFVLCGIDADSGLEPDELAGENFDQSPLRRTFKSKVLAHYPQNIEWNPFDQDAVNMLCMPKGLSFRTQTDNKDPQFHSFIITREDGSRTYGFVLTFYEEVTSKQICTAMQTLYQMHNAEHYSSVYASSSCSMDSLASSLDEGDTTSLLKLQRYNSYDISRDTLYVSKSICLITPLPFMQACKKFLIQLYKAVTSQQPPPLPLESYIHNILYEVPLPPPGRSLKFYGVYEPVICQRPGPSELPLSDYPLREAFELLGLENLVQVFTCVLLEMQILLYSQDYQRLMTVAEGITTLLFPFQWQHVYVPILPASLLHFLDAPVPYLMGLQSKEGTDRSKLELPQEANLCFVDIDNHFIELPEEFPQFPNKVDFIQELSEVLVQFGIPPEGSLHCSESTSKLKNMVLKDLVNDKKNGNVCTNNISMYELLKGNETIARLQALAKRTGVAVEKMDLSASLGEKDKDLKLHCEEAELRDYQLNVQLREVFANRFTQMFADYEAFVIQTAQDMESWLTNREQMQNFDKASFLSDQPEPYLPFLSRFIETQMFATFIDNKIMSQWEEKDPLLRVFDTRIDKIRLYNVRAPTLRTSIYQKCSTLKEAAQSIEQRLMKMDHTAIHPHLLDMKIGQGKYEQGFFPKLQSDVLATGPTSNNRWVSRSATAQRRKERLRQHSEHVGLDNDLREKYMQEARSLGKNLRQPKLSDLSPAVIAQTNCKFVEGLLKECRMKTKRMLVEKMGHEAVELGHGEANITGLEENTLIASLCDLLERIWSHGLQVKQGKSALWSHLIQFQDREEKQEHLAESPVALGPERRKSDSGVMLPTLRVSLIQDMRHIQNMSEIKTDVGRARAWIRLSLEKKLLSQHLKQLLSNQPLTKKLYKRYAFLRCEEEREQFLYHLLSLNAVDYFCFTSVFTTIMIPYRSVIIPIKKLSNAIITSNPWICVSGELGDTGVMQIPKNLLEMTFECQNLGKLTTVQIGHDNSGLLAKWLVDCVMVRNEITGHTYRFPCGRWLGKGIDDGSLERILIGELMTSASDEDLVKQCRTPPQQKSPTTARRLSITSLTGKNNKPNAGQIQEGIGEAVNNIVKHFHKPEKERGSLTVLLCGENGLVAALEQVFHHGFKSARIFHKNVFIWDFIEKVVAYFETTDQILDNEDDVLIQKSSCKTFCHYVNAINTAPRNIGKDGKFQILVCLGTRDRLLPQWIPLLAECPAITRMYEESALLRDRMTVNSLIRILQTIQDFTIVLEGSLIKGVDV

SEQ ID NO: 11047 - protein, 592 aa, Homo sapiens
MKRSKELITKNHSQEETSILRCWKCRKCIASSGCFMEYLENQVIKDKDDSVDAQNICHVWHMNVEALPEWISCLIQKAQWTVGKLNCPFCGARLGGFNFVSTPKCSCGQLAAVHLSKSRTDYQPTQAGRLMRPSVKYLSHPRVQSGCDKEALLTGGGSENRNHRLLNMARNNNDPGRLTEALCLEVRPTYFEMKNEKLLSKASEPKYQLFVPQLVTGRCATRAFHRKSHSLDLNISEKLTLLPTLYEIHSKTTAYSRLNETQPIDLSGLPLQSSKNSYSFQNPSSFDPSMLLQRFSVAPHETQTQRGGEFQCGLEAASVYSDHTNTNNLTFLMDLPSAGRSMPEASDQEEHLSPLDFLHSANFSLGSINQRLNKRERSKLKNLRRKQRRRERWLQKQGKYSGVGLLDHMTLNNEMSTDEDNEYAEEKDSYICAVCLDVYFNPYMCYPCHHIFCEPCLRTLAKDNPSSTPCPLCRTIISRVFFQTELNNATKTFFTKEYLKIKQSFQKSNSAKWPLPSCRKAFHLFGGFRRHAAPVTRRQFPHGAHRMDYLHFEDDSRGWWFDMDMVIIYIYSVNWVIGFIVFCFLCYFFFPF

SEQ ID NO: 11048 - protein, 404 aa, Homo sapiens
MFSFEGDFKTRPKVSLGGASRKYSIQRSAFDRCATLSQSGGAFPIANGPNLTLLVRQLLFFYKQNEDSKRLIWLYQNLIKHSSLFVKQLDGSERLTCLFQIKRLMSLCCRLLQNCNDDSLNVALPMRMLEVFSSENTYLPVLQDASYVVSVIEQILHYMIHNGYYRSLYLLINSKLPSSIEYSDLSRVPIAKILLENVLKPLHFTYNSCPEGARQQVFTAFTEEFLAAPFTDQIFHFIIPALADAQTVFPYEPFLNALLLIESRCSRKSGGAPWLFYFVLTVGENYLGALSEEGLLVYLRVLQTFLSQLPVSPASASCHDSASDSEEESEEADKPSSPEDGRLSVSYITEECLKKLDTKQQTNTLLNLVWRDSASEEVFTTMASVCHTLMVQHRMMVPKVRVYK

SEQ ID NO: 11049 - protein, 975 aa, Homo sapiens
MSGIGNKRAAGEPGTSMPPEKKAAVEDSGTTVETIKLGGVSSTEELDIRTLQTKNRKLAEMLDQRQAIEDELREHIEKLERRQATDDASLLIVNRYWSQFDENIRIILKRYDLEQGLGDLLTERKALVVPEPEPDSDSNQERKDDRERGEGQEPAFSFLATLASSSSEEMESQLQERVESSRRAVSQIVTVYDKLQEKVELLSRKLNSGDNLIVEEAVQELNSFLAQENMRLQELTDLLQEKHRTMSQEFSKLQSKVETAESRVSVLESMIDDLQWDIDKIRKREQRLNRHLAEVLERVNSKGYKVYGAGSSLYGGTITINARKFEEMNAELEENKELAQNRLCELEKLRQDFEEVTTQNEKLKVELRSAVEQVVKETPEYRCMQSQFSVLYNESLQLKAHLDEARTLLHGTRGTHQHQVELIERDEVSLHKKLRTEVIQLEDTLAQVRKEYEMLRIEFEQTLAANEQAGPINREMRHLISSLQNHNHQLKGEVLRYKRKLREAQSDLNKTRLRSGSALLQSQSSTEDPKDEPAELKPDSEDLSSQSSASKASQEDANEIKSKRDEEERERERREKEREREREREKEKEREREKQKLKESEKERDSAKDKEKGKHDDGRKKEAEIIKQLKIELKKAQESQKEMKLLLDMYRSAPKEQRDKVQLMAAEKKSKAELEDLRQRLKDLEDKEKKENKKMADEDALRKIRAVEEQIEYLQKKLAMAKQEEEALLSEMDVTGQAFEDMQEQNIRLMQQLREKDDANFKLMSERIKSNQIHKLLKEEKEELADQVLTLKTQVDAQLQVVRKLEEKEHLLQSNIGTGEKELGLRTQALEMNKRKAMEAAQLADDLKAQLELAQKKLHDFQDEIVENSVTKEKDMFNFKRAQEDISRLRRKLETTKKPDNVPKCDEILMEEIKDYKARLTCPCCNMRKKDAVLTKCFHVFCFECVKTRYDTRQRKCPKCNAAFGANDFHRIYIG

SEQ ID NO: 11050 - protein, 871 aa, Homo sapiens
MEHGTLLAQPGLWTRDTSWALLYFLCYILPQTAPQVLRIGGIFETVENEPVNVEELAFKFAVTSINRNRTLMPNTTLTYDIQRINLFDSFEASRRACDQLALGVAALFGPSHSSSVSAVQSICNALEVPHIQTRWKHPSVDNKDLFYINLYPDYAAISRAILDLVLYYNWKTVTVVYEDSTGLIRLQELIKAPSRYNIKIKIRQLPSGNKDAKPLLKEMKKGKEFYVIFDCSHETAAEILKQILFMGMMTEYYHYFFTTLDLFALDLELYRYSGVNMTGFRLLNIDNPHVSSIIEKWSMERLQAPPRPETGLLDGMMTTEAALMYDAVYMVAIASHRASQLTVSSLQCHRHKPWRLGPRFMNLIKEARWDGLTGHITFNKTNGLRKDFDLDIISLKEEGTEKAAGEVSKHLYKVWKKIGIWNSNSGLNMTDSNKDKSSNITDSLANRTLIVTTILEEPYVMYRKSDKPLYGNDRFEGYCLDLLKELSNILGFIYDVKLVPDGKYGAQNDKGEWNGMVKELIDHRADLAVAPLTITYVREKVIDFSKPFMTLGISILYRKPNGTNPGVFSFLNPLSPDIWMYVLLACLGVSCVLFVIARFTPYEWYNPHPCNPDSDVVENNFTLLNSFWFGVGALMQQGSELMPKALSTRIVGGIWWFFTLIIISSYTANLAAFLTVERMESPIDSADDLAKQTKIEYGAVRDGSTMTFFKKSKISTYEKMWAFMSSRQQTALVRNSDEGIQRVLTTDYALLMESTSIEYVTQRNCNLTQIGGLIDSKGYGVGTPIGSPYRDKITIAILQLQEEGKLHMMKEKWWRGNGCPEEDNKEASALGVENIGGIFIVLAAGLVLSVFVAIGEFIYKSRKNNDIEQHY

SEQ ID NO: 11051 - protein, 905 aa, Homo sapiens
MEHGTLLAQPGLWTRDTSWALLYFLCYILPQTAPQVLRIGGIFETVENEPVNVEELAFKFAVTSINRNRTLMPNTTLTYDIQRINLFDSFEASRRACDQLALGVAALFGPSHSSSVSAVQSICNALEVPHIQTRWKHPSVDNKDLFYINLYPDYAAISRAILDLVLYYNWKTVTVVYEDSTGLIRLQELIKAPSRYNIKIKIRQLPSGNKDAKPLLKEMKKGKEFYVIFDCSHETAAEILKQILFMGMMTEYYHYFFTTLDLFALDLELYRYSGVNMTGFRLLNIDNPHVSSIIEKWSMERLQAPPRPETGLLDGMMTTEAALMYDAVYMVAIASHRASQLTVSSLQCHRHKPWRLGPRFMNLIKEARWDGLTGHITFNKTNGLRKDFDLDIISLKEEGTEKIGIWNSNSGLNMTDSNKDKSSNITDSLANRTLIVTTILEEPYVMYRKSDKPLYGNDRFEGYCLDLLKELSNILGFIYDVKLVPDGKYGAQNDKGEWNGMVKELIDHRADLAVAPLTITYVREKVIDFSKPFMTLGISILYRKPNGTNPGVFSFLNPLSPDIWMYVLLACLGVSCVLFVIARFTPYEWYNPHPCNPDSDVVENNFTLLNSFWFGVGALMQQGSELMPKALSTRIVGGIWWFFTLIIISSYTANLAAFLTVERMESPIDSADDLAKQTKIEYGAVRDGSTMTFFKKSKISTYEKMWAFMSSRQQTALVRNSDEGIQRVLTTDYALLMESTSIEYVTQRNCNLTQIGGLIDSKGYGVGTPIGSPYRDKITIAILQLQEEGKLHMMKEKWWRGNGCPEEDNKEASALGVENIGGIFIVLAAGLVLSVFVAIGEFIYKSRKNNDIEQCLSFNAIMEELGISLKNQKKIKKKSRTKGKSSFTSILTCHQRRTQRKETVA

SEQ ID NO: 11052 - protein, 774 aa, Homo sapiens
MERPLCSHLCSCLAMLALLSPLSLAQYDSWPHYPEYFQQPAPEYHQPQAPANVAKIQLRLAGQKRKHSEGRVEVYYDGQWGTVCDDDFSIHAAHVVCRELGYVEAKSWTASSSYGKGEGPIWLDNLHCTGNEATLAACTSNGWGVTDCKHTEDVGVVCSDKRIPGFKFDNSLINQIENLNIQVEDIRIRAILSTYRKRTPVMEGYVEVKEGKTWKQICDKHWTAKNSRVVCGMFGFPGERTYNTKVYKMFASRRKQRYWPFSMDCTGTEAHISSCKLGPQVSLDPMKNVTCENGLPAVVSCVPGQVFSPDGPSRFRKAYKPEQPLVRLRGGAYIGEGRVEVLKNGEWGTVCDDKWDLVSASVVCRELGFGSAKEAVTGSRLGQGIGPIHLNEIQCTGNEKSIIDCKFNAESQGCNHEEDAGVRCNTPAMGLQKKLRLNGGRNPYEGRVEVLVERNGSLVWGMVCGQNWGIVEAMVVCRQLGLGFASNAFQETWYWHGDVNSNKVVMSGVKCSGTELSLAHCRHDGEDVACPQGGVQYGAGVACSETAPDLVLNAEMVQQTTYLEDRPMFMLQCAMEENCLSASAAQTDPTTGYRRLLRFSSQIHNNGQSDFRPKNGRHAWIWHDCHRHYHSMEVFTHYDLLNLNGTKVAEGHKASFCLEDTECEGDIQKNYECANFGDQGITMGCWDMYRHDIDCQWVDITDVPPGDYLFQVVINPNFEVAESDYSNNIMKCRSRYDGHRIWMYNCHIGGSFSEETEKKFEHFSGLLNNQLSPQ

SEQ ID NO: 11053 - protein, 597 aa, Homo sapiens
MAAETLLSSLLGLLLLGLLLPASLTGGVGSLNLEELSEMRYGIEILPLPVMGGQSQSSDVVIVSSKYKQRYECRLPAGAIHFQREREEETPAYQGPGIPELLSPMRDAPCLLKTKDWWTYEFCYGRHIQQYHMEDSEIKGEVLYLGYYQSAFDWDDETAKASKQHRLKRYHSQTYGNGSKCDLNGRPREAEVRFLCDEGAGISGDYIDRVDEPLSCSYVLTIRTPRLCPHPLLRPPPSAAPQAILCHPSLQPEEYMAYVQRQADSKQYGDKIIEELQDLGPQVWSETKSGVAPQKMAGASPTKDDSKDSDFWKMLNEPEDQAPGGEEVPAEEQDPSPEAADSASGAPNDFQNNVQVKVIRSPADLIRFIEELKGGTKKGKPNIGQEQPVDDAAEVPQREPEKERGDPERQREMEEEEDEDEDEDEDEDERQLLGEFEKELEGILLPSDRDRLRSETEKELDPDGLKKESERDRAMLALTSTLNKLIKRLEEKQSPELVKKHKKKRVVPKKPPPSPQPTGKIEIKIVRPWAEGTEEGARWLTDEDTRNLKEIFFNILVPGAEEAQKERQRQKELESNYRRVWGSPGGEGTGDLDEFDF

SEQ ID NO: 11054 - protein, 652 aa, Homo sapiens
MAAETLLSSLLGLLLLGLLLPASLTGGVGSLNLEELSEMRYGIEILPLPVMGGQSQSSDVVIVSSKYKQRYECRLPAGAIHFQREREEETPAYQGPGIPELLSPMRDAPCLLKTKDWWTYEFCYGRHIQQYHMEDSEIKGEVLYLGYYQSAFDWDDETAKASKQHRLKRYHSQTYGNGSKCDLNGRPREAEVRFLCDEGAGISGDYIDRVDEPLSCSYVLTIRTPRLCPHPLLRPPPSAAPQAILCHPSLQPEEYMAYVQRQADSKQYGDKIIEELQDLGPQVWSETKSGVAPQKMAGASPTKDDSKDSDFWKMLNEPEDQAPGGEEVPAEEQDPSPEAADSASGAPNDFQNNVQVKVIRSPADLIRFIEELKGGTKKGKPNIGQEQPVDDAAEVPQREPEKERGDPERQREMEEEEDEDEDEDEDEDERQLLGEFEKELEGILLPSDRDRLRSETEKELDPDGLKKESERDRAMLALTSTLNKLIKRLEEKQSPELVKKHKKKRVVPKKPPPSPQPTEEDPEHRVRVRVTKLRLGGPNQDLTVLEMKRENPQLKQIEGLVKELLEREGLTAAGKIEIKIVRPWAEGTEEGARWLTDEDTRNLKEIFFNILVPGAEEAQKERQRQKELESNYRRVWGSPGGEGTGDLDEFDF

SEQ ID NO: 11055 - protein, 1087 aa, Homo sapiens
MSLKPQQQQQQQQQQQQQQQQQQQQQQQPPPAAANVRKPGGSGLLASPAAAPSPSSSSVSSSSATAPSSVVAATSGGGRPGLGRGRNSNKGLPQSTISFDGIYANMRMVHILTSVVGSKCEVQVKNGGIYEGVFKTYSPKCDLVLDAAHEKSTESSSGPKREEIMESILFKCSDFVVVQFKDMDSSYAKRDAFTDSAISAKVNGEHKEKDLEPWDAGELTANEELEALENDVSNGWDPNDMFRYNEENYGVVSTYDSSLSSYTVPLERDNSEEFLKREARANQLAEEIESSAQYKARVALENDDRSEEEKYTAVQRNSSEREGHSINTRENKYIPPGQRNREVISWGSGRQNSPRMGQPGSGSMPSRSTSHTSDFNPNSGSDQRVVNGGVPWPSPCPSPSSRPPSRYQSGPNSLPPRAATPTRPPSRPPSRPSRPPSHPSAHGSPAPVSTMPKRMSSEGPPRMSPKAQRHPRNHRVSAGRGSISSGLEFVSHNPPSEAATPPVARTSPSGGTWSSVVSGAKDSRLQDQRQNSPAGNKENIKPNETSPSFSKAENKGISPVVSEHRKQIDDLKKFKNDFRLQPSSTSESMDQLLNKNREGEKSRDLIKDKIEPSAKDSFIENSSSNCTSGSSKPNSPSISPSILSNTEHKRGPEVTSQGVQTSSPACKQEKDDKEEKKDAAEQVRKSTLNPNAKEFNPRSFSQPKPSTTPTSPRPQAQPSPSMVGHQQPTPVYTQPVCFAPNMMYPVPVSPGVQPLYPIPMTPMPVNQAKTYRAVPNMPQQRQDQHHQSAMMHPASAAGPPIAATPPAYSTQYVAYSPQQFPNQPLVQHVPHYQSQHPHVYSPVIQGNARMMAPPTHAQPGLVSSSATQYGAHEQTHAMYACPKLPYNKETSPSFYFAISTGSLAQQYAHPNATLHPHTPHPQPSATPTGQQQSQHGGSHPAPSPVQHHQHQAAQALHLASPQQQSAIYHAGLAPTPPSMTPASNTQSPQNSFPAAQQTVFTIHPSHVQPAYTNPPHMAHVPQAHVQSGMVPSHPTAHAPMMLMTTQPPGGPQAALAQSALQPIPVSTTAHFPYMTHPSVQAHHQQQL

SEQ ID NO: 11056 - protein, 424 aa, Homo sapiens
PSISPSILSNTEHKRGPEVTSQGVQTSSPACKQEKDDKEEKKDAAEQVRKSTLNPNAKEFNPRSFSQPKPSTTPTSPRPQAQPSPSMVGHQQPTPVYTQPVCFAPNMMYPVPVSPGVQPLYPIPMTPMPVNQAKTYRAGKVPNMPQQRQDQHHQSAMMHPASAAGPPIAATPPAYSTQYVAYSPQQFPNQPLVQHVPHYQSQHPHVYSPVIQGNARMMAPPTHAQPGLVSSSATQYGAHEQTHAMYACPKLPYNKETSPSFYFAISTGSLAQQYAHPNATLHPHTPHPQPSATPTGQQQSQHGGSHPAPSPVQHHQHQAAQALHLASPQQQSAIYHAGLAPTPPSMTPASNTQSPQNSFPAAQQTVFTIHPSHVQPAYTNPPHMAHVPQYKPTTNSSCKAALEEPKGQIPSSLLLLLPTGSTEN

SEQ ID NO: 11057 - protein, 670 aa, Homo sapiens
MAFPVDMLENCSHEELENSAEDYMSDLRCGDPENPECFSLLNITIPISLSNVGFVPLYGGDQTQKILALFAPEDSLTAVALYLADQWWAIDDIVKTSVPSREGLKQVSTLGERVVLYVLNRIIYRKQEMERNEIPFLCHSSTDYAKILWKKGEAIGFYSVKPTGSICASFLTQSYQLPVLDTMFLRKKYRGKDFGLHMLEDFVDSFTEDALGLRYPLSSLMYTACKQYFEKYPGDHELLWEVEGVGHWYQRIPVTRALQREALKILALSQNEPKRPMSGEYGPASVPEYEARTEDNQSSEMQLTIDSLKDAFASTSEGHDKTSVSTHTRSGNLKRPKIGKRFQDSEFSSSQGEDEKTSQTSLTASINKLESTARPSESSEEFLEEEPEQRGIEFEDESSDRDARPALETQPQQEKQDGEKESELEPMNGEIMDDSLKTSLITEEEDSTSEVLDEELKLQPFNSSEDSTNLVPLVVESSKPPEVDAPDKTPRIPDSEMLMDEGTSDEKGHMEEKLSLLPRKKAHLGSSDNVATMSNEERSDGGFPNSVIAEFSEEPVSENLSPNTTSSLEDQGEEGVSEPQETSTALPQSSLIEVELEDVPFSQNAGQKNQSEEQSEASSEQLDQFTQSAEKAVDSSSEEIEVEVPVVDRRNLRRKAKGHKGPAKKKAKLT

SEQ ID NO: 11058 - protein, 4427 aa, Homo sapiens
MSSKAEKKQRLSGRGSSQASWSGRATRAAVATQEQGNAPAVSEPELQAELPKEEPEPRLEGPQAQSEESVEPEADVKPLFLSRAALTGLADAVWTQEHDAILEHFAQDPTESILTIFIDPCFGLKLELGMPVQTQNQLVYFIRQAPVPITWENFEATVQFGTVRGPYIPALLRLLGGVFAPQIFANTGWPESIRNHFASHLHKFLACLTDTRYKLEGHTVLYIPAEAMNMKPEMVIKDKELVQRLETSMIHWTRQIKEMLSAQETVETGENLGPLEEIEFWRNRCMDLSGISKQLVKKGVKHVESILHLAKSSYLAPFMKLAQQIQDGSRQAQSNLTFLSILKEPYQELAFMKPKDISSKLPKLISLIRIIWVNSPHYNTRERLTSLFRKVCDCQYHFARWEDGKQGPLPCFFGAQGPQITRNLLEIEDIFHKNLHTLRAVRGGILDVKNTCWHEDYNKFRAGIKDLEVMTQNLITSAFELVRDVPHGVLLLDTFHRLASREAIKRTYDKKAVDLYMLFNSELALVNRERNKKWPDLEPYVAQYSGKARWVHILRRRIDRVMTCLAGAHFLPRIGTGKESVHTYQQMVQAIDELVRKTFQEWTSSLDKDCIRRLDTPLLRISQEKAGMLDVNFDKSLLILFAEIDYWERLLFETPHYVVNVAERAEDLRILRENLLLVARDYNRIIAMLSPDEQALFKERIRLLDKKIHPGLKKLHWALKGASAFFITECRIHASKVQMIVNEFKASTLTIGWRAQEMSEKLLVRISGKRVYRDLEFEEDQREHRAAVQQKLMNLHQDVVTIMTNSYEVFKNDGPEIQQQWMLYMIRLDRMMEDALRLNVKWSLLELSKAINGDGKTSPNPLFQVLVILKNDLQGSVAQVEFSPTLQTLAGVVNDIGNHLFSTISVFCHLPDILTKRKLHREPIQTVVEQDEDIKKIQTQISSGMTNNASLLQNYLKTWDMYREIWEINKDSFIHRYQRLNPPVSSFVADIARYTEVANNVQKEETVTNIQFVLLDCSHLKFSLVQHCNEWQNKFATLLREMAAGRLLELHTYLKENAEKISRPPQTLEELGVSLQLVDALKHDLANVETQIPPIHEQFAILEKYEVPVEDSVLEMLDSLNGEWVVFQQTLLDSKQMLKKHKEKFKTGLIHSADDFKKKAHTLLEDFEFKGHFTSNVGYMSALDQITQVRAMLMAMREEENSLRANLGIFKIEQPPSKDLQNLEKELDALQQIWEIARDWEENWNEWKTGRFLILQTETMETTAHGLFRRLTKLAKEYKDRNWEIIETTRSKIEQFKRTMPLISDLRNPALRERHWDQVRDEIQREFDQESESFTLEQIVELGMDQHVEKIGEISASATKELAIEVALQNIAKTWDVTQLDIVPYKDKGHHRLRGTEEVFQALEDNQVALSTMKASRFVKAFEKDVDHWERCLSLILEVIEMILTVQRQWMYLENIFLGEDIRKQLPNESTLFDQVNSNWKAIMDRMNKDNNALRSTHHPGLLDTLIEMNTILEDIQKSLDMYLETKRHIFPRFYFLSNDDLLEILGQSRNPEAVQPHLKKCFDNIKLLRIQKVGGPSSKWEAVGMFSGDGEYIDFLHSVFLEGPVESWLGDVEQTMRVTLRDLLRNCHLALRKFLNKRDKWVKEWAGQVVITASQIQWTADVTKCLLTAKERADKKILKVMKKNQVSILNKYSEAIRGNLTKIMRLKIVALVTIEIHARDVLEKLYKSGLMDVNSFDWLSQLRFYWEKDLDDCVIRQTNTQFQYNYEYLGNSGRLVITPLTDRCYMTLTTALHLHRGGSPKGPAGTGKTETVKDLGKALGIYVIVVNCSEGLDYKSMGRMYSGLAQTGAWGCFDEFNRINIEVLSVVAHQILCILSALAAGLTHFHFDGFEINLVWSCGIFITMNPGYAGRTELPENLKSMFRPIAMVVPDSTLIAEIILFGEGFGNCKILAKKVYTLYSLAVQQLSRQDHYDFGLRALTSLLRYAGKKRRLQPDLTDEEVLLLSMRDMNIAKLTSVDAPLFNAIVQDLFPNIELPVIDYGKLRETVEQEIRDMGLQSTPFTLTKVFQLYETKNSRHSTMIVGCTGSGKTASWRILQASLSSLCRAGDPNFNIVREFPLNPKALSLGELYGEYDLSTNEWTDGILSSVMRTACADEKPDEKWILFDGPVDTLWIENMNSVMDDNKVLTLINGERIAMPEQVSLLFEVEDLAMASPATVSRCGMVYTDYADLGWKPYVQSWLEKRPKAEVEPLQRMFEKLINKMLAFKKDNCKELVPLPEYSGITSLCKLYSALATPENGVNPADGENYVTMVEMTFVFSMIWSVCASVDEEGRKRIDSYLREIEGSFPNKDTVYEYFVDPKIRSWTSFEDKLPKSWRYPPNAPFYKIMVPTVDTVRYNYLVSSLVANQNPILLVGPVGTGKTSIAQSVLQSLPSSQWSVLVVNMSAQTTSNNVQSIIESRVEKRTKGVYVPFGGKSMITFMDDLNMPAKDMFGSQPPLELIRLWIDYGFWYDRTKQTIKYIREMFLMAAMGPPGGGRTVISPRLRSRFNIINMTFPTKSQIIRIFGTMINQKLQDFEEEVKPIGNVVTEATLDMYNTVVQRFLPTPTKMHYLFNLRDISKVFQGMLRANKDFHDTKSSITRLWIHECFRVFSDRLVDAADTEAFMGIISDKLGSFFDLTFHHLCPSKRPPIFGDFLKEPKVYEDLTDLTVLKTVMETALNEYNLSPSVVPMQLVLFREAIEHITRIVRVIGQPRGNMLLVGIGGSGRQSLARLASSICDYTTFQIEVTKHYRKQEFRDDIKRLYRQAGVELKTTSFIFVDTQIADESFLEDINNILSSGEVPNLYKPDEFEEIQSHIIDQARVEQVPESSDSLFAYLIERVQNNLHIVLCLSPMGDPFRNWIRQYPALVNCTTINWFSEWPQEALLEVAEKCLIGVDLGTQENIHRKVAQIFVTMHWSVAQYSQKMLLELRRHNYVTPTKYLELLSGYKKLLGEKRQELLAQANKLRTGLFKIDETREKVQVMSLELEDAKKKVAEFQKQCEEYLVIIVQQKREADEQQKAVTANSEKIAVEEIKCQALADNAQKDLEEALPALEEAMRALESLNKKDIGEIKSYGRPPAQVEIVMQAVMILRGNEPTWAEAKRQLGEQNFIKSLINFDKDNISDKVLKKIGAYCAQPDFQPDIIGRVSLAAKSLCMWVRAMELYGRLYRVVEPKRIRMNAALAQLREKQAALAEAQEKLREVAEKLEMLKKQYDEKLAQKEELRKKSEEMELKLERAGMLVSGLAGEKARWEETVQGLEEDLGYLVGDCLLAAAFLSYMGPFLTNYRDEIVNQIWIGKIWELQVPCSPSFAIDNFLCNPTKVRDWNIQGLPSDAFSTENGIIVTRGNRWALMIDPQAQALKWIKNMEGGQGLKIIDLQMSDYLRILEHAIHFGYPVLLQNVQEYLDPTLNPMLNKSVARIGGRLLMRIGDKEVEYNTNFRFYITTKLSNPHYSPETSAKTTIVNFAVKEQGLEAQLLGIVVRKERPELEEQKDSLVINIAAGKRKLKELEDEILRLLNEATGSLLDDVQLVNTLHTSKITATEVTEQLETSETTEINTDLAREAYRPCAQRASILFFVLNDMGCIDPMYQFSLDAYISLFILSIDKSHRSNKLEDRIDYLNDYHTYAVYRYTCRTLFERHKLLFSFHMCAKILETSGKLNMDEYNFFLRGGVVLDREGQMDNPCSSWLADAYWDNITELDKLTNFHGLMNSFEQYPRDWHLWYTNAAPEKAMLPGEWENACNEMQRMLIVRSLRQDRVAFCVTSFIITNLGSRFIEPPVLNMKSVLEDSTPRSPLVFILSPGVDPTSALLQLAEHMGMAQRFHALSLGQGQAPIAARLLREGVTQGHWVFLANCHLSLSWMPNLDKLVEQLQVEDPHPSFRLWLSSIPHPDFPISILQVSIKMTTEPPKGLKANMTRLYQLMSEPQFSRCSKPAKYKKLLFSLCFFHSVLLERKKFLQLGWNIIYGFNDSDFEVSENLLSLYLDEYEETPWDALKYLIAGINYGGHVTDDWDRRLLTTYINDYFCDQSLSTPFHRLSALETYFIPKDGSLASYKEYISLLPGMDPPEAFGQHPNADVASQITEAQTLFDTLLSLQPQITPTRAGGQTREEKVLELAADVKQKIPEMIDYEGTQKLLALDPSPLNVVLLQEIQRYNTLMQTILFSLTDLEKGIQGLIVMSTSLEEIFNCIFDAHVPPLWGKAYPSQKPLAAWTRDLAMRVEQFELWASRARPPVIFWLSGFTFPTGFLTAVLQSSARQNNVSVDSLSWEFIVSTVDDSNLVYPPKDGVWVRGLYLEGAGWDRKNSCLVEAEPMQLVCLMPTIHFRPAESRKKSAKGMYSCPCYYYPNRAGSSDRASFVIGIDLRSGAMTPDHWIKRGTALLMSLDS

SEQ ID NO: 11059 - protein, 767 aa, Homo sapiens
MGGKNKQRTKGNLRPSNSGRAAELLAKEQGTVPGFIGFGTSQSDLGYVPAIQGAEEIDSLVDSDFRMVLRKLSKKDVTTKLKAMQEFGTMCTERDTETVKGVLPYWPRIFCKISLDHDRRVREATQQAFEKLILKVKKQLAPYLKSLMGYWLMAQCDTYTPAAFAAKDAFEAAFPPSKQPEAIAFCKDEITSVLQDHLIKETPDTLSDPQTVPEEEREAKFYRVVTCSLLALKRLLCLLPDNELDSLEEKFKSLLSQNKFWKYGKHSVPQIRSAYFELVSALCQRIPQLMKEEASKVSPSVLLSIDDSDPIVCPALWEAVLYTLTTIEDCWLHVNAKKSVFPKLSTVIREGGRGLATVIYPYLLPFISKLPQSITNPKLDFFKNFLTSLVAGLSTERTKTSSLESSAVISAFFECLRFIMQQNLGEEEIEQMLVNDQLIPFIDAVLKDPGLQHGQLFNHLAETLSSWEAKADTEKDEKTAHNLENVLIHFWERLSEICVAKISEPEADVESVLGVSNLLQVLQKPKSSLKSSKKKNGKVRFADEILESNKENEKCVSSEGEKIEGWELTTEPSLTHNSSGLLSPLRKKPLEDLVCKLADISINYVNERKSEQHLRFLSTLLDSFSSSRVFKMLLGDEKQSIVQAKPLEIAKLVQKNPAVQFLYQKLIGWLNEDQRKDFGFLVDILYSALRCCDNDMERKKVLDDLTKVDLKWNSLLKIIEKECTCREVQILTSVWKKILFLSSDWKFLASVCCLRFHDSLASSSPYS

SEQ ID NO: 11060 - protein, 713 aa, Homo sapiens
MARARGSPCPPLPPGRMSWPHGALLFLWLFSPPLGAGGGGVAVTSAAGGGSPPATSCPVACSCSNQASRVICTRRDLAEVPASIPVNTRYLNLQENGIQVIRTDTFKHLRHLEILQLSKNLVRKIEVGAFNGLPSLNTLELFDNRLTTVPTQAFEYLSKLRELWLRNNPIESIPSYAFNRVPSLRRLDLGELKRLEYISEAAFEGLVNLRYLNLGMCNLKDIPNLTALVRLEELELSGNRLDLIRPGSFQGLTSLRKLWLMHAQVATIERNAFDDLKSLEELNLSHNNLMSLPHDLFTPLHRLERVHLNHNPWHCNCDVLWLSWWLKETVPSNTTCCARCHAPAGLKGRYIGELDQSHFTCYAPVIVEPPTDLNVTEGMAAELKCRTGTSMTSVNWLTPNGTLMTHGSYRVRISVLHDGTLNFTNVTVQDTGQYTCMVTNSAGNTTASATLNVSAVDPVAAGGTGSGGGGPGGSGGVGGGSGGYTYFTTVTVETLETQPGEEALQPRGTEKEPPGPTTDGVWGGGRPGDAAGPASSSTTAPAPRSSRPTEKAFTVPITDVTENALKDLDDVMKTTKIIIGCFVAITFMAAVMLVAFYKLRKQHQLHKHHGPTRTVEIINVEDELPAASAVSVAAAAAVASGGGVGGDSHLALPALERDHLNHHHYVAAAFKAHYSSNPSGGGCGGKGPPGLNSIHEPLLFKSGSKENVQETQI

SEQ ID NO: 11061 - protein, 1161 aa, Homo sapiens
MTFGTVLLLSVLASYHGFNLDVEEPTIFQEDAGGFGQSVVQFGGSRLVVGAPLEVVAANQTGRLYDCAAATGMCQPIPLHIRPEAVNMSLGLTLAASTNGSRLLACGPTLHRVCGENSYSKGSCLLLGSRWEIIQTVPDATPECPHQEMDIVFLIDGSGSIDQNDFNQMKGFVQAVMGQFEGTDTLFALMQYSNLLKIHFTFTQFRTSPSQQSLVDPIVQLKGLTFTATGILTVVTQLFHHKNGARKSAKKILIVITDGQKYKDPLEYSDVIPQAEKAGIIRYAIGVGHAFQGPTARQELNTISSAPPQDHVFKVDNFAALGSIQKQLQEKIYAVEGTQSRASSSFQHEMSQEGFSTALTMDGLFLGAVGSFSWSGGAFLYPPNMSPTFINMSQENVDMRDSYLGYSTELALWKGVQNLVLGAPRYQHTGKAVIFTQVSRQWRKKAEVTGTQIGSYFGASLCSVDVDSDGSTDLILIGAPHYYEQTRGGQVSVCPLPRGRVQWQCDAVLRGEQGHPWGRFGAALTVLGDVNEDKLIDVAIGAPGEQENRGAVYLFHGASESGISPSHSQRIASSQLSPRLQYFGQALSGGQDLTQDGLMDLAVGARGQVLLLRSLPVLKVGVAMRFSPVEVAKAVYRCWEEKPSALEAGDATVCLTIQKSSLDQLGDIQSSVRFDLALDPGRLTSRAIFNETKNPTLTRRKTLGLGIHCETLKLLLPDCVEDVVSPIILHLNFSLVREPIPSPQNLRPVLAVGSQDLFTASLPFEKNCGQDGLCEGDLGVTLSFSGLQTLTVGSSLELNVIVTVWNAGEDSYGTVVSLYYPAGLSHRRVSGAQKQPHQSALRLACETVPTEDEGLRSSRCSVNHPIFHEGSNGTFIVTFDVSYKATLGDRMLMRASASSENNKASSSKATFQLELPVKYAVYTMISRQEESTKYFNFATSDEKKMKEAEHRYRVNNLSQRDLAISINFWVPVLLNGVAVWDVVMEAPSQSLPCVSERKPPQHSDFLTQISRSPMLDCSIADCLQFRCDVPSFSVQEELDFTLKGNLSFGWVRETLQKKVLVVSVAEITFDTSVYSQLPGQEAFMRAQMEMVLEEDEVYNAIPIIMGSSVGALLLLALITATLYKLGFFKRHYKEMLEDKPEDTATFSGDDFSCVAPNVPLS

SEQ ID NO: 11062 - protein, 923 aa, Homo sapiens
MKVGWPGESCWQVGLAVEDSPALGAPRVGALPDVVPEGTLLNMVLRRMHRPRSCSYQLLLEHQRPSCIQGLRWTPLTNSEESLDFSESLEQASTERVLRAGRQLHRHLLATCPNLIRDRKYHLRLYRQCCSGRELVDGILALGLGVHSRSQVVGICQVLLDEGALCHVKHDWAFQDRDAQFYRFPGPEPEPVRTHEMEEELAEAVALLSQRGPDALLTVALRKPPGQRTDEELDLIFEELLHIKAVAHLSNSVKRELAAVLLFEPHSKAGTVLFSQGDKGTSWYIIWKGSVNVVTHGKGLVTTLHEGDDFGQLALVNDAPRAATIILREDNCHFLRVDKQDFNRIIKDVEAKTMRLEEHGKVVLVLERASQGAGPSRPPTPGRNRYTVMSGTPEKILELLLEAMGPDSSAHDPTETFLSDFLLTHRVFMPSAQLCAALLHHFHVEPAGGSEQERSTYVCNKRQQILRLVSQWVALYGSMLHTDPVATSFLQKLSDLVGRDTRLSNLLREQWPERRRCHRLENGCGNASPQMKARNLPVWLPNQDEPLPGSSCAIQVGDKVPYDICRPDHSVLTLQLPVTASVREVMAALAQEDGWTKGQVLVKVNSAGDAIGLQPDARGVATSLGLNERLFVVNPQEVHELIPHPDQLGPTVGSAEGLDLVSAKDLAGQLTDHDWSLFNSIHQVELIHYVLGPQHLRDVTTANLERFMRRFNELQYWVATELCLCPVPGPRAQLLRKFIKLAAHLKEQKNLNSFFAVMFGLSNSAISRLAHTWERLPHKVRKLYSALERLLDPSWNHRVYRLALAKLSPPVIPFMPLLLKDMTFIHEGNHTLVENLINFEKMRMMARAARMLHHCRSHNPVPLSPLRSRVSHLHEDSQVARISTCSEQSLSTRSPASTWAYVQQLKVIDNQRELSRLSRELEP

SEQ ID NO: 11063 - protein, 835 aa, Homo sapiens
MAELSEEALLSVLPTIRVPKAGDRVHKDECAFSFDTPESEGGLYICMNTFLGFGKQYVERHFNKTGQRVYLHLRRTRRPKEEDPATGTGDPPRKKPTRLAIGVEGGFDLSEEKFELDEDVKIVILPDYLEIARDGLGGLPDIVRDRVTSAVEALLSADSASRKQEVQAWDGEVRQVSKHAFSLKQLDNPARIPPCGWKCSKCDMRENLWLNLTDGSILCGRRYFDGSGGNNHAVEHYRETGYPLAVKLGTITPDGADVYSYDEDDMVLDPSLAEHLSHFGIDMLKMQKTDKTMTELEIDMNQRIGEWELIQESGVPLKPLFGPGYTGIRNLGNSCYLNSVVQVLFSIPDFQRKYVDKLEKIFQNAPTDPTQDFSTQVAKLGHGLLSGEYSKPVPESGDGERVPEQKEVQDGIAPRMFKALIGKGHPEFSTNRQQDAQEFFLHLINMVERNCRSSENPNEVFRFLVEEKIKCLATEKVKYTQRVDYIMQLPVPMDAALNKEELLEYEEKKRQAEEEKMALPELVRAQVPFSSCLEAYGAPEQVDDFWSTALQAKSVAVKTTRFASFPDYLVIQIKKFTFGLDWVPKKLDVSIEMPEELDISQLRGTGLQPGEEELPDIAPPLVTPDEPKAPMLDESVIIQLVEMGFPMDACRKAVYYTGNSGAEAAMNWVMSHMDDPDFANPLILPGSSGPGSTSAAADPPPEDCVTTIVSMGFSRDQALKALRATNNSLERAVDWIFSHIDDLDAEAAMDISEGRSAADSISESVPVGPKVRDGPGKYQLFAFISHMGTSTMCGHYVCHIKKEGRWVIYNDQKVCASEKPPKDLGYIYFYQRVAS

SEQ ID NO: 11064 - protein, 4869 aa, Homo sapiens
MAEGGEGGEDEIQFLRTEDEVVLQCIATIHKEQRKFCLAAEGLGNRLCFLEPTSEAKYIPPDLCVCNFVLEQSLSVRALQEMLANTGENGGEGAAQGGGHRTLLYGHAVLLRHSFSGMYLTCLTTSRSQTDKLAFDVGLREHATGEACWWTIHPASKQRSEGEKVRIGDDLILVSVSSERYLHLSVSNGNIQVDASFMQTLWNVHPTCSGSSIEEGYLLGGHVVRLFHGHDECLTIPSTDQNDSQHRRIFYEAGGAGTRARSLWRVEPLRISWSGSNIRWGQAFRLRHLTTGHYLALTEDQGLILQDRAKSDTKSTAFSFRASKELKEKLDSSHKRDIEGMGVPEIKYGDSVCFVQHIASGLWVTYKAQDAKTSRLGPLKRKVILHQEGHMDDGLTLQRCQREESQAARIIRNTTALFSQFVSGNNRTAAPITLPIEEVLQTLQDLIAYFQPPEEEMRHEDKQNKLRSLKNRQNLFKEEGMLALVLNCIDRLNVYNSVAHFAGIAREESGMAWKEILNLLYKLLAALIRGNRNNCAQFSNNLDWLISKLDRLESSSGILEVLHCILTESPEALNLIAEGHIKSIISLLDKHGRNHKVLDILCSLCLCNGVAVRANQNLICDNLLPRRNLLLQTRLINDVTSIRPNIFLGVAEGSAQYKKWYFELIIDQVDPFLTAEPTHLRVGWASSSGYAPYPGGGEGWGGNGVGDDLYSYGFDGLHLWSGRIPRAVASINQHLLRSDDVVSCCLDLGVPSISFRINGQPVQGMFENFNTDGLFFPVMSFSAGVKVRFLMGGRHGEFKFLPPSGYAPCYEALLPKEKMRLEPVKEYKRDADGIRDLLGTTQFLSQASFIPCPVDTSQVILPPHLEKIRDRLAENIHELWGMNKIELGWTFGKIRDDNKRQHPCLVEFSKLPETEKNYNLQMSTETLKTLLALGCHIAHVNPAAEEDLKKVKLPKNYMMSNGYKPAPLDLSDVKLLPPQEILVDKLAENAHNVWAKDRIKQGWTYGIQQDLKNKRNPRLVPYALLDERTKKSNRDSLREAVRTFVGYGYNIEPSDQELADSAVEKVSIDKIRFFRVERSYAVRSGKWYFEFEVVTGGDMRVGWARPGCRPDVELGADDQAFVFEGNRGQRWHQGSGYFGRTWQPGDVVGCMINLDDASMIFTLNGELLITNKGSELAFADYEIENGFVPICCLGLSQIGRMNLGTDASTFKFYTMCGLQEGFEPFAVNMNRDVAMWFSKRLPTFVNVPKDHPHIEVMRIDGTMDSPPCLKVTHKTFGTQNSNADMIYCRLSMPVECHSSFSHSPCLDSEAFQKRKQMQEILSHTTTQCYYAIRIFAGQDPSCVWVGWVTPDYHLYSEKFDLNKNCTVTVTLGDERGRVHESVKRSNCYMVWGGDIVASSQRSNRSNVDLEIGCLVDLAMGMLSFSANGKELGTCYQVEPNTKVFPAVFLQPTSTSLFQFELGKLKNAMPLSAAIFRSEEKNPVPQCPPRLDVQTIQPVLWSRMPNSFLKVETERVSERHGWVVQCLEPLQMMALHIPEENRCVDILELCEQEDLMRFHYHTLRLYSAVCALGNSRVAYALCSHVDLSQLFYAIDNKYLPGLLRSGFYDLLISIHLASAKERKLMMKNEYIIPITSTTRNIRLFPDESKRHGLPGVGLRTCLKPGFRFSTPCFVVTGEDHQKQSPEIPLESLRTKALSMLTEAVQCSGAHIRDPVGGSVEFQFVPVLKLIGTLLVMGVFDDDDVRQILLLIDPSVFGEHSAGTEEGAEKEEVTQVEEKAVEAGEKAGKEAPVKGLLQTRLPESVKLQMCELLSYLCDCELQHRVEAIVAFGDIYVSKLQANQKFRYNELMQALNMSAALTARKTKEFRSPPQEQINMLLNFQLGENCPCPEEIREELYDFHEDLLLHCGVPLEEEEEEEEDTSWTGKLCALVYKIKGPPKPEKEQPTEEEERCPTTLKELISQTMICWAQEDQIQDSELVRMMFNLLRRQYDSIGELLQALRKTYTISHTSVSDTINLLAALGQIRSLLSVRMGKEEELLMINGLGDIMNNKVFYQHPNLMRVLGMHETVMEVMVNVLGTEKSQIAFPKMVASCCRFLCYFCRISRQNQKAMFEHLSYLLENSSVGLASPSMRGSTPLDVAASSVMDNNELALSLEEPDLEKVVTYLAGCGLQSCPMLLAKGYPDVGWNPIEGERYLSFLRFAVFVNSESVEENASVVVKLLIRRPECFGPALRGEGGNGLLAAMQGAIKISENPALDLPSQGYKREVTGDDEEEEEIVHMGNAIMSFYSALIDLLGRCAPEMHLIQTGKGEAIRIRSILRSLVPTEDLVGIISIPLKLPSLNKDGSVSEPDMAANFCPDHKAPMVLFLDRVYGIKDQTFLLHLLEVGFLPDLRASASLDTVSLSTTEAALALNRYICSAVLPLLTRCAPLFAGTEHCTSLIDSTLQTIYRLSKGRSLTKAQRDTIEECLLAICNHLRPSMLQQLLRRLVFDVPQLNEYCKMPLKLLTNHYEQCWKYYCLPSGWGSYGLAVEEELHLTEKLFWGIFDSLSHKKYDPDLFRMALPCLSAIAGALPPDYLDTRITATLEKQISVDADGNFDPKPINTMNFSLPEKLEYIVTKYAEHSHDKWACDKSQSGWKYGISLDENVKTHPLIRPFKTLTEKEKEIYRWPARESLKTMLAVGWTVERTKEGEALVQQRENEKLRSVSQANQGNSYSPAPLDLSNVVLSRELQGMVEVVAENYHNIWAKKKKLELESKGGGSHPLLVPYDTLTAKEKFKDREKAQDLFKFLQVNGIIVSRGMKDMELDASSMEKRFAYKFLKKILKYVDSAQEFIAHLEAIVSSGKTEKSPRDQEIKFFAKVLLPLVDQYFTSHCLYFLSSPLKPLSSSGYASHKEKEMVAGLFCKLAALVRHRISLFGSDSTTMVSCLHILAQTLDTRTVMKSGSELVKAGLRAFFENAAEDLEKTSENLKLGKFTHSRTQIKGVSQNINYTTVALLPILTSIFEHVTQHQFGMDLLLGDVQISCYHILCSLYSLGTGKNIYVERQRPALGECLASLAAAIPVAFLEPTLNRYNPLSVFNTKTPRERSILGMPDTVEDMCPDIPQLEGLMKEINDLAESGARYTEMPHVIEVILPMLCNYLSYWWERGPENLPPSTGPCCTKVTSEHLSLILGNILKIINNNLGIDEASWMKRIAVYAQPIISKARPDLLRSHFIPTLEKLKKKAVKTVQEEEQLKADGKGDTQEAELLILDEFAVLCRDLYAFYPMLIRYVDNNRSNWLKSPDADSDQLFRMVAEVFILWCKSHNFKREEQNFVIQNEINNLAFLTGDSKSKMSKAMQVKSGGQDQERKKTKRRGDLYSIQTSLIVAALKKMLPIGLNMCTPGDQELISLAKSRYSHRDTDEEVREHLRNNLHLQEKSDDPAVKWQLNLYKDVLKSEEPFNPEKTVERVQRISAAVFHLEQVEQPLRSKKAVWHKLLSKQRKRAVVACFRMAPLYNLPRHRSINLFLHGYQRFWIETEEYSFEEKLVQDLAKSPKVEEEEEEETEKQPDPLHQIILYFSRNALTERSKLEDDPLYTSYSSMMAKSCQSGEDEEEDEDKEKTFEEKEMEKQKTLYQQARLHERGAAEMVLQMISASKGEMSPMVVETLKLGIAILNGGNAGVQQKMLDYLKEKKDAGFFQSLSGLMQSCSVLDLNAFERQNKAEGLGMVTEEGTLIVRERGEKVLQNDEFTRDLFRFLQLLCEGHNSDFQNFLRTQMGNTTTVNVIISTVDYLLRLQESISDFYWYYSGKDIIDESGQHNFSKALAVTKQIFNSLTEYIQGPCIGNQQSLAHSRLWDAVVGFLHVFANMQMKLSQDSSQIELLKELLDLLQDMVVMLLSLLEGNVVNGTIGKQMVDTLVESSTNVEMILKFFDMFLKLKDLTSSDTFKEYDPDGKGIISKKEFQKAMEGQKQYTQSEIDFLLSCAEADENDMFNYVDFVDRFHEPAKDIGFNVAVLLTNLSEHMPNDSRLKCLLDPAESVLNYFEPYLGRIEIMGGAKKIERVYFEISESSRTQWEKPQVKESKRQFIFDVVNEGGEQEKMELFVNFCEDTIFEMQLASQISESDSADRPEEEEEDEDSSYVLEIAGEEEEDGSLEPASAFAMACASVKRNVTDFLKRATLKNLRKQYRNVKKMTAKELVKVLFSFFWMLFVGLFQLLFTILGGIFQILWSTVFGGGLVEGAKNIRVTKILGDMPDPTQFGIHDDTMEAERAEVMEPGITTELVHFIKGEKGDTDIMSDLFGLHPKKEGSLKHGPEVGLGDLSEIIGKDEPPTLESTVQKKRKAQAAEMKAANEAEGKVESEKADMEDGEKEDKDKEEEQAEYLWTEVTKKKKRRCGQKVEKPEAFTANFFKGLEIYQTKLLHYLARNFYNLRFLALFVAFAINFILLFYKVTEEPLEEETEDVANLWNSFNDEEEEEAMVFFVLQESTGYMAPTLRALAIIHTIISLVCVVGYYCLKVPLVVFKREKEIARKLEFDGLYITEQPSEDDIKGQWDRLVINTPSFPNNYWDKFVKRKVINKYGDLYGAERIAELLGLDKNALDFSPVEETKAEAASLVSWLSSIDMKYHIWKLGVVFTDNSFLYLAWYTTMSVLGHYNNFFFAAHLLDIAMGFKTLRTILSSVTHNGKQLVLTVGLLAVVVYLYTVVAFNFFRKFYNKSEDDDEPDMKCDDMMTCYLFHMYVGVRAGGGIGDEIEDPAGDPYEMYRIVFDITFFFFVIVILLAIIQGLIIDAFGELRDQQEQVREDMETKCFICGIGNDYFDTTPHGFETHTLQEHNLANYLFFLMYLINKDETEHTGQESYVWKMYQERCWDFFPAGDCFRKQYEDQLG

SEQ ID NO: 11065 - protein, 870 aa, Homo sapiens
MGNRGMEELIPLVNKLQDAFSSIGQSCHLDLPQIAVVGGQSAGKSSVLENFVGRDFLPRGSGIVTRRPLILQLIFSKTEHAEFLHCKSKKFTDFDEVRQEIEAETDRVTGTNKGISPVPINLRVYSPHVLNLTLIDLPGITKVPVGDQPPDIEYQIKDMILQFISRESSLILAVTPANMDLANSDALKLAKEVDPQGLRTIGVITKLDLMDEGTDARDVLENKLLPLRRGYIGVVNRSQKDIEGKKDIRAALAAERKFFLSHPAYRHMADRMGTPHLQKTLNQQLTNHIRESLPALRSKLQSQLLSLEKEVEEYKNFRPDDPTRKTKALLQMVQQFGVDFEKRIEGSGDQVDTLELSGGARINRIFHERFPFELVKMEFDEKDLRREISYAIKNIHGVRTGLFTPDMAFEAIVKKQIVKLKEPSLKCVDLVVSELATVIKKCAEKLSSYPRLREETERIVTTYIREREGRTKDQILLLIDIEQSYINTNHEDFIGFANAQQRSTQLNKKRAIPNQGEILVIRRGWLTINNISLMKGGSKEYWFVLTAESLSWYKDEEEKEKKYMLPLDNLKIRDVEKGFMSNKHVFAIFNTEQRNVYKDLRQIELACDSQEDVDSWKASFLRAGVYPEKDQAENEDGAQENTFSMDPQLERQVETIRNLVDSYVAIINKSIRDLMPKTIMHLMINNTKAFIHHELLAYLYSSADQSSLMEESADQAQRRDDMLRMYHALKEALNIIGDISTSTVSTPVPPPVDDTWLQSASSHSPTPQRRPVSSIHPPGRPPAVRGPTPGPPLIPVPVGAAASFSAPPIPSRPGPQSVFANSDLFPAPPQIPSRPVRIPPGIPPGVPSRRPPAAPSRPTIIRPAEPSLLD

SEQ ID NO: 11066 - protein, 623 aa, Homo sapiens
MNMEIGHPHEGKDDLGDKRVIMGTKFPMELGIRVGLGKEDSRCGESPVVSNKCEGRMAPPETKFPLSKGLEMGLERQNISRTVMQRGSLGVDSVSASQGTKPSLLPGRMGLENESLLAGYTHERIIQPPLGRVCGSSQAAGSRRAPLASGPEGVEELVGKPAFVMEPRQEMEKESTCVLMKPNTEIKLPVEVDIGLTQAEGPDETKNTEPQMGLVIEPPQCQFAQQHEQRKEAGNIESGVEPPDRIRPIYSGKFFDRTPCWPSAGKVIPVGYRVATCLTEKLPRLITPPEAKKYFNFRYPPAGVERVFYGRANDPQIAPYLTHGIRSKISVLANTLINPQPITTFQQKIKDKKESIYLSNRRAPLGKSHDQAPGLPKGMDTTNTTFGTAVIKEYSAKDVVNPPKSYEEVFKEGNEGHDLYVVSHNDYYAGEAKNRKYNPSSFHRCSVYGVPTPHFNDGRAMAKSLYWLHELQMKRGAKFVSKRADDFKEKFQHKLGRVLDPIAETMNVPPDCTFGACLRPEEYGVGDLIHNRLPDEYLRGKDRQRALIAAVRHHLKKVNYQKFDTLLAAFRHYDKASNGGELFGNAWAYRSQQFGVDQGSANYSLWAKSSPLFVCVSKVLLEH

SEQ ID NO: 11067 - protein, 739 aa, Homo sapiens
MPSPRPVLLRGARAALLLLLPPRLLARPSLLLRRSLSAASCPPISLPAAASRSSMDGAGAEEVLAPLRLAVRQQGDLVRKLKEDKAPQVDVDKAVAELKARKRVLEAKELALQPKDDIVDRAKMEDTLKRRFFYDQAFAIYGGVSGLYDFGPVGCALKNNIIQTWRQHFIQEEQILEIDCTMLTPEPVLKTSGHVDKFADFMVKDVKNGECFRADHLLKAHLQKLMSDKKCSVEKKSEMESVLAQLDNYGQQELADLFVNYNVKSPITGNDLSPPVSFNLMFKTFIGPGGNMPGYLRPETAQGIFLNFKRLLEFNQGKLPFAAAQIGNSFRNEISPRSGLIRVREFTMAEIEHFVDPSEKDHPKFQNVADLHLYLYSAKAQVSGQSARKMRLGDAVEQGVINNTVLGYFIGRIYLYLTKVGISPDKLRFRQHMENEMAHYACDCWDAESKTSYGWIEIVGCADRSCYDLSCHARATKVPLVAEKPLKEPKTVNVVQFEPSKGAIGKAYKKDAKLVMEYLAICDECYITEMEMLLNEKGEFTIETEGKTFQLTKDMINVKRFQKTLYVEEVVPNVIEPSFGLGRIMYTVFEHTFHVREGDEQRTFFSFPAVVAPFKCSVLPLSQNQEFMPFVKELSEALTRHGVSHKVDDSSGSIGRRYARTDEIGVAFGVTIDFDTVNKTPHTATLRDRDSMRQIRAEISELPSIVQDLANGNITWADVEARYPLFEGQETGKKETIEE

SEQ ID NO: 11068 - protein, 672 aa, Homo sapiens
MEIARIVARCLWEESRLLQTAATAAQQGGQANHPTAAVVTEKQQMLEQHLQDVRKRVQDLEQKMKVVENLQDDFDFNYKTLKSQGDMQDLNGNNQSVTRQKMQQLEQMLTALDQMRRSIVSELAGLLSAMEYVQKTLTDEELADWKRRQQIACIGGPPNICLDRLENWITSLAESQLQTRQQIKKLEELQQKVSYKGDPIVQHRPMLEERIVELFRNLMKSAFVVERQPCMPMHPDRPLVIKTGVQFTTKVRLLVKFPELNYQLKIKVCIDKDSGDVAALRGSRKFNILGTNTKVMNMEESNNGSLSAEFKHLTLREQRCGNGGRANCDASLIVTEELHLITFETEVYHQGLKIDLETHSLPVVVISNICQMPNAWASILWYNMLTNNPKNVNFFTKPPIGTWDQVAEVLSWQFSSTTKRGLSIEQLTTLAEKLLGPGVNYSGCQITWAKFCKENMAGKGFSFWVWLDNIIDLVKKYILALWNEGYIMGFISKERERAILSTKPPGTFLLRFSESSKEGGVTFTWVEKDISGKTQIQSVEPYTKQQLNNMSFAEIIMGYKIMDATNILVSPLVYLYPDIPKEEAFGKYCRPESQEHPEADPGSAAPYLKTKFICVTPTTCSNTIDLPMSPRTLDSLMQFGNNGEGAEPSAGGQFESLTFDMELTSECATSPM

SEQ ID NO: 11069 - protein, 832 aa, Homo sapiens
MDLGSPSLPKKSLPVPGALEQVASRLSSKVAAEVPHGSKQELQDLKAQSLTTCEVCGACFETRKGLSSHARSHLRQLGVAESESSGAPIDLLYELVKQKGLPDAHLGLPPGLAKKSSSLKEVVAGAPRPGLLSLAKPLDAPAVNKAIKSPPGFSAKGLGHPPSSPLLKKTPLALAGSPTPKNPEDKSPQLSLSPRPASPKAQWPQSEDEGPLNLTSGPEPARDIRCEFCGEFFENRKGLSSHARSHLRQMGVTEWYVNGSPIDTLREILKRRTQSRPGGPPNPPGPSPKALAKMMGGAGPGSSLEARSPSDLHISPLAKKLPPPPGSPLGHSPTASPPPTARKMFPGLAAPSLPKKLKPEQIRVEIKREMLPGALHGELHPSEGPWGAPREDMTPLNLSSRAEPVRDIRCEFCGEFFENRKGLSSHARSHLRQMGVTEWSVNGSPIDTLREILKKKSKPCLIKKEPPAGDLAPALAEDGPPTVAPGPVQSPLPLSPLAGRPGKPGAGPAQVPRELSLTPITGAKPSATGYLGSVAAKRPLQEDRLLPAEVKAKTYIQTELPFKAKTLHEKTSHSSTEACCELCGLYFENRKALASHARAHLRQFGVTEWCVNGSPIETLSEWIKHRPQKVGAYRSYIQGGRPFTKKFRSAGHGRDSDKRPSLGLAPGGLAVVGRSAGGEPGPEAGRAADGGERPLAASPPGTVKAEEHQRQNINKFERRQARPPDASAARGGEDTNDLQQKLEEVRQPPPRVRPVPSLVPRPPQTSLVKFVGNIYTLKCRFCEVEFQGPLSIQEEWVRHLQRHILEMNFSKADPPPEESQAPQAQTAAAEAP

SEQ ID NO: 11070 - protein, 1150 aa, Homo sapiens
MAPPLRPLARLRPPGMLLRALLLLLLLSPLPGVWCFSELSFVKEPQDVTVTRKDPVVLDCQAHGEVPIKVTWLKNGAKMSENKRIEVLSNGSLYISEVEGRRGEQSDEGFYQCLAMNKYGAILSQKAHLALSTISAFEVQPISTEVHEGGVARFACKISSHPPAVITWEFNRTTLPMTMDRITALPTGVLQIYDVSQRDSGNYRCIAATVAHRRKSMEASLTVIPAKESKSFHTPTIIAGPQNITTSLHQTVVLECMATGNPKPIISWSRLDHKSIDVFNTRVLGNGNLMISDVRLQHAGVYVCRATTPGTRNFTVAMATLTVLAPPSFVEWPESLTRPRAGTARFVCQAEGIPSPKMSWLKNGRKIHSNGRIKMYNSKLVINQIIPEDDAIYQCMAENSQGSILSRARLTVVMSEDRPSAPYNVHAETMSSSAILLAWERPLYNSDKVIAYSVHYMKAEGLNNEEYQVVIGNDTTHYIIDDLEPASNYTFYIVAYMPMGASQMSDHVTQNTLEDVPLRPPEISLTSRSPTDILISWLPIPAKYRRGQVVLYRLSFRLSTENSIQVLELPGTTHEYLLEGLKPDSVYLVRITAATRVGLGESSVWTSHRTPKATSVKAPKSPELHLEPLNCTTISVRWQQDVEDTAAIQGYKLYYKEEGQQENGPIFLDTKDLLYTLSGLDPRRKYHVRLLAYNNIDDGYQADQTVSTPGCVSVRDRMVPPPPPPHHLYAKANTSSSIFLHWRRPAFTAAQIINYTIRCNPVGLQNASLVLYLQTSETHMLVQGLEPNTKYEFAVRLHVDQLSSPWSPVVYHSTLPEAPAGPPVGVKVTLIEDDTALVSWKPPDGPETVVTRYTILYASRKAWIAGEWQVLHREGAITMALLENLVAGNVYIVKISASNEVGEGPFSNSVELAVLPKETSESNQRPKRLDSADAKVYSGYYHLDQKSMTGIAVGVGIALTCILICVLILIYRSKARKSSASKTAQNGTQQLPRTSASLASGNEVGKNLEGAVGNEESLMPMIMPNSFIDAKGGTDLIINSYGPIIKNNSKKKWFFFQDSKKIQVEQPQRRFTPAVCFYQPGTTVLISDEDSPSSPGQTTSFSRPFGVAADTEHSANSEGSHETGDSGRFSHESNDEIHLSSVISTTPPNL

SEQ ID NO: 11071 - protein, 941 aa, Homo sapiens
MWTEEAGATAEAQESGIRNKSSSSSQIPVVGVVTEDDEAQDVFKPMDLNRVIKLLEETDKDGLEEKQLKFVKKLVQCYQNGLPLRDLAQIFKILNLCSGKIKNQPRFIESAYDIIKLCGLPFLKKKVSDEITYAEDTANSIALLGDLMKIPSSELRIQICKCIVDFYHAEPPKKHIPGYQQASSSYKIQMAEVGGLAKTMVQSMTLLENQLVEKLWVLKVLQHLSTSEVNCTIMMKAQAASGICTHLNDPDPSGQLLFRSSEILWNLLEKSSKEEVIQQLSNLECLLALKEVFKNLFMRGFSHYDRQLRNDILVITTIIAQNPEAPMIECGFTKDLILFATFNEVKSQNLLVKGLKLSNSYEDFELKKLLFNVIVILCKDLPTVQLLIDGKVILALFTYVKKPEKQKIIDWSAAQHEELQLHAIATLSSVAPLLIEEYMSCQGNARVLAFLEWCESEDPFFSHGNSFHGTGGRGNKFAQMRYSLRLLRAVVYLEDETVNKDLCEKGTIQQMIGIFKNIISKPNEKEEAIVLEIQSDILLILSGLCENHIQRKEIFGTEGVDIVLHVMKTDPRKLQSGLGYNVLLFSTLDSIWCCILGCYPSEDYFLEKEGIFLLLDLLALNQKKFCNLILGIMVEFCDNPKTAAHVNAWQGKKDQTAASLLIKLWRKEEKELGVKRDKNGKIIDTKKPLFTSFQEEQKIIPLPANCPSIAVMDVSENIRAKIYAILGKLDFENLPGLSAEDFVTLCIIHRYLDFKIGEIWNEIYEEIKLEKLRPVTTDKKALEAITTASENIGKMVASLQSDIIESQACQDMQNEQKVYAKIQATHKQRELANKSWEDFLARTSNAKTLKKAKSLQEKAIEASRYHKRPQNAIFHQTHIKGLNTTVPSGGVVTVESTPARLVGGPLVDTDIALKKLPIRGGALQRVKAVKIVDAPKKSIPT

SEQ ID NO: 11072 - protein, 1455 aa, Homo sapiens
MSDSWVPNSASGQDPGGRRRAWAELLAGRVKREKYNPERAQKLKESAVRLLRSHQDLNALLLEVEGPLCKKLSLSKVIDCDSSEAYANHSSSFIGSALQDQASRLGVPVGILSAGMVASSVGQICTAPAETSHPVLLTVEQRKKLSSLLEFAQYLLAHSMFSRLSFCQELWKIQSSLLLEAVWHLHVQGIVSLQELLESHPDMHAVGSWLFRNLCCLCEQMEASCQHADVARAMLSDFVQMFVLRGFQKNSDLRRTVEPEKMPQVTVDVLQRMLIFALDALAAGVQEESSTHKIVRCWFGVFSGHTLGSVISTDPLKRFFSHTLTQILTHSPVLKASDAVQMQREWSFARTHPLLTSLYRRLFVMLSAEELVGHLQEVLETQEVHWQRVLSFVSALVVCFPEAQQLLEDWVARLMAQAFESCQLDSMVTAFLVVRQAALEGPSAFLSYADWFKASFGSTRGYHGCSKKALVFLFTFLSELVPFESPRYLQVHILHPPLVPGKYRSLLTDYISLAKTRLADLKVSIENMGLYEDLSSAGDITEPHSQALQDVEKAIMVFEHTGNIPVTVMEASIFRRPYYVSHFLPALLTPRVLPKVPDSRVAFIESLKRADKIPPSLYSTYCQACSAAEEKPEDAALGVRAEPNSAEEPLGQLTAALGELRASMTDPSQRDVISAQVAVISERLRAVLGHNEDDSSVEISKIQLSINTPRLEPREHMAVDLLLTSFCQNLMAASSVAPPERQGPWAALFVRTMCGRVLPAVLTRLCQLLRHQGPSLSAPHVLGLAALAVHLGESRSALPEVDVGPPAPGAGLPVPALFDSLLTCRTRDSLFFCLKFCTAAISYSLCKFSSQSRDTLCSCLSPGLIKKFQFLMFRLFSEARQPLSEEDVASLSWRPLHLPSADWQRAALSLWTHRTFREVLKEEDVHLTYQDWLHLELEIQPEADALSDTERQDFHQWAIHEHFLPESSASGGCDGDLQAACTILVNALMDFHQSSRSYDHSENSDLVFGGRTGNEDIISRLQEMVADLELQQDLIVPLGHTPSQEHFLFEIFRRRLQALTSGWSVAASLQRQRELLMYKRILLRLPSSVLCGSSFQAEQPITARCEQFFHLVNSEMRNFCSHGGALTQDITAHFFRGLLNACLRSRDPSLMVDFILAKCQTKCPLILTSALVWWPSLEPVLLCRWRRHCQSPLPRELQKLQEGRQFASDFLSPEAASPAPNPDWLSAAALHFAIQQVREENIRKQLKKLDCEREELLVFLFFFSLMGLLSSHLTSNSTTDLPKAFHVCAAILECLEKRKISWLALFQLTESDLRLGRLLLRVAPDQHTRLLPFAFYSLLSYFHEDAAIREEAFLHVAVDMYLKLVQLFVAGDTSTVSPPAGRSLELKGQGNPVELITKARLFLLQLIPRCPKKSFSHVAELLADRGDCDPEVSAALQSRQQAAPDADLSQEPHLF

SEQ ID NO: 11073 - protein, 1246 aa, Homo sapiens
MVPAGDQDRAPHRGKPAQAGARTSRASRALRSWRRSQAARATVTHPRGGHDRGSHGGYREGHRGCRRDPQWASAGPPPLSFTEEVKFELRALKDWDFKMSVPDYMQCAEDHQTLLVVVQPVGIVSEENFFRIYKRICSVSQISVRDSQRVLYIRYRHHYPPENNEWGDFQTHRKVVGLITITDCFSAKDWPQTFEKFHVQKEIYGSTLYDSRLFVFGLQGEIVEQPRTDVAFYPNYEDCQTVEKRIEDFIESLFIVLESKRLDRATDKSGDKIPLLCVPFEKKDFVGLDTDSRHYKKRCQGRMRKHVGDLCLQAGMLQDSLVHYHMSVELLRSVNDFLWLGAALEGLCSASVIYHYPGGTGGKSGARRFQGSTLPAEAANRHRPGAQEVLIDPGALTTNGINPDTSTEIGRAKNCLSPEDIIDKYKEAISYYSKYKNAGVIELEACIKAVRVLAIQKRSMEASEFLQNAVYINLRQLSEEEKIQRYSILSELYELIGFHRKSAFFKRVAAMQCVAPSIAEPGWRACYKLLLETLPGYSLSLDPKDFSRGTHRGWAAVQMRLLHELVYASRRMGNPALSVRHLSFLLQTMLDFLSDQEKKDVAQSLENYTSKCPGTMEPIALPGGLTLPPVPFTKLPIVRHVKLLNLPASLRPHKMKSLLGQNVSTKSPFIYSPIIAHNRGEERNKKIDFQWVQGDVCEVQLMVYNPMPFELRVENMGLLTSGVEFESLPAALSLPAESGLYPVTLVGVPQTTGTITVNGYHTTVFGVFSDCLLDNLPGIKTSGSTVEVIPALPRLQISTSLPRSAHSLQPSSGDEISTNVSVQLYNGESQQLIIKLENIGMEPLEKLEVTSKVLTTKEKLYGDFLSWKLEETLAQFPLQPGKVATFTINIKVKLDFSCQENLLQDLSDDGISVSGFPLSSPFRQVVRPRVEGKPVNPPESNKAGDYSHVKTLEAVLNFKYSGGPGHTEGYYRNLSLGLHVEVEPSVFFTRVSTLPATSTRQCHLLLDVFNSTEHELTVSTRSSEALILHAGECQRMAIQVDKFNFESFPESPGEKGQFANPKQLEEERREARGLEIHSKLGICWRIPSLKRSGEASVEGLLNQLVLEHLQLAPLQWDVLVDGQPCDREAVAACQVGDPVRLEVRLTNRSPRSVGPFALTVVPFQDHQNGVHNYDLHDTVSFVGSSTFYLDAVQPSGQSACLGALLFLYTGDFFLHIRFHEDSTSKELPPSWFCLPSVHVCALEAQA

SEQ ID NO: 11074 - protein, 911 aa, Homo sapiens
MVQLRKLLRVLTLMKFPCCVLEVLLCALAAAARGQEMYAPHSIRIEGDVTLGGLFPVHAKGPSGVPCGDIKRENGIHRLEAMLYALDQINSDPNLLPNVTLGARILDTCSRDTYALEQSLTFVQALIQKDTSDVRCTNGEPPVFVKPEKVVGVIGASGSSVSIMVANILRLFQIPQISYASTAPELSDDRRYDFFSRVVPPDSFQAQAMVDIVKALGWNYVSTLASEGSYGEKGVESFTQISKEAGGLCIAQSVRIPQERKDRTIDFDRIIKQLLDTPNSRAVVIFANDEDIKQILAAAKRADQVGHFLWVGSDSWGSKINPLHQHEDIAEGAITIQPKRATVEGFDAYFTSRTLENNRRNVWFAEYWEENFNCKLTISGSKKEDTDRKCTGQERIGKDSNYEQEGKVQFVIDAVYAMAHALHHMNKDLCADYRGVCPEMEQAGGKKLLKYIRNVNFNGSAGTPVMFNKNGDAPGRYDIFQYQTTNTSNPGYRLIGQWTDELQLNIEDMQWGKGVREIPASVCTLPCKPGQRKKTQKGTPCCWTCEPCDGYQYQFDEMTCQHCPYDQRPNENRTGCQDIPIIKLEWHSPWAVIPVFLAMLGIIATIFVMATFIRYNDTPIVRASGRELSYVLLTGIFLCYIITFLMIAKPDVAVCSFRRVFLGLGMCISYAALLTKTNRIYRIFEQGKKSVTAPRLISPTSQLAITSSLISVQLLGVFIWFGVDPPNIIIDYDEHKTMNPEQARGVLKCDITDLQIICSLGYSILLMVTCTVYAIKTRGVPENFNEAKPIGFTMYTTCIVWLAFIPIFFGTAQSAEKLYIQTTTLTISMNLSASVALGMLYMPKVYIIIFHPELNVQKRKRSFKAVVTAATMSSRLSHKPSDRPNGEAKTELCENVDPNITSEDLSLHKED

SEQ ID NO: 11075 - protein, 906 aa, Homo sapiens
MVQLRKLLRVLTLMKFPCCVLEVLLCALAAAARGQEMYAPHSIRIEGDVTLGGLFPVHAKGPSGVPCGDIKRENGIHRLEAMLYALDQINSDPNLLPNVTLGARILDTCSRDTYALEQSLTFVQALIQKDTSDVRCTNGEPPVFVKPEKVVGVIGASGSSVSIMVANILRLFQIPQISYASTAPELSDDRRYDFFSRVVPPDSFQAQAMVDIVKALGWNYVSTLASEGSYGEKGVESFTQISKEAGGLCIAQSVRIPQERKDRTIDFDRIIKQLLDTPNSRAVVIFANDEDIKQILAAAKRADQVGHFLWVGSDSWGSKINPLHQHEDIAEGAITIQPKRATVEGFDAYFTSRTLENNRRNVWFAEYWEENFNCKLTISGSKKEDTDRKCTGQERIGKDSNYEQEGKVQFVIDAVYAMAHALHHMNKDLCADYRGVCPEMEQAGGKKLLKYIRNVNFNGSAGTPVMFNKNGDAPGRYDIFQYQTTNTSNPGYRLIGQWTDELQLNIEDMQWGKGVREIPASVCTLPCKPGQRKKTQKGTPCCWTCEPCDGYQYQFDEMTCQHCPYDQRPNENRTGCQDIPIIKLEWHSPWAVIPVFLAMLGIIATIFVMATFIRYNDTPIVRASGRELSYVLLTGIFLCYIITFLMIAKPDVAVCSFRRVFLGLGMCISYAALLTKTNRIYRIFEQGKKSVTAPRLISPTSQLAITSSLISVQLLGVFIWFGVDPPNIIIDYDEHKTMNPEQARGVLKCDITDLQIICSLGYSILLMVTCTVYAIKTRGVPENFNEAKPIGFTMYTTCIVWLAFIPIFFGTAQSAEKLYIQTTTLTISMNLSASVALGMLYMPKVYIIIFHPELNVQKRKRSFKAVVTAATMSSRLSHKPSDRPNGEAKTELCENVDPNSEKCNCY

SEQ ID NO: 11076 - protein, 402 aa, Homo sapiens
MLFEGKVNPQTQSLLAECGEWTRRSLHLRVLGRQLILPTDKGVQHFQGSTPASAVHRPPLSACGHSSNIRELCISGSQIVPAALSASALPGPDDTGVADLTARSSLEEEVYHVDGKIEEYFAFDRKEDDDECLEQKPAQPGRKWRKLGLPPVSPRDCVKDAVAAEVFDHVWTNMVELLEELIRKHWETTLTEGKKQRETLKVAGNRFPHVLVPHAHADGASGPPSGHAEAHGISLASRLNPPQIHHFSSSFYSDMNGVMTIQAKPLQRRPAYFADRTQNEKEDKASGGGAGALSSAPHRLGRASDTHGLSPSAKKTPVPWRLPSLASDSQRLKTPNIYSDEVLRGTTADWRGPHGFPTGSNVTEQVPPASHGDQGAEYSSSWMPPCFLQRKASTKPCVECHA

SEQ ID NO: 11077 - protein, 416 aa, Homo sapiens
MLLILLSVALLALSSAQNLNEDVSQEESPSLIAGNPQGAPPQGGNKPQGPPSPPGKPQGPPPQGGNQPQGPPPPPGKPQGPPPQGGNKPQGPPPPGKPQGPPPQGDKSRSPRSPPGKPQGPPPQGGNQPQGPPPPPGKPQGPPPQGGNKPQGPPPPGKPQGPPPQGDNKSRSSRSPPGKPQGPPPQGGNQPQGPPPPPGKPQGPPPQGGNKPQGPPPPGKPQGPPPQGDNKSQSARSPPGKPQGPPPQGGNQPQGPPPPPGKPQGPPPQGGNKPQGPPPPGKPQGPPPQGGSKSRSSRSPPGKPQGPPPQGGNQPQGPPPPPGKPQGPPPQGGNKPQGPPPPGKPQGPPPQGGSKSRSARSPPGKPQGPPQQEGNNPQGPPPPAGGNPQQPQAPPAGQPQGPPRPPQGGRPSRPPQ

SEQ ID NO: 11078 - protein, 377 aa, Homo sapiens
MDIPPLAGKIAALSLSALPVSYALNHVSALSHPLWVALMSALILGLLFVAVYSLSHGEVSYDPLYAVFAVFAFTSVVDLIIALQEDSYVVGFMEFYTKEGEPYLRTAHGVFICYWDGTVHYLLYLAMAGAICRRKRYRNFGLYWLGSFAMSILVFLTGNILGKYSSEIRPAFFLTIPYLLVPCWAGMKVFSQPRALTRCTANMVQEEQRKGLLQRPADLALVIYLILAGFFTLFRGLVVLDCPTDACFVYIYQYEPYLRDPVAYPKVQMLMYMFYVLPFCGLAAYALTFPGCSWLPDWALVFAGGIGQAQFSHMGASMHLRTPFTYRVPEDTWGCFFVCNLLYALGPHLLAYRCLQWPAFFHQPPPSDPLALHKKQH

SEQ ID NO: 11079 - protein, 619 aa, Homo sapiens
MEGRGPYRIYDPGGSVPSGEASAAFERLVKENSRLKEKMQGIKMLGELLEESQMEATRLRQKAEELVKDNELLPPPSPSLGSFDPLAELTGKDSNVTASPTAPACPSDKPAPVQKPPSSGTSSEFEVVTPEEQNSPESSSHANAMALGPLPREDGNLMLHLQRLETTLSVCAEEPDHGQLFTHLGRMALEFNRLASKVHKNEQRTSILQTLCEQLRKENEALKAKLDKGLEQRDQAAERLREENLELKKLLMSNGNKEGASGRPGSPKMEGTGKKAVAGQQQASVTAGKVPEVVALGAAEKKVKMLEQQRSELLEVNKQWDQHFRSMKQQYEQKITELRQKLADLQKQVTDLEAEREQKQRDFDRKLLLAKSKIEMEETDKEQLTAEAKELRQKVKYLQDQLSPLTRQREYQEKEIQRLNKALEEALSIQTPPSSPPTAFGSPEGAGALLRKQELVTQNELLKQQVKIFEEDFQRERSDRERMNEEKEELKKQVEKLQAQVTLSNAQLKAFKDEEKAREALRQQKRKAKASGERYHVEPHPEHLCGAYPYAYPPMPAMVPHHGFEDWSQIRYPPPPMAMEHPPPLPNSRLFHLHQFCRSRNTPGVYPVEGFEIQIRAPK

SEQ ID NO: 11080 - protein, 694 aa, Homo sapiens
MTDTVFSNSSNRWMYPSDRPLQSNDKEQLQAGWSVHPGGQPDRQRKQEELTDEEKEIINRVIARAEKMEEMEQERIGRLVDRLENMRKNVAGDGVNRCILCGEQLGMLGSACVVCEDCKKNVCTKCGVETNNRLHSVWLCKICIEQREVWKRSGAWFFKGFPKQVLPQPMPIKKTKPQQPVSEPAAPEQPAPEPKHPARAPARGDSEDRRGPGQKTGPDPASAPGRGNYGPPVRRASEARMSSSSRDSESWDHSGGAGDSSRSPAGLRRANSVQASRPAPGSVQSPAPPQPGQPGTPGGSRPGPGPAGRFPDQKPEVAPSDPGTTAPPREERTGGVGGYPAVGAREDRMSHPSGPYSQASAAAPQPAAARQPPPPEEEEEEANSYDSDEATTLGALEFSLLYDQDNSSLQCTIIKAKGLKPMDSNGLADPYVKLHLLPGASKSNKLRTKTLRNTRNPIWNETLVYHGITDEDMQRKTLRISVCDEDKFGHNEFIGETRFSLKKLKPNQRKNFNICLERVIPMKRAGTTGSARGMALYEEEQVERVGDIEERGKILVSLMYSTQQGGLIVGIIRCVHLAAMDANGYSDPFVKLWLKPDMGKKAKHKTQIKKKTLNPEFNEEFFYDIKHSDLAKKSLDISVWDYDIGKSNDYIGGCQLGISAKGERLKHWYECLKNKDKKIERWHQLQNENHVSSD

SEQ ID NO: 11081 - protein, 4158 aa, Homo sapiens
MTFRATDSEFDLTNIEEYAENSALSRLNNIKAKQRVSYVTSTENESDTQILTFRHITKAQEKTRKRQQPIKLEPLPVLKVYQDHKQPEYIHEQNRFQLMTAGIIKRPVSIAKKSFATSSTQFLEHQDAVKKMQIHRPYVEVFSPSPPKLPHTGIGKRGLFGTRSSAYPKYTFHDREEVVKANIRDPLQIIKIIRENEHLGFLYMIPAVPRSSIEYDTYNLKVVSYENINKNDYYTISQRAVTHIYNEDIEFIEIDRWEQEYLYHRELTKIPIFSLFRKWKAFSVWRKNVRSKKITGCQKSLQKNLFIVNPHLRPALLKINELCYHLSFMGLCYIEKCHTYTLQEFKAAQVIRLAEVTERLGEFRNEAKYVVRRACRFALRAAGFVPDDCAFGPFEDYHKVQSSGSFINTPHELPTYGDSEKMTYTEQASKRHYCMRLTCFIRLNDYLIENTMHILTVNAVNSLLNHLTDKLKRTPSADVIQKWITEEKPEVPDKKGTLMVEKQEEDESLIPMFLTELMLTVQSLLFEPSLEDFLDGILGAVNHCQNTVLSVPNLVPDSYFDAFTSPYINNKLEGKTCGTGPSLAAVFEDDKNFHTIISQIKETIQAAFESARIYAATFEKFQIFFKENESLDLQALKLQEPDINFFSEQLEKYHKQHKDAVALRPTRNVGLLLIDTRLLREKLIPSPLRCLEVLNFMLPRQSKKKVDAIIFEAQDAEYKLEFVPTTTTEYVHSLLFLDEIQERIESLEDEGNIVTQMYKLMEQYQVPTPPEDFAVFATMKPSIVAVRNAIDKSVGDRESSIKQFCVHLGSDLEELNNEVNEVKLQAQDPQILDISADQDKIRLILNNLQSVLADLQKRAFQYKSYQKNFKVEVSKFEALEEVSAELKLKQLLWDSFSEWDKLQQEWLKSKFDCLDPEVLNGQVSKYAKFVTQLEKGLPPNSVVPQLKYKVEKMKEKLPVIIDLRNPTLKARHWAAIEQTVDATLVDAEIPLTLERLSQLHVFDFGQEIQDISGQASGEAALEAILKKVEDSWKTTEFVILPHRDSKDVFILGGTDDIQVLLDDSTINVATLASSRYLGPLKTRVDEWQKQLALFNQTLEEWLTCQRNWLYLESIFNAPDIQRQLPAEAKMFLQVDKSWKEIMRKVNRLPNALRAATQPGLLETFQNNNALLDQIQKCLEAYLESKRVIFPRFYFLSNDELLEILAQTRNPQAVQPHLRKCFDSISKLEFALMPPAEGKIPGIDGEPEKVYTNDILAMLSPEGERVSLGKGLKARGNVEEWLGKVEEAMFTSLRRLCKAAIADYQGKLRTDWVVAGHPSQVILTVSQIMWCRDLTECLETEHSNHIQALKNFEKVNFERLNALAAIVQGSLPKLHRNILTALITIDVHARDIVTELVQSKVETVESFDWQRQLRYYWDIDLDNCVARMALSQYTYGYEYLGACPRLVITPLTDRCYLCLMGALQLDLGGAPAGPAGTGKTETTKDLAKALAIQCVVFNCSDGLDYKMMGRFFSGLAQSGAWCCFDEFNRIDIEVLSVIAQQLITIRNAKAAKLSRFMFEGREIKLVMTCAAFITMNPGYAGRTELPDNLKALFRPFAMMVPNYALIAEVILYSEGFESSKILARKMTQMYKLCSEQLSQQDHYDFGMRAVKSVLVMAGSLKRENPDLNEDVVLIRALQDSNLPKFLTDDALLFSGIISDLFPGVQIPEHDYGILQSTIVDVMNRQNLQPEMCMVRKVIQFYETMLVRHGVMLVGPTGGGKTTVYRILAETLGNLQKLGIENSFYQAVKTYVLNPKSITMGELYGEVNNLTLEWKDGLMALSVRAAVNDTSEDHKWIISDGPVDALWIENMNTVLDDNKMLCLANSERIKLTPQIHMLFEVQDLRVASPATVSRCGMVFVDPEELKWMPYVKTWMKGISKKLTEETQEYILNLFQRYVDEGLHFINKKCSQAIPQVDISKVTTLCCLLESLILGKDGVNLAMEQTKLNTILCQTFVFCYLWSLGGNLTENYYDSFDTFIRTQFDDNPDARLPNSGDLWSIHMDFDTKRLDPWERIIPTFKYNRDVPFFEMLVPTTDTVRYGYLMEKLLAVKHSVLFTGITGVGKSVIAKGLLNKIQESAGYVPVYLNFSAQTSSARTQEIIESKLERKRKNILGAPGNKRIVIFVDDLNMPRLDRYGSQPPIELLRQYQDFGGFYDRNKLFWKEIQDVTIISACAPPGGGRNPVTPRFIRHFSMLCLPMPSEHSLKQIFQAILNGFLSDFPPAVKQTASSIVEASVEIYNKMSVDLLPTPAKSHYVFNLRDLSKCVQGILQCDPGTIREEIQIFRLFCHECQRVFHDRLINNEDKHYFHVILTEMANKHFGIAIDLEYFLNKPIIFGDFIKFGADKADRIYDDMPDIEKTANVLQDYLDDYNLTNPKEVKLVFFQDAIEHVSRIARMIRQERGNALLVGVGGTGKQSLTRLAAHICGYKCLQIELSRGYNYDSFHEDLRKLYKMAGVEDKNMVFLFTDTQIVVEEFLEDINNILNSGEVPNLFEKDELEQVLAATRPRAKEVGISEGNRDEVFQYFISKVRQKLHIVLCMSPVGEAFRSRCRMFPSLVNCCTIDWFVQWPREALLSVSKTFFSQVDAGNEELKEKLPLMCVNVHLSVSSMAERYYNELRRRYYTTPTSYLELINLYLSMLSEKRKQIISARDRVKNGLTKLLETNILVDKMKLDLSALEPVLLAKSEDVEALMEKLAVDQESADQVRNTVQEDEATAKVKAEETQAIADDAQRDLDEALPALDAANKALDSLDKADISEIRVFTKPPDLVMTVMEAISILLNAKPDWPSAKQLLGDSNFLKRLLEYDKENIKPQILAKLQKYINNPDFVPEKVEKVSKACKSMCMWVRAMDLYSRVVKVVEPKRQKLRAAQAELDITMATLREKQALLRQVEDQIQALQDEYDKGVNEKESLAKTMALTKARLVRAGKLTAALEDEQVRWEESIQKFEEEISNITGNVFIAAACVAYYGAFTAQYRQSLIECWIQDCQSLEIPIDPSFSLINILGDPYEIRQWNTDGLPRDLISTENGILVTQGRRWPLMIDPQDQANRWIRNKESKSGLKIIKLTDSNFLRILENSIRLGLPVLLEELKETLDPALEPILLKQIFISGGRLLIRLGDSDIDYDKNFRFYMTTKMPNPHYLPEVCIKVTIINFTVTKSGLEDQLLSDVVRLEKPRLEEQRIKLIVRINTDKNQLKTIEEKILRMLFTSEGNILDNEELIDTLQDSKITSGAIKTRLEEAESTEQMINVAREKYRPVATQGSVMYFVIASLSEIDPMYQYSLKYFKQLFNTTIETSVKTENLQQRLDVLLEQTLLTAYVNVSRGLFEQHKLIYSFMLCVEMMRQQGTLSDAEWNFFLRGSAGLEKERPPKPEAPWLPTATWFACCDLEESFPVFHGLTQNILSHPISIRLGSFETYINPQKWEGYSKMKHEDKHMRQEKEAAHQDPWSAGLSSFHKLILIKCCKEEKVVFALTDFVIENLGKQFIETPPVDLPTLYQDMSCNTPLVFILSTGSDPMGAFQRFARESGYSERVQSISLGQGQGPIAEKMVKDAMKSGNWVFLQNCHLAVSWMLAMEELIKTFTDPDSAIKDTFRLFLSSMPSNTFPVTVLQNSVKVTNEPPKGLRANIRRAFTEMTPSFFEENILGKKWRQIIFGICFFHAIIQERKKFGPLGWNICYEFNDSDRECALLNLKLYCKEGKIPWDALIYITGEITYGGRVTDSWDQRCLRTILKRFFSPETLEEDYKYSESGIYFAPMADSLQEFKDYIENLPLIDDPEIFGMHENANLVFQYKETSTLINTILEVQPRSSTGGEGKSNDEIVQELVASVQTRVPEKLEMEGASESLFVKDLQGRLNSLTTVLGQEVDRFNNLLKLIHTSLETLNKAIAGFVVMSEEMEKVYNSFLNNQVPALWSNTAYPSLKPLGSWVKDLILRTSFVDLWLKRGQPKSYWISGFFFPQGFLTGTLQNHARKYNLPIDELSFKYSVIPTYRDQAAVIEAAKTVQFGQELPMDMELPSPEDGVLVHGMFMDASRWDDKEMVIEDALPGQMNPVLPVVHFEPQQNYKPSPTLYHCPLYKTGARAGTLSTTGHSTNFVVTVLLPSKRSKDYWIAKGSALLCQLSE

SEQ ID NO: 11082 - protein, 1184 aa, Homo sapiens
MKKYRKISIGCFAMATQTSHVFHGQENMFLENHCIRRNTGRDSKKPLKQKNMNGLGQNSDNGLLVTHVNQTQDLLRLQGSETQSSDWEDSEDWLSAHSLKCQKLTLADLISQGTEVLEEGTNVVQKICFSTQIIRHFESKLSDTIEVYQERIQWLTENSKKAFGLIKGARVSILIDVSAISSGPQKEEFQKDLMSLIDEQLSHKEKLFVLSFGTNAGSLWPDPMEVSASTLQELKLWVKTLQPDGGSNLLQALKKIFTLKGLDSLVAIMRSCPDQPSEILSDYIQQSTMGRDLIIHFITYRCDDQMPPAVLKNLAEAVRGYYHCYSPKMEHYTSRDMDELLAEIQKAQSLLSHVQALQHSSPCEALTCTMEEISTEITNGPLISLLPKPPKHDAPLTIEFPNLDKTSAEWLKVNGLKAKKLSLYQVLAPNAFSPVEEFVPILQKTVSSTIHEKAMIQFEWHDGTVKNIHVDPPFLYKYQQQLSRAMRMYERRIEWLSLASRRIWGTVCEKRVVVLLDISATNSMYIIHIQHSLRLLLEEQLSNKDCFNLIAFGSTIESWRPEMVPVSHNNLQSAWRWALNLRCRGSRNVLSALRKAVEVDFKDKDKHQSQGIYLFTGGIPDQDMPTLSAYMAEACGGCDLQLNVCLFYVGEPKMDTTPPARYASHTDTAAAYKEVTRAAGGRFHWFGDTGIYESDDINSIMSEMEKALNYSQKCAFLMASLKNHSGKVLGSSALPKEKPKTLQLRSQPKKLCPPRPTVPLGARMSIKDDPDREKSPPLKSLKWRPLSSRVGISPAAAQPTKEGMMELRRKTKSREAETSLLLFYTEKGNDVGSVYKKYPQGRGLRRTSSSIDLPRKDTVCSSQEWVAKYGLKKLKLEISRCMGPNCTHQKSGQRSASAKHCSIFPSVEIHGVVRHIQWTPREMEVYIRHLEKVLRRYVQRLQWLLSGSRRLFGTVLESKVCILLDTSGSMGPYLQQVKTELVLLIWEQLRKCCDSFNLLSFAESFQSWQDTLVETTDAACHEAMQWVTHLQAQGSTSILQALLKAFSFHDLEGLYLLTDGKPDTSCSLVLNEVQKLREKRDVKVHTISLNCSDRAAVEFLRKLASFTGGRYHCPVGEDTLSKIHSLLTKGFINEKDPTLPPFEGDDLRILAQEITKARSFLWQAQSFRSQLQKKNDAEPKVTLS

SEQ ID NO: 11083 - protein, 986 aa, Homo sapiens
MGPPLPLLLLLLLLLPPRVLPAAPSSVPRGRQLPGRLGCLLEEGLCGASEACVNDGVFGRCQKVPAMDFYRYEVSPVALQRLRVALQKLSGTGFTWQDDYTQYVMDQELADLPKTYLRRPEASSPARPSKHSVGSERRYSREGGAALANALRRHLPFLEALSQAPASDVLARTHTAQDRPPAEGDDRFSESILTYVAHTSALTYPPGSRTQLREDLLPRTLGQLQPDELSPKVDSGVDRHHLMAALSAYAAQRPPAPPGEGSLEPQYLLRAPSRMPRPLLAPAAPQKWPSPLGDSEDPSSTGDGARIHTLLKDLQRQPAEVRGLSGLELDGMAELMAGLMQGVDHGVARGSPGRAALGESGEQADGPKATLRGDSFPDDGVQDDDDRLYQEVHRLSATLGGLLQDHGSRLLPGALPFARPLDMERKKSEHPESSLSSEEETAGVENVKSQTYSKDLLGQQPHSEPGAAAFGELQNQMPGPSKEEQSLPAGAQEALSDGLQLEVQPSEEEARGYIVTDREVLGPAVTFKVSANVQNVTTEDVEKATVDNKDKLEETSGLKILQTGVGSKSKLKFLPPQAEQEDSTKFIALTLVSLACILGVLLASGLIYCLRHSSQHRLKEKLSGLGGDPGADATAAYQELCRQRMATRPPDRPEGPHTSRISSVSSQFSDGPIPSPSARSSASSWSEEPVQSNMDISTGHMILSYMEDHLKNKNRLEKEWEALCAYQAEPNSSFVAQREENVPKNRSLAVLTYDHSRVLLKAENSHSHSDYINASPIMDHDPRNPAYIATQGPLPATVADFWQMVWESGCVVIVMLTPLAENGVRQCYHYWPDEGSNLYHIYEVNLVSEHIWCEDFLVRSFYLKNLQTNETRTVTQFHFLSWYDRGVPSSSRSLLDFRRKVNKCYRGRSCPIIVHCSDGAGRSGTYVLIDMVLNKMAKGAKEIDIAATLEHLRDQRPGMVQTKEQFEFALTAVAEEVNAILKALPQ

SEQ ID NO: 11084 - protein, 998 aa, Homo sapiens
MGPPLPLLLLLLLLLPPRVLPAAPSSVPRGRQLPGRLDGVFGRCQKVPAMDFYRYEVSPVALQRLRVALQKLSGTGFTWQDDYTQYVMDQELADLPKTYLRRPEASSPARPSKHSVGSERRYSREGGAALANALRRHLPFLEALSQAPASDVLARTHTAQDRPPAEGDDRFSESILTYVAHTSALTYPPGSRTQLREDLLPRTLGQLQPDELSPKVDSGVDRHHLMAALSAYAAQRPPAPPGEGSLEPQYLLRAPSRMPRPLLAPAAPQKWPSPLGDSEDPSSTGDGARIHTLLKDLQRQPAEVRGLSGLELDGMAELMAGLMQGVDHGVARGSPGRAALGESGEQADGPKATLRGDSFPDDGVQDDDDRLYQEVHRLSATLGGLLQDHGSRLLPGALPFARPLDMERKKSEHPESSLSSEEETAGVENVKSQTYSKDLLGQQPHSEPGAAAFGELQNQMPGPSKEEQSLPAGAQEALSDGLQLEVQPSEEEARGYIVTDRDPLRPEEGRRLVEDVARLLQVPSSAFADVEVLGPAVTFKVSANVQNVTTEDVEKATVDNKDKLEETSGLKILQTGVGSKSKLKFLPPQAEQEDSTKFIALTLVSLACILGVLLASGLIYCLRHSSQHRLKEKLSGLGGDPGADATAAYQELCRQRMATRPPDRPEGPHTSRISSVSSQFSDGPIPSPSARSSASSWSEEPVQSNMDISTGHMILSYMEDHLKNKNRLEKEWEALCAYQAEPNSSFVAQREENVPKNRSLAVLTYDHSRVLLKAENSHSHSDYINASPIMDHDPRNPAYIATQGPLPATVADFWQMVWESGCVVIVMLTPLAENGVRQCYHYWPDEGSNLYHIYEVNLVSEHIWCEDFLVRSFYLKNLQTNETRTVTQFHFLSWYDRGVPSSSRSLLDFRRKVNKCYRGRSCPIIVHCSDGAGRSGTYVLIDMVLNKMAKGAKEIDIAATLEHLRDQRPGMVQTKEQFEFALTAVAEEVNAILKALPQ

SEQ ID NO: 11085 - protein, 1015 aa, Homo sapiens
MGPPLPLLLLLLLLLPPRVLPAAPSSVPRGRQLPGRLGCLLEEGLCGASEACVNDGVFGRCQKVPAMDFYRYEVSPVALQRLRVALQKLSGTGFTWQDDYTQYVMDQELADLPKTYLRRPEASSPARPSKHSVGSERRYSREGGAALANALRRHLPFLEALSQAPASDVLARTHTAQDRPPAEGDDRFSESILTYVAHTSALTYPPGSRTQLREDLLPRTLGQLQPDELSPKVDSGVDRHHLMAALSAYAAQRPPAPPGEGSLEPQYLLRAPSRMPRPLLAPAAPQKWPSPLGDSEDPSSTGDGARIHTLLKDLQRQPAEVRGLSGLELDGMAELMAGLMQGVDHGVARGSPGRAALGESGEQADGPKATLRGDSFPDDGVQDDDDRLYQEVHRLSATLGGLLQDHGSRLLPGALPFARPLDMERKKSEHPESSLSSEEETAGVENVKSQTYSKDLLGQQPHSEPGAAAFGELQNQMPGPSKEEQSLPAGAQEALSDGLQLEVQPSEEEARGYIVTDRDPLRPEEGRRLVEDVARLLQVPSSAFADVEVLGPAVTFKVSANVQNVTTEDVEKATVDNKDKLEETSGLKILQTGVGSKSKLKFLPPQAEQEDSTKFIALTLVSLACILGVLLASGLIYCLRHSSQHRLKEKLSGLGGDPGADATAAYQELCRQRMATRPPDRPEGPHTSRISSVSSQFSDGPIPSPSARSSASSWSEEPVQSNMDISTGHMILSYMEDHLKNKNRLEKEWEALCAYQAEPNSSFVAQREENVPKNRSLAVLTYDHSRVLLKAENSHSHSDYINASPIMDHDPRNPAYIATQGPLPATVADFWQMVWESGCVVIVMLTPLAENGVRQCYHYWPDEGSNLYHIYEVNLVSEHIWCEDFLVRSFYLKNLQTNETRTVTQFHFLSWYDRGVPSSSRSLLDFRRKVNKCYRGRSCPIIVHCSDGAGRSGTYVLIDMVLNKMAKGAKEIDIAATLEHLRDQRPGMVQTKEQFEFALTAVAEEVNAILKALPQ

SEQ ID NO: 11086 - protein, 1910 aa, Homo sapiens
MWVAKWLTGLLYHLSLFITRSWEVDFHPRQEALVRTLTSYEVVIPERVNEFGEVFPQSHHFSRQKRSSEALEPMPFRTHYRFTAYGQLFQLNLTADASFLAAGYTEVHLGTPERGAWESDAGPSDLRHCFYRGQVNSQEDYKAVVSLCGGLTGTFKGQNGEYFLEPIMKADGNEYEDGHNKPHLIYRQDLNNSFLQTLKYCSVSESQIKETSLPFHTYSNMNEDLNVMKERVLGHTSKNVPLKDERRHSRKKRLISYPRYIEIMVTADAKVVSAHGSNLQNYILTLMSIVATIYKDPSIGNLIHIVVVKLVMIHREEEGPVINFDGATTLKNFCSWQQTQNDLDDVHPSHHDTAVLITREDICSSKEKCNMLGLSYLGTICDPLQSCFINEEKGLISAFTIAHELGHTLGVQHDDNPRCKEMKVTKYHVMAPALSFHMSPWSWSNCSRKYVTEFLDTGYGECLLDKPDEEIYNLPSELPGSRYDGNKQCELAFGPGSQMCPHINICMHLWCTSTEKLHKGCFTQHVPPADGTDCGPGMHCRHGLCVNKETETRPVNGEWGPWEPYSSCSRTCGGGIESATRRCNRPEPRNGGNYCVGRRMKFRSCNTDSCPKGTQDFREKQCSDFNGKHLDISGIPSNVRWLPRYSGIGTKDRCKLYCQVAGTNYFYLLKDMVEDGTPCGTETHDICVQGQCMAAGCDHVLNSSAKIDKCGVCGGDNSSCKTITGVFNSSHYGYNVVVKIPAGATNVDIRQYSYSGQPDDSYLALSDAEGNFLFNGNFLLSTSKKEINVQGTRTVIEYSGSNNAVERINSTNRQEKELILQVLCVGNLYNPDVHYSFNIPLEERSDMFTWDPYGPWEGCTKMCQGLQRRNITCIHKSDHSVVSDKECDHLPLPSFVTQSCNTDCELRWHVIGKSECSSQCGQGYRTLDIHCMKYSIHEGQTVQVDDHYCGDQLKPPTQELCHGNCVFTRWHYSEWSQCSRSCGGGERSRESYCMNNFGHRLADNECQELSRVTRENCNEFSCPSWAASEWSECLVTCGKGTKQRQVWCQLNVDHLSDGFCNSSTKPESLSPCELHTCASWQVGPWGPCTTTCGHGYQMRDVKCVNELASAVLEDTECHEASRPSDRQSCVLTPCSFISKLETALLPTVLIKKMAQWRHGSWTPCSVSCGRGTQARYVSCRDALDRIADESYCAHLPRPAEIWDCFTPCGEWQAGDWSPCSASCGHGKTTRQVLCMNYHQPIDENYCDPEVRPLMEQECSLAACPPAHSHFPSSPVQPSYYLSTNLPLTQKLEDNENQVVHPSVRGNQWRTGPWGSCSSSCSGGLQHRAVVCQDENGQSASYCDAASKPPELQQCGPGPCPQWNYGNWGECSQTCGGGIKSRLVICQFPNGQILEDHNCEIVNKPPSVIQCHMHACPADVSWHQEPWTSCSASCGKGRKYREVFCIDQFQRKLEDTNCSQVQKPPTHKACRSVRCPSWKANSWNECSVTCGSGVQQRDVYCRLKGVGQVVEEMCDQSTRPCSQRRCWSQDCVQHKGMERGRLNCSTSCERKDSHQRMECTDNQIRQVNEIVYNSSTISLTSKNCRNPPCNYIVVTADSSQCANNCGFSYRQRITYCTEIPSTKKHKLHRLRPIVYQECPVVPSSQVYQCINSCLHLATWKVGKWSKCSVTCGIGIMKRQVKCITKHGLSSDLCLNHLKPGAQKKCYANDCKSFTTCKEIQVKNHIRKDGDYYLNIKGRIIKIYCADMYLENPKEYLTLVQGEENFSEVYGFRLKNPYQCPFNGSRREDCECDNGHLAAGYTVFSKIRIDLTSMQIKTTDLLFSKTIFGNAVPFATAGDCYSAFRCPQGQFSINLSGTGMKISSTAKWLTQGSYTSVSIRRSEDGTRFFGKCGGYCGKCLPHMTTGLPIQVI

SEQ ID NO: 11087 - protein, 998 aa, Homo sapiens
MRVFLLCAYILLLMVSQLRAVSFPEDDEPLNTVDYHYSRQYPVFRGRPSGNESQHRLDFQLMLKIRDTLYIAGRDQVYTVNLNEMPKTEVIPNKKLTWRSRQQDRENCAMKGKHKDECHNFIKVFVPRNDEMVFVCGTNAFNPMCRYYRLSTLEYDGEEISGLARCPFDARQTNVALFADGKLYSATVADFLASDAVIYRSMGDGSALRTIKYDSKWIKEPHFLHAIEYGNYVYFFFREIAVEHNNLGKAVYSRVARICKNDMGGSQRVLEKHWTSFLKARLNCSVPGDSFFYFDVLQSITDIIQINGIPTVVGVFTTQLNSIPGSAVCAFSMDDIEKVFKGRFKEQKTPDSVWTAVPEDKVPKPRPGCCAKHGLAEAYKTSIDFPDETLSFIKSHPLMDSAVPPIADEPWFTKTRVRYRLTAISVDHSAGPYQNYTVIFVGSEAGMVLKVLAKTSPFSLNDSVLLEEIEAYNHAKCSAENEEDKKVISLQLDKDHHALYVAFSSCIIRIPLSRCERYGSCKKSCIASRDPYCGWLSQGSCGRVTPGMLAEGYEQDTEFGNTAHLGDCHGVRWEVQSGESNQMVHMNVLITCVFAAFVLGAFIAGVAVYCYRDMFVRKNRKIHKDAESAQSCTDSSGSFAKLNGLFDSPVKEYQQNIDSPKLYSNLLTSRKELPPNGDTKSMVMDHRGQPPELAALPTPESTPVLHQKTLQAMKSHSEKAHGHGASRKETPQFFPSSPPPHSPLSHGHIPSAIVLPNATHDYNTSFSNSNAHKAEKKLQNIDHPLTKSSSKRDHRRSVDSRNTLNDLLKHLNDPNSNPKAIMGDIQMAHQNLMLDPMGSMSEVPPKVPNREASLYSPPSTLPRNSPTKRVDVPTTPGVPMTSLERQRGYHKNSSQRHSISAMPKNLNSPNGVLLSRQPSMNRGGYMPTPTGAKVDYIQGTPVSVHLQPSLSRQSSYTSNGTLPRTGLKRTPSLKPDVPPKPSFVPQTPSVRPLNKYTY

SEQ ID NO: 11088 - protein, 637 aa, Homo sapiens
MQRDESSPFPPLFSLTSSQVSDRCDYVFVNGKEMKGKVNVVVNFTYQHLSSPLEMTVWVPRLPLQIEVSDTELNQIKGWRVPIVSSRRPAGDSEEEEDDERRGRGCTLQYQHAMVRVLTQFVAEAAGPGGHLAHLLGSDWQVDITELINDFMQVEEPRIAKLQGGQILMGQELGMTTIQILSPLSDTILAEKTITVLDEKVTITDLGVQLVTGLSLSLQLSPGSNRAIFATAVAQELLQRPKQEAAISCWVQFSDGSVTPLDIYDGKDFSLMATSLDEKVVSIHQDPKFKWPIIAAETEGQGTLVKVEMVISESCQKSKRKSVLAVGTANIKVKFGQNDANPNTSDSRHTGAGVHMENNVSDRRPKKPSQEWGSQEGQYYGSSSMGLMEGRGTTTDRSILQKKKGQESLLDDNSHLQTIPSDLTSFPAQVDLPRSNGEMDGNDLMQASKGLSDLEIGMYALLGVFCLAILVFLINCVTFALKYRHKQVPFEEQEGMSHSHDWVGLSNRTELLENHINFASSQDEQITAIDRGMDFEESKYLLSTNSQKSINGQLFKPLGPIIIDGKDQKSEPPTSPTSKRKRVKFTTFTAVSSDDEYPTRNSIVMSSEDDIKWVCQDLDPGDCKELHNYMERLHENV

SEQ ID NO: 11089 - protein, 1816 aa, Homo sapiens
MALSSAWRSVLPLWLLWSAACSRAASGDDNAFPFDIEGSSAVGRQDPPETSEPRVALGRLPPAAEKCNAGFFHTLSGECVPCDCNGNSNECLDGSGYCVHCQRNTTGEHCEKCLDGYIGDSIRGAPQFCQPCPCPLPHLANFAESCYRKNGAVRCICNENYAGPNCERCAPGYYGNPLLIGSTCKKCDCSGNSDPNLIFEDCDEVTGQCRNCLRNTTGFKCERCAPGYYGDARIAKNCAVCNCGGGPCDSVTGECLEEGFEPPTGCDKCVWDLTDDLRLAALSIEEGKSGVLSVSSGAAAHRHVNEINATIYLLKTKLSERENQYALRKIQINNAENTMKSLLSDVEELVEKENQASRKGQLVQKESMDTINHASQLVEQAHDMRDKIQEINNKMLYYGEEHELSPKEISEKLVLAQKMLEEIRSRQPFFTQRELVDEEADEAYELLSQAESWQRLHNETRTLFPVVLEQLDDYNAKLSDLQEALDQALNYVRDAEDMNRATAARQRDHEKQQERVREQMEVVNMSLSTSADSLTTPRLTLSELDDIIKNASGIYAEIDGAKSELQVKLSNLSNLSHDLVQEAIDHAQDLQQEANELSRKLHSSDMNGLVQKALDASNVYENIVNYVSEANETAEFALNTTDRIYDAVSGIDTQIIYHKDESENLLNQARELQAKAESSSDEAVADTSRRVGGALARKSALKTRLSDAVKQLQAAERGDAQQRLGQSRLITEEANRTTMEVQQATAPMANNLTNWSQNLQHFDSSAYNTAVNSARDAVRNLTEVVPQLLDQLRTVEQKRPASNVSASIQRIRELIAQTRSVASKIQVSMMFDGQSAVEVHSRTSMDDLKAFTSLSLYMKPPVKRPELTETADQFILYLGSKNAKKEYMGLAIKNDNLVYVYNLGTKDVEIPLDSKPVSSWPAYFSIVKIERVGKHGKVFLTVPSLSSTAEEKFIKKGEFSGDDSLLDLDPEDTVFYVGGVPSNFKLPTSLNLPGFVGCLELATLNNDVISLYNFKHIYNMDPSTSVPCARDKLAFTQSRAASYFFDGSGYAVVRDITRRGKFGQVTRFDIEVRTPADNGLILLMVNGSMFFRLEMRNGYLHVFYDFGFSGGPVHLEDTLKKAQINDAKYHEISIIYHNDKKMILVVDRRHVKSMDNEKMKIPFTDIYIGGAPPEILQSRALRAHLPLDINFRGCMKGFQFQKKDFNLLEQTETLGVGYGCPEDSLISRRAYFNGQSFIASIQKISFFDGFEGGFNFRTLQPNGLLFYYASGSDVFSISLDNGTVIMDVKGIKVQSVDKQYNDGLSHFVISSVSPTRYELIVDKSRVGSKNPTKGKIEQTQASEKKFYFGGSPISAQYANFTGCISNAYFTRVDRDVEVEDFQRYTEKVHTSLYECPIESSPLFLLHKKGKNLSKPKASQNKKGGKSKDAPSWDPVALKLPERNTPRNSHCHLSNSPRAIEHAYQYGGTANSRQEFEHLKGDFGAKSQFSIRLRTRSSHGMIFYVSDQEENDFMTLFLAHGRLVYMFNVGHKKLKIRSQEKYNDGLWHDVIFIRERSSGRLVIDGLRVLEESLPPTEATWKIKGPIYLGGVAPGKAVKNVQINSIYSFSGCLSNLQLNGASITSASQTFSVTPCFEGPMETGTYFSTEGGYVVLDESFNIGLKFEIAFEVRPRSSSGTLVHGHSVNGEYLNVHMKNGQVIVKVNNGIRDFSTSVTPKQSLCDGRWHRITVIRDSNVVQLDVDSEVNHVVGPLNPKPIDHREPVFVGGVPESLLTPRLAPSKPFTGCIRHFVIDGHPVSFSKAALVSGAVSINSCPAA

SEQ ID NO: 11090 - protein, 328 aa, Homo sapiens
MEKSIWLLACLAWVLPTGSFVRTKIDTTENLLNTEVHSSPAQRWSMQVPPEVSAEAGDAAVLPCTFTHPHRHYDGPLTAIWRAGEPYAGPQVFRCAAARGSELCQTALSLHGRFRLLGNPRRNDLSLRVERLALADDRRYFCRVEFAGDVHDRYESRHGVRLHVTAAPRIVNISVLPSPAHAFRALCTAEGEPPPALAWSGPALGNSLAAVRSPREGHGHLVTAELPALTHDGRYTCTAANSLGRSEASVYLFRFHGASGASTVALLLGALGFKALLLLGVLAARAARRRPEHLDTPDTPPRSQAQESNYENLSQMNPRSPPATMCSP

SEQ ID NO: 11091 - protein, 4599 aa, Homo sapiens
MSEFLLALLTLSGLLPIARVLTVGADRDQQLCDPGEFLCHDHVTCVSQSWLCDGDPDCPDDSDESLDTCPEEVEIKCPLNHIACLGTNKCVHLSQLCNGVLDCPDGYDEGVHCQELLSNCQQLNCQYKCTMVRNSTRCYCEDGFEITEDGRSCKDQDECAVYGTCSQTCRNTHGSYTCSCVEGYLMQPDNRSCKAKIEPTDRPPILLIANFETIEVFYLNGSKMATLSSVNGNEIHTLDFIYNEDMICWIESRESSNQLKCIQITKAGGLTDEWTINILQSFHNVQQMAIDWLTRNLYFVDHVGDRIFVCNSNGSVCVTLIDLELHNPKAIAVDPIAGKLFFTDYGNVAKVERCDMDGMNRTRIIDSKTEQPAALALDLVNKLVYWVDLYLDYVGVVDYQGKNRHTVIQGRQVRHLYGITVFEDYLYATNSDNYNIVRINRFNGTDIHSLIKIENAWGIRIYQKRTQPTVRSHACEVDPYGMPGGCSHICLLSSSYKTRTCRCRTGFNLGSDGRSCKRPKNELFLFYGKGRPGIVRGMDLNTKIADEYMIPIENLVNPRALDFHAETNYIYFADTTSFLIGRQKIDGTERETILKDDLDNVEGIAVDWIGNNLYWTNDGHRKTINVARLEKASQSRKTLLEGEMSHPRGIVVDPVNGWMYWTDWEEDEIDDSVGRIEKAWMDGFNRQIFVTSKMLWPNGLTLDFHTNTLYWCDAYYDHIEKVFLNGTHRKIVYSGRELNHPFGLSHHGNYVFWTDYMNGSIFQLDLITSEVTLLRHERPPLFGLQIYDPRKQQGDNMCRVNNGGCSTLCLAIPGGRVCACADNQLLDENGTTCTFNPGEALPHICKAGEFRCKNRHCIQARWKCDGDDDCLDGSDEDSVNCFNHSCPDDQFKCQNNRCIPKRWLCDGANDCGSNEDESNQTCTARTCQVDQFSCGNGRCIPRAWLCDREDDCGDQTDEMASCEFPTCEPLTQFVCKSGRCISSKWHCDSDDDCGDGSDEVGCVHSCFDNQFRCSSGRCIPGHWACDGDNDCGDFSDEAQINCTKEEIHSPAGCNGNEFQCHPDGNCVPDLWRCDGEKDCEDGSDEKGCNGTIRLCDHKTKFSCWSTGRCINKAWVCDGDIDCEDQSDEDDCDSFLCGPPKHPCANDTSVCLQPEKLCNGKKDCPDGSDEGYLCDECSLNNGGCSNHCSVVPGRGIVCSCPEGLQLNKDNKTCEIVDYCSNHLKCSQVCEQHKHTVKCSCYEGWKLDVDGESCTSVDPFEAFIIFSIRHEIRRIDLHKRDYSLLVPGLRNTIALDFHFNQSLLYWTDVVEDRIYRGKLSESGGVSAIEVVVEHGLATPEGLTVDWIAGNIYWIDSNLDQIEVAKLDGSLRTTLIAGAMEHPRAIALDPRYGILFWTDWDANFPRIESASMSGAGRKTIYKDMKTGAWPNGLTVDHFEKRIVWTDARSDAIYSALYDGTNMIEIIRGHEYLSHPFAVSLYGSEVYWTDWRTNTLSKANKWTGQNVSVIQKTSAQPFDLQIYHPSRQPQAPNPCAANDGKGPCSHMCLINHNRSAACACPHLMKLSSDKKTCYEMKKFLLYARRSEIRGVDIDNPYFNFITAFTVPDIDDVTVIDFDASEERLYWTDIKTQTIKRAFINGTGLETVISRDIQSIRGLAVDWVSRNLYWISSEFDETQINVARLDGSLKTSIIHGIDKPQCLAAHPVRGKLYWTDGNTINMANMDGSNSKILFQNQKEPVGLSIDYVENKLYWISSGNGTINRCNLDGGNLEVIESMKEELTKATALTIMDKKLWWADQNLAQLGTCSKRDGRNPTILRNKTSGVVHMKVYDKEAQQGSNSCQLNNGGCSQLCLPTSETTRTCMCTVGYYLQKNRMSCQGIESFLMYSVHEGIRGIPLEPSDKMDALMPISGTSFAVGIDFHAENDTIYWTDMGFNKISRAKRDQTWKEDIITNGLGRVEGIAVDWIAGNIYWTDHGFNLIEVARLNGSFRYVIISQGLDQPRSIAVHPEKGLLFWTEWGQMPCIGKARLDGSEKVVLVSMGIAWPNGISIDYEENKLYWCDARTDKIERIDLETGGNREMVLSGSNVDMFSVAVFGAYIYWSDRAHANGSVRRGHKNDATETITMRTGLGVNLKEVKIFNRVREKGTNVCARDNGGCKQLCLYRGNSRRTCACAHGYLAEDGVTCLRHEGYLLYSGRTILKSIHLSDETNLNSPIRPYENPRYFKNVIALAFDYNQRRKGTNRIFYSDAHFGNIQLIKDNWEDRQVIVENVGSVEGLAYHRAWDTLYWTSSTTSSITRHTVDQTRPGAFDREAVITMSEDDHPHVLALDECQNLMFWTNWNEQHPSIMRSTLTGKNAQVVVSTDILTPNGLTIDYRAEKLYFSDGSLGKIERCEYDGSQRHVIVKSGPGTFLSLAVYDNYIFWSDWGRRAILRSNKYTGGDTKILRSDIPHQPMGIIAVANDTNSCELSPCALLNGGCHDLCLLTPNGRVNCSCRGDRILLEDNRCVTKNSSCNAYSEFECGNGECIDYQLTCDGIPHCKDKSDEKLLYCENRSCRRGFKPCYNRRCIPHGKLCDGENDCGDNSDELDCKVSTCATVEFRCADGTCIPRSARCNQNIDCADASDEKNCNNTDCTHFYKLGVKTTGFIRCNSTSLCVLPTWICDGSNDCGDYSDELKCPVQNKHKCEENYFSCPSGRCILNTWICDGQKDCEDGRDEFHCDSSCSWNQFACSAQKCISKHWICDGEDDCGDGLDESDSICGAITCAADMFSCQGSRACVPRHWLCDGERDCPDGSDELSTAGCAPNNTCDENAFMCHNKVCIPKQFVCDHDDDCGDGSDESPQCGYRQCGTEEFSCADGRCLLNTQWQCDGDFDCPDHSDEAPLNPKCKSAEQSCNSSFFMCKNGRCIPSGGLCDNKDDCGDGSDERNCHINECLSKKVSGCSQDCQDLPVSYKCKCWPGFQLKDDGKTCVDIDECSSGFPCSQQCINTYGTYKCLCTDGYEIQPDNPNGCKSLSDEEPFLILADHHEIRKISTDGSNYTLLKQGLNNVIAIDFDYREEFIYWIDSSRPNGSRINRMCLNGSDIKVVHNTAVPNALAVDWIGKNLYWSDTEKRIIEVSKLNGLYPTILVSKRLKFPRDLSLDPQAGYLYWIDCCEYPHIGRVGMDGTNQSVVIETKISRPMALTIDYVNRRLYWADENHIEFSNMDGSHRHKVPNQDIPGVIALTLFEDYIYWTDGKTKSLSRAHKTSGADRLSLIYSWHAITDIQVYHSYRQPDVSKHLCMINNGGCSHLCLLAPGKTHTCACPTNFYLAADNRTCLSNCTASQFRCKTDKCIPFWWKCDTVDDCGDGSDEPDDCPEFRCQPGRFQCGTGLCALPAFICDGENDCGDNSDELNCDTHVCLSGQFKCTKNQKCIPVNLRCNGQDDCGDEEDERDCPENSCSPDYFQCKTTKHCISKLWVCDEDPDCADASDEANCDKKTCGPHEFQCKNNNCIPDHWRCDSQNDCSDNSDEENCKPQTCTLKDFLCANGDCVSSRFWCDGDFDCADGSDERNCETSCSKDQFRCSNGQCIPAKWKCDGHEDCKYGEDEKSCEPASPTCSSREYICASDGCISASLKCNGEYDCADGSDEMDCVTECKEDQFRCKNKAHCIPIRWLCDGIHDCVDGSDEENCERGGNICRADEFLCNNSLCKLHFWVCDGEDDCGDNSDEAPDMCVKFLCPSTRPHRCRNNRICLQSEQMCNGIDECGDNSDEDHCGGKLTYKARPCKKDEFACSNKKCIPMDLQCDRLDDCGDGSDEQGCRIAPTEYTCEDNVNPCGDDAYCNQIKTSVFCRCKPGFQRNMKNRQCEDLNECLVFGTCSHQCINVEGSYKCVCDQNFQERNNTCIAEGSEDQVLYIANDTDILGFIYPFNYSGDHQQISHIEHNSRITGMDVYYQRDMIIWSTQFNPGGIFYKRIHGREKRQANSGLICPEFKRPRDIAVDWVAGNIYWTDHSRMHWFSYYTTHWTSLRYSINVGQLNGPNCTRLLTNMAGEPYAIAVNPKRGMMYWTVVGDHSHIEEAAMDGTLRRILVQKNLQRPTGLAVDYFSERIYWADFELSIIGSVLYDGSNSVVSVSSKQGLLHPHRIDIFEDYIYGAGPKNGVFRVQKFGHGSVEYLALNIDKTKGVLISHRYKQLDLPNPCLDLACEFLCLLNPSGATCVCPEGKYLINGTCNDDSLLDDSCKLTCENGGRCILNEKGDLRCHCWPSYSGERCEVNHCSNYCQNGGTCVPSVLGRPTCSCALGFTGPNCGKTVCEDFCQNGGTCIVTAGNQPYCHCQPEYTGDRCQYYVCHHYCVNSESCTIGDDGSVECVCPTRYEGPKCEVDKCVRCHGGHCIINKDSEDIFCNCTNGKIASSCQLCDGYCYNGGTCQLDPETNVPVCLCSTNWSGTQCERPAPKSSKSDHISTRSIAIIVPLVLLVTLITTLVIGLVLCKRKRRTKTIRRQPIINGGINVEIGNPSYNMYEVDHDHNDGGLLDPGFMIDPTKARYIGGGPSAFKLPHTAPPIYLNSDLKGPLTAGPTNYSNPVYAKLYMDGQNCRNSLGSVDERKELLPKKIEIGIRETVA

SEQ ID NO: 11092 - protein, 3969 aa, Homo sapiens
MAHSCRWRFPARPGTTGGGGGGGRRGLGGAPRQRVPALLLPPGPPVGGGGPGAPPSPPAVAAAAAAAGSSGAGVPGGAAAASAASSSSASSSSSSSSSASSGPALLRVGPGFDAALQVSAAIGTNLRRFRAVFGESGGGGGSGEDEQFLGFGSDEEVRVRSPTRSPSVKTSPRKPRGRPRSGSDRNSAILSDPSVFSPLNKSETKSGDKIKKKDSKSIEKKRGRPPTFPGVKIKITHGKDISELPKGNKEDSLKKIKRTPSATFQQATKIKKLRAGKLSPLKSKFKTGKLQIGRKGVQIVRRRGRPPSTERIKTPSGLLINSELEKPQKVRKDKEGTPPLTKEDKTVVRQSPRRIKPVRIIPSSKRTDATIAKQLLQRAKKGAQKKIEKEAAQLQGRKVKTQVKNIRQFIMPVVSAISSRIIKTPRRFIEDEDYDPPIKIARLESTPNSRFSAPSCGSSEKSSAASQHSSQMSSDSSRSSSPSVDTSTDSQASEEIQVLPEERSDTPEVHPPLPISQSPENESNDRRSRRYSVSERSFGSRTTKKLSTLQSAPQQQTSSSPPPPLLTPPPPLQPASSISDHTPWLMPPTIPLASPFLPASTAPMQGKRKSILREPTFRWTSLKHSRSEPQYFSSAKYAKEGLIRKPIFDNFRPPPLTPEDVGFASGFSASGTAASARLFSPLHSGTRFDMHKRSPLLRAPRFTPSEAHSRIFESVTLPSNRTSAGTSSSGVSNRKRKRKVFSPIRSEPRSPSHSMRTRSGRLSSSELSPLTPPSSVSSSLSISVSPLATSALNPTFTFPSHSLTQSGESAEKNQRPRKQTSAPAEPFSSSSPTPLFPWFTPGSQTERGRNKDKAPEELSKDRDADKSVEKDKSRERDREREKENKRESRKEKRKKGSEIQSSSALYPVGRVSKEKVVGEDVATSSSAKKATGRKKSSSHDSGTDITSVTLGDTTAVKTKILIKKGRGNLEKTNLDLGPTAPSLEKEKTLCLSTPSSSTVKHSTSSIGSMLAQADKLPMTDKRVASLLKKAKAQLCKIEKSKSLKQTDQPKAQGQESDSSETSVRGPRIKHVCRRAAVALGRKRAVFPDDMPTLSALPWEEREKILSSMGNDDKSSIAGSEDAEPLAPPIKPIKPVTRNKAPQEPPVKKGRRSRRCGQCPGCQVPEDCGVCTNCLDKPKFGGRNIKKQCCKMRKCQNLQWMPSKAYLQKQAKAVKKKEKKSKTSEKKDSKESSVVKNVVDSSQKPTPSAREDPAPKKSSSEPPPRKPVEEKSEEGNVSAPGPESKQATTPASRKSSKQVSQPALVIPPQPPTTGPPRKEVPKTTPSEPKKKQPPPPESGPEQSKQKKVAPRPSIPVKQKPKEKEKPPPVNKQENAGTLNILSTLSNGNSSKQKIPADGVHRIRVDFKEDCEAENVWEMGGLGILTSVPITPRVVCFLCASSGHVEFVYCQVCCEPFHKFCLEENERPLEDQLENWCCRRCKFCHVCGRQHQATKQLLECNKCRNSYHPECLGPNYPTKPTKKKKVWICTKCVRCKSCGSTTPGKGWDAQWSHDFSLCHDCAKLFAKGNFCPLCDKCYDDDDYESKMMQCGKCDRWVHSKCENLSDEMYEILSNLPESVAYTCVNCTERHPAEWRLALEKELQISLKQVLTALLNSRTTSHLLRYRQAAKPPDLNPETEESIPSRSSPEGPDPPVLTEVSKQDDQQPLDLEGVKRKMDQGNYTSVLEFSDDIVKIIQAAINSDGGQPEIKKANSMVKSFFIRQMERVFPWFSVKKSRFWEPNKVSSNSGMLPNAVLPPSLDHNYAQWQEREENSHTEQPPLMKKIIPAPKPKGPGEPDSPTPLHPPTPPILSTDRSREDSPELNPPPGIEDNRQCALCLTYGDDSANDAGRLLYIGQNEWTHVNCALWSAEVFEDDDGSLKNVHMAVIRGKQLRCEFCQKPGATVGCCLTSCTSNYHFMCSRAKNCVFLDDKKVYCQRHRDLIKGEVVPENGFEVFRRVFVDFEGISLRRKFLNGLEPENIHMMIGSMTIDCLGILNDLSDCEDKLFPIGYQCSRVYWSTTDARKRCVYTCKIVECRPPVVEPDINSTVEHDENRTIAHSPTSFTESSSKESQNTAEIISPPSPDRPPHSQTSGSCYYHVISKVPRIRTPSYSPTQRSPGCRPLPSAGSPTPTTHEIVTVGDPLLSSGLRSIGSRRHSTSSLSPQRSKLRIMSPMRTGNTYSRNNVSSVSTTGTATDLESSAKVVDHVLGPLNSSTSLGQNTSTSSNLQRTVVTVGNKNSHLDGSSSSEMKQSSASDLVSKSSSLKGEKTKVLSSKSSEGSAHNVAYPGIPKLAPQVHNTTSRELNVSKIGSFAEPSSVSFSSKEALSFPHLHLRGQRNDRDQHTDSTQSANSSPDEDTEVKTLKLSGMSNRSSIINEHMGSSSRDRRQKGKKSCKETFKEKHSSKSFLEPGQVTTGEEGNLKPEFMDEVLTPEYMGQRPCNNVSSDKIGDKGLSMPGVPKAPPMQVEGSAKELQAPRKRTVKVTLTPLKMENESQSKNALKESSPASPLQIESTSPTEPISASENPGDGPVAQPSPNNTSCQDSQSNNYQNLPVQDRNLMLPDGPKPQEDGSFKRRYPRRSARARSNMFFGLTPLYGVRSYGEEDIPFYSSSTGKKRGKRSAEGQVDGADDLSTSDEDDLYYYNFTRTVISSGGEERLASHNLFREEEQCDLPKISQLDGVDDGTESDTSVTATTRKSSQIPKRNGKENGTENLKIDRPEDAGEKEHVTKSSVGHKNEPKMDNCHSVSRVKTQGQDSLEAQLSSLESSRRVHTSTPSDKNLLDTYNTELLKSDSDNNNSDDCGNILPSDIMDFVLKNTPSMQALGESPESSSSELLNLGEGLGLDSNREKDMGLFEVFSQQLPTTEPVDSSVSSSISAEEQFELPLELPSDLSVLTTRSPTVPSQNPSRLAVISDSGEKRVTITEKSVASSESDPALLSPGVDPTPEGHMTPDHFIQGHMDADHISSPPCGSVEQGHGNNQDLTRNSSTPGLQVPVSPTVPIQNQKYVPNSTDSPGPSQISNAAVQTTPPHLKPATEKLIVVNQNMQPLYVLQTLPNGVTQKIQLTSSVSSTPSVMETNTSVLGPMGGGLTLTTGLNPSLPTSQSLFPSASKGLLPMSHHQHLHSFPAATQSSFPPNISNPPSGLLIGVQPPPDPQLLVSESSQRTDLSTTVATPSSGLKKRPISRLQTRKNKKLAPSSTPSNIAPSDVVSNMTLINFTPSQLPNHPSLLDLGSLNTSSHRTVPNIIKRSKSSIMYFEPAPLLPQSVGGTAATAAGTSTISQDTSHLTSGSVSGLASSSSVLNVVSMQTTTTPTSSASVPGHVTLTNPRLLGTPDIGSISNLLIKASQQSLGIQDQPVALPPSSGMFPQLGTSQTPSTAAITAASSICVLPSTQTTGITAASPSGEADEHYQLQHVNQLLASKTGIHSSQRDLDSASGPQVSNFTQTVDAPNSMGLEQNKALSSAVQASPTSPGGSPSSPSSGQRSASPSVPGPTKPKPKTKRFQLPLDKGNGKKHKVSHLRTSSSEAHIPDQETTSLTSGTGTPGAEAEQQDTASVEQSSQKECGQPAGQVAVLPEVQVTQNPANEQESAEPKTVEEEESNFSSPLMLWLQQEQKRKESITEKKPKKGLVFEISSDDGFQICAESIEDAWKSLTDKVQEARSNARLKQLSFAGVNGLRMLGILHDAVVFLIEQLSGAKHCRNYKFRFHKPEEANEPPLNPHGSARAEVHLRKSAFDMFNFLASKHRQPPEYNPNDEEEEEVQLKSARRATSMDLPMPMRFRHLKKTSKEAVGVYRSPIHGRGLFCKRNIDAGEMVIEYAGNVIRSIQTDKREKYYDSKGIGCYMFRIDDSEVVDATMHGNAARFINHSCEPNCYSRVINIDGQKHIVIFAMRKIYRGEELTYDYKFPIEDASNKLPCNCGAKKCRKFLN

SEQ ID NO: 11093 - protein, 2000 aa, Homo sapiens
MFRNSLKMLLTGGKSSRKNRSSDGGSEEPPDRRQSSVDSRQSRSGQGGISTESDCAFEPDYAVPPLPVSEGDAEQELGPPPSVDEAANTLMTRLGFLLGEKVTEVQPGDQYSMEVQDENQTSAITQRISPCSTLTSSTASPPASSPCSTLPPISTNATAKDCSYGAVTSPTSTLESRDSGIIATLTSYSENVERTKYAGESSKELGSGGNIKPWQSQKSSMDSCLYRVDENMTASTYSLNKIPERNLETVLSQSVQSIPLYLMPRPNSVAATSSAHLEDLAYLDEQRHTPLRTSLRMPRQSMGGARTQQDLRVRFAPYRPPDISLKPLLFEVPSITTESVFVGRDWVFHEIDAQLQSSNASVNQGVVIVGNIGFGKTAIISRLVALSCHGTRMRQIASDSPHASPKHVDANRELPLTQPPSAHSSITSGSCPGTPEMRRRQEEAMRRLASQVVAYHYCQADNAYTCLVPEFVHNVAALLCRSPQLTAYREQLLREPHLQSMLSLRSCVQDPMASFRRGVLEPLENLHKERKIPDEDFIILIDGLNEAEFHKPDYGDTIVSFLSKMIGKFPSWLKLIVTVRTSLQEITKLLPFHRIFLDRLEENEAIDQDLQAYILHRIHSSSEIQNNISLNGKMDNTTFGKLSSHLKTLSQGSYLYLKLTFDLIEKGYLVLKSSSYKVVPVSLSEVYLLQCNMKFPTQSSFDRVMPLLNVAVASLHPLTDEHIFQAINAGSIEGTLEWEDFQQRMENLSMFLIKRRDMTRMFVHPSFREWLIWREEGEKTKFLCDPRSGHTLLAFWFSRQEGKLNRQQTIELGHHILKAHIFKGLSKKVGVSSSILQGLWISYSTEGLSMALASLRNLYTPNIKVSRLLILGGANINYRTEVLNNAPILCVQSHLGYTEMVALLLEFGANVDASSESGLTPLGYAAAAGYLSIVVLLCKKRAKVDHLDKNGQCALVHAALRGHLEVVKFLIQCDWTMAGQQQGVFKKSHAIQQALIAAASMGYTEIVSYLLDLPEKDEEEVERAQINSFDSLWGETALTAAAGRGKLEVCRLLLEQGAAVAQPNRRGAVPLFSTVRQGHWQIVDLLLTHGADVNMADKQGRTPLMMAASEGHLGTVDFLLAQGASIALMDKEGLTALSWACLKGHLSVVRSLVDNGAATDHADKNGRTPLDLAAFYGDAEVVQFLVDHGAMIEHVDYSGMRPLDRAVGCRNTSVVVTLLKKGAKIGCQTLPSRPRGPATWAMATSKPDIMIILLSKLMEEGDMFYKKGKVKEAAQRYQYALKKFPREGFGEDLKTFRELKVSLLLNLSRCRRKMNDFGMAEEFATKALELKPKSYEAYYARARAKRSSRQFAAALEDLNEAIKLCPNNREIQRLLLRVEEECRQMQQPQQPPPPPQPQQQLPEEAEPEPQHEDIYSVQDIFEEEYLEQDVENVSIGLQTEARPSQGLPVIQSPPSSPPHRDSAYISSSPLGSHQVFDFRSSSSVGSPTRQTYQSTSPALSPTHQNSHYRPSPPHTSPAHQGGSYRFSPPPVGGQGKEYPSPPPSPLRRGPQYRASPPAESMSVYRSQSGSPVRYQQETSVSQLPGRPKSPLSKMAQRPYQMPQLPVAVPQQGLRLQPAKAQIVRSNQPSPAVHSSTVIPTGAYGQVAHSMASKYQSSQGDIGVSQSRLVYQGSIGGIVGDGRPVQHVQASLSAGAICQHGGLTKEDLPQRPSSAYRGGVRYSQTPQIGRSQSASYYPVCHSKLDLERSSSQLGSPDVSHLIRRPISVNPNEIKPHPPTPRPLLHSQSVGLRFSPSSNSISSTSNLTPTFRPSSSIQQMEIPLKPAYERSCDELSPVSPTQGGYPSEPTRSRTTPFMGIIDKTARTQQYPHLHQQNRTWAVSSVDTVLSPTSPGNLPQPESFSPPSSISNIAFYNKTNNAQNGHLLEDDYYSPHGMLANGSRGDLLERVSQASSYPDVKVARTLPVAQAYQDNLYRQLSRDSRQGQTSPIKPKRPFVESNV

SEQ ID NO: 11094 - protein, 2193 aa, Homo sapiens
MARGARPSAAGGGGGGAEPPERAGPGRPRGSPPGRARPSLAPRPGPEPSRPRAAPETSGGDTAGAGRCGGRRAAKLGPGRRGWWALLALQLHLLRALAQDDVAPYFKTEPGLPQIHLEGNRLVLTCLAEGSWPLEFKWMRDDSELTTYSSEYKYIIPSLQKLDAGFYRCVVRNRMGALLQRKSEVQVAYMGSFMDTDQRKTVSQGRAAILNLLPITSYPRPQVTWFREGHKIIPSNRIAITLENQLVILATTTSDAGAYYVQAVNEKNGENKTSPFIHLSIARDVGTPETMAPTIVVPPGNRSVVAGSSETTLECIASARPVEDLSVTWKRNGVRITSGLHSFGRRLTISNPTSADTGPYVCEAALPGSAFEPARATAFLFIIEPPYFTAEPESRISAEVEETVDIGCQAMGVPLPTLQWYKDAISISRLQNPRYKVLASGGLRIQKLRPEDSGIFQCFASNEGGEIQTHTYLDVTNIAPVFTQRPVDTTVTDGMTAILRCEVSGAPKPAITWKRENHILASGSVRIPRFMLLESGGLQIAPVFIQDAGNYTCYAANTEGSLNASATLTVWNRTSIVHPPEDHVVIKGTTATLHCGATHDPRVSLRYVWKKDNVALTPSSTSRIVVEKDGSLLISQTWSGDIGDYSCEIVSEGGNDSRMARLEVIELPHSPQNLLVSPNSSHSHAVVLSWVRPFDGNSPILYYIVELSENNSPWKVHLSNVGPEMTGVTVSGLTPARTYQFRVCAVNEVGRGQYSAETSRLMLPEEPPSAPPKNIVASGRTNQSIMVQWQPPPETEHNGVLRGYILRYRLAGLPGEYQQRNITSPEVNYCLVTDLIIWTQYEIQVAAYNGAGLGVFSRAVTEYTLQGVPTAPPQNVQTEAVNSTTIQFLWNPPPQQFINGINQGYKLLAWPADAPEAVTVVTIAPDFHGVHHGHITNLKKFTAYFTSVLCFTTPGDGPPSTPQLVWTQEDKPGAVGHLSFTEILDTSLKVSWQEPLEKNGIITGYQISWEVYGRNDSRLTHTLNSTTHEYKIQGLSSLTTYTIDVAAVTAVGTGLVTSSTISSGVPPDLPGAPSNLVISNISPRSATLQFRPGYDGKTSISRWIVEGQVGAIGDEEEWVTLYEEENEPDAQMLEIPNLTPYTHYRFRMKQVNIVGPSPYSPSSRVIQTLQAPPDVAPTSVTVRTASETSLRLRWVPLPDSQYNGNPESVGYRIKYWRSDLQSSAVAQVVSDRLEREFTIEELEEWMEYELQMQAFNAVGAGPWSEVVRGRTRESVPSAAPENVSAEAVSSTQILLTWTSVPEQDQNGLILGYKILFRAKDLDPEPRSHIVRGNHTQSALLAGLRKFVLYELQVLAFTRIGNGVPSTPLILERTKDDAPGPPVRLVFPEVRLTSVRIVWQPPEEPNGIILGYQIAYRLASSSPHTFTTVEVGATVRQFTATDLAPESAYIFRLSAKTRQGWGEPLEATVITTEKRERPAPPRELLVPQAEVTARSLRLQWVPGSDGASPIRYFTMQVRELPRGEWQTYSSSISHEATACVVDRLRPFTSYKLRLKATNDIGDSDFSSETEAVTTLQDVPGEPPGSVSATPHTTSSVLIQWQPPRDESLNGLLQGYRIYYRELEYEAGSGTEAKTLKNPIALHAELTDLKKYRRYEVIMTAYNIIGESPASAPVEVFVGEAAPAMAPQNVQVTPLTASQLEVTWDPPPPESQNGNIQGYKIYYWEADSQNETEKMKVLFLPEPVVRLKNLTSHTKYLVSISAFNAAGDGPKSDPQQGRTHQAAPGAPSFLAFSEITSTTLNVSWGEPAAANGILQGYRVVYEPLAPVQGVSKVVTVEVRGNWQRWLKVRDLTKGVTYFFRVQARTITYGPELQANITAGPAEGSPGSPRDVLVTKSASELTLQWTEGHSGDTPTTGYVIEARPSDEGLWDMFVKDIPRSATSYTLSLDKLRQGVTYEFRVVAVNEAGYGEPSNPSTAVSAQVEAPFYEEWWFLLVMALSSLIVILLVVFALVLHGQNKKYKNCSTGKGISTMEESVTLDNGGFAALELSSRHLNVKSTFSKKNGTRSPPRPSPGGLHYSDEDICNKYNGAVLTESVSLKEKSADASESEATDSDYEDALPKHSFVNHYMSDPTYYNSWKRRAQGRAPAPHRYEAVAGSEAGAQLHPVITTQSAGGVYTPAGPGARTPLTGFSSFV

SEQ ID NO: 11095 - protein, 1602 aa, Homo sapiens
MVDASGRAAAEGWRKMEAPPDGAADLVPLDRYDAARAKIAANLQWICAKAYGRDNIPEDLRDPFYVDQYEQEHIKPPVIKLLLSSELYCRVCSLILKGDQVAALQGHQSVIQALSRKGIYVMESDDTPVTESDLSRAPIKMSAHMAMVDALMMAYTVEMISIEKVVASVKRFSTFSASKELPYDLEDAMVFWINKVNLKMREITEKEVKLKQQLLESPAHQKVRYRREHLSARQSPYFPLLEDLMRDGSDGAALLAVIHYYCPEQMKLDDICLKEVTSMADSLYNIRLLREFSNEYLNKCFYLTLEDMLYAPLVLKPNVMVFIAELFWWFENVKPDFVQPRDVQELKDAKTVLHQKSSRPPVPISNATKRSFLGSPAAGTLAELQPPVQLPAEGCHRHYLHPEEPEYLGKGTAAFSPSHPLLPLRQKQQKSIQGEDIPDQRHRSNSLTRVDGQPRGAAIAWPEKKTRPASQPTPFALHHAASCEVDPSSGDSISLARSISKDSLASNIVNLTPQNQPHPTATKSHGKSLLSNVSIEDEEEELVAIVRADVVPQQADPEFPRASPRALGLTANARSPQGQLDTSESKPDSFFLEPLMPAVLKPAKEKQVITKEDERGEGRPRSIVSRRPSEGPQPLVRRKMTGSRDLNRTFTPIPCSEFPMGIDPTETGPLSVETAGEVCGGPLALGGFDPFPQGPSTDGFFLHVGRADEDTEGRLYVSCSKSPNSHDSEPWTLLRQDSDSDVVDIEEAEHDFMGEAHPVVFSRYIGEEESAKLQEDMKVKEHEDKDDASGRSSPCLSTASQMSSVSMASGSVKMTSFAERKLQRLNSCETKSSTSSSQKTTPDASESCPAPLTTWRQKREQSPSQHGKDPASLLASELVQLHMQLEEKRRAIEAQKKKMEALSARQRLKLGKAAFLHVVKKGKAEAAPPLRPEHFAKEYSQHNGEDCGDAVSKTEDFLVKEEQREELLHEPQDVDKESLAFAQQHKAKDPVALHELERNKVISAALLEDTVGEVVDVNECDLSIEKLNETISTLQQAILKISQQQEQLLMKSPTVPVPGSKNNSQDHKVKAPVHFVEPLSPTGVAGHRKAPRLGQGRNSRSGRPAELKVPKDRPQGSSRSKTPTPSVETLPHLRPFPASSHPRTPTDPGLDSALEPSGDPHGKCLFDSYRLHDESNQRTLTLSSSKDANILSEQMSLKEVLDASVKEVGSSSSDVSGKESVPVEEPLRSRASLIEVDLSDLKAPDEDGELVSLDGSADLVSEGDQKPGVGFFFKDEQKAEDELAKKRAAFLLKQQRKAEEARVRKQQLEAEVELKRDEARRKAEEDRVRKEEEKARRELIKQEYLRRKQQQILEEQGLGKPKSKPKKPRPKSVHREESCSDSGTKCSSTPDNLSRTQSGSSLSLASAATTEPESVHSGGTPSQRVESMEALPILSRNPSRSTDRDWETASAASSLASVAEYTGPKLFKEPSSKSNKPIIHNAISHCCLAGKVNEPHKNSILEELEKCDANHYIILFRDAGCQFRALYCYYPDTEEIYKLTGTGPKNITKKMIDKLYKYSSDRKQFNLIPAKTMSVSVDALTIHNHLWQPKRPAVPKKAQTRK

SEQ ID NO: 11096 - protein, 924 aa, Homo sapiens
MALPQGSLTFRDVAVEFSQEEWKCLDPVQKALYRDVMLENYRNLGFLGLCLPDLNIISMLEQGKEPWTVVSQVKIARNPNCGECMKGVITGISPKCVIKELPPIQNSNTGEKFQAVMLEGHESYDTENFYFREIRKNLQEVDFQWKDGEINYKEGPMTHKNNLTGQRVRHSQGDVENKHMENQLILRFQSGLGELQKFQTAEKIYGCNQIERTVNNCFLASPLQRIFPGVQTNISRKYGNDFLQLSLPTQDEKTHIREKPYIGNECGKAFRVSSSLINHQMIHTTEKPYRCNESGKAFHRGSLLTVHQIVHTRGKPYQCDVCGRIFRQNSDLVNHRRSHTGDKPYICNECGKSFSKSSHLAVHQRIHTGEKPYKCNRCGKCFSQSSSLATHQTVHTGDKPYKCNECGKTFKRNSSLTAHHIIHAGKKPYTCDVCGKVFYQNSQLVRHQIIHTGETPYKCNECGKVFFQRSRLAGHRRIHTGEKPYKCNECGKVFSQHSHLAVHQRVHTGEKPYKCNECGKAFNWGSLLTVHQRIHTGEKPYKCNVCGKVFNYGGYLSVHMRCHTGEKPLHCNKCGMVFTYYSCLARHQRMHTGEKPYKCNVCGKVFIDSGNLSIHRRSHTGEKPFQCNECGKVFSYYSCLARHRKIHTGEKPYKCNDCGKAYTQRSSLTKHLVIHTGENPYHCNEFGEAFIQSSKLARYHRNPTGEKPHKCSECGRTFSHKTSLVYHQRRHTGEMPYKCIECGKVFNSTTTLARHRRIHTGEKPYKCNECGKVFRYRSGLARHWSIHTGEKPYKCNECGKAFRVRSILLNHQMMHTGEKPYKCNECGKAFIERSNLVYHQRNHTGEKPYKCMECGKAFGRRSCLTKHQRIHSSEKPYKCNECGKSYISRSGLTKHQIKHAGENLTTKLNVERPLDVVLTSGIPK

SEQ ID NO: 11097 - protein, 784 aa, Homo sapiens
MSDANKAAIAAEKEALNLKLPPIVHLPENIGVDTPTQSKLLKYRRSKEQQQKINQLVIDGAKRNLDRTLGKRTPLLPPPDYPQTMTSEMKKKGFNYIYMKQCVESSPLVPIQQEWLDHMLRLIPESLKEGKEREELLESLINEVSSDFENSMKRYLVQSVLVKPPVKSLEDEGGPLPESPVGLDYSNPWHSSYVQARNQIFSNLHIIHPTMKMLLDLGYTTFADTVLLDFTGIRAKGPIDCESLKTDLSIQTRNAEEKIMNTWYPKVINLFTKKEALEGVKPEKLDAFYSCVSTLMSNQLKDLLRRTVEGFVKLFDPKDQQRLPIFKIELTFDDDKMEFYPTFQDLEDNVLSLVERIAEALQNVQTIPSWLSGTSTPVNLDTELPEHVLHWAVDTLKAAVHRNLEGARKHYETYVEKYNWLLDGTAVENIETFQTEDHTFDEYTEFIEKFLSLASEIMLLPQWIHYTMVRLDCEDLKTGLTNKAKAFANILLNDIASKYRKENECICSEFEAIKEHALKVPETTEEMMDLISYVEKARTVGIEELILRIQESKRQMSYFLDVFLFPQEDLALNATVLMWPRKINPIFDENDELIENAKHKKENELMAKREKLILEIEKESRRMEEFTEFAELERMQQYVTDVRQLQKRIQESEEAVQFINKEEELFKWELTKYPELDKLKVNIEPYQKFFNFVLKWQRSEKRWMDGGFLDLNGESMEADVEEFSREIFKTLKFFQTKLKKELQEKRKAARKRSLEEEKIEEEPKDNATITMCSTVMEQIKAFKV

SEQ ID NO: 11098 - protein, 1185 aa, Homo sapiens
MMCEVMPTISEAEGPPGGGGGHGSGSPSQPDADSHFEQLMVSMLEERDRLLDTLRETQETLALTQGKLHEVGHERDSLQRQLNTALPQEFAALTKELNVCREQLLEREEEIAELKAERNNTRLLLEHLECLVSRHERSLRMTVVKRQAQSPAGVSSEVEVLKALKSLFEHHKALDEKVRERLRVALERCSLLEEELGATHKELMILKEQNNQKKTLTDGVLDINHEQENTPSTSGKRSSDGSLSHEEDLAKVIELQEIISKQSREQSQMKERLASLSSHVTELEEDLDTARKDLIKSEEMNTKLQRDVREAMAQKEDMEERITTLEKRYLAAQREATSVHDLNDKLENEIANKDSMHRQTEDKNRQLQERLELAEQKLQQTLRKAETLPEVEAELAQRVAALSKAEERHGNIEERLRQMEAQLEEKNQELQRARQREKMNEEHNKRLSDTVDKLLSESNERLQLHLKERMAALEDKNSLLREVESAKKQLEETQHDKDQLVLNIEALRAELDHMRLRGASLHHGRPHLGSVPDFRFPMADGHTDSYSTSAVLRRPQKGRLAALRDEPSKVQTLNEQDWERAQQASVLANVAQAFESDADVSDGEDDRDTLLSSVDLLSPSGQADAHTLAMMLQEQLDAINKEIRLIQEEKENTEQRAEEIESRVGSGSLDNLGRFRSMSSIPPYPASSLASSSPPGSGRSTPRRIPHSPAREVDRLGVMTLLPPSREEVRDDKTTIKCETSPPSSPRALRLDRLHKGALHTVSHEDIRDIRNSTGSQDGPVSNPSSSNSSQDSLHKAPKKKGIKSSIGRLFGKKEKGRPGQTGKEALGQAGVSETDNSSQDALGLSKLGGQAEKNRKLQKKHELLEEARRQGLPFAQWDGPTVVVWLELWVGMPAWYVAACRANVKSGAIMSALSDTEIQREIGISNPLHRLKLRLAIQEIMSLTSPSAPPTSRTTLAYGDMNHEWIGNEWLPSLGLPQYRSYFMECLVDARMLDHLTKKDLRGQLKMVDSFHRNSFQCGIMCLRRLNYDRKELERKREESQSEIKDVLVWSNDRVIRWILSIGLKEYANNLIESGVHGALLALDETFDFSALALLLQIPTQNTQARAVLEREFNNLLVMGTDRRFDEDDDKSFRRAPSWRKKFRPKDIRGLAAGSAETLPANFRVTSSMSSPSMQPKKMQMDGM

SEQ ID NO: 11099 - protein, 682 aa, Homo sapiens
MQLEHCLSPSIMLSKKFLNVSSSYPHSGGSELVLHDHPIISTTDNLERSSPLKKITRGMTNQSDTDNFPDSKDSPGDVQRSKLSPVLDGVSELRHSFDGSAADRYLLSQSSQPQSAATAPSAMFPYPGQHGPAHPAFSIGSPSRYMAHHPVITNGAYNSLLSNSSPQGYPTAGYPYPQQYGHSYQGAPFYQFSSTQPGLVPGKAQVYLCNRPLWLKFHRHQTEMIITKQGRRMFPFLSFNISGLDPTAHYNIFVDVILADPNHWRFQGGKWVPCGKADTNVQGNRVYMHPDSPNTGAHWMRQEISFGKLKLTNNKGASNNNGQMVVLQSLHKYQPRLHVVEVNEDGTEDTSQPGRVQTFTFPETQFIAVTAYQNTDITQLKIDHNPFAKGFRDNYDTIYTGCDMDRLTPSPNDSPRSQIVPGARYAMAGSFLQDQFVSNYAKARFHPGAGAGPGPGTDRSVPHTNGLLSPQQAEDPGAPSPQRWFVTPANNRLDFAASAYDTATDFAGNAATLLSYAAAGVKALPLQAAGCTGRPLGYYADPSGWGARSPPQYCGTKSGSVLPCWPNSAAAAARMAGANPYLGEEAEGLAAERSPLPPGAAEDAKPKDLSDSSWIETPSSIKSIDSSDSGIYEQAKRRRISPADTPVSESSSPLKSEVLAQRDCEKNCAKDISGYYGFYSHS

SEQ ID NO: 11100 - protein, 3123 aa, Homo sapiens
MHHGTGPQNVQHQLQRSRACPGSEGEEQPAHPNPPPSPAAPFAPSASPSAPQSPSYQIQQLMNRSPATGQNVNITLQSVGPVVGGNQQITLAPLPLPSPTSPGFQFSAQPRRFEHGSPSYIQVTSPLSQQVQTQSPTQPSPGPGQALQNVRAGAPGPGLGLCSSSPTGGFVDASVLVRQISLSPSSGGHFVFQDGSGLTQIAQGAQVQLQHPGTPITVRERRPSQPHTQSGGTIHHLGPQSPAAAGGAGLQPLASPSHITTANLPPQISSIIQGQLVQQQQVLQGPPLPRPLGFERTPGVLLPGAGGAAGFGMTSPPPPTSPSRTAVPPGLSSLPLTSVGNTGMKKVPKKLEEIPPASPEMAQMRKQCLDYHYQEMQALKEVFKEYLIELFFLQHFQGNMMDFLAFKKKHYAPLQAYLRQNDLDIEEEEEEEEEEEEKSEVINDEQQALAGSLVAGAGSTVETDLFKRQQAMPSTGMAEQSKRPRLEVGHQGVVFQHPGADAGVPLQQLMPTAQGGMPPTPQAAQLAGQRQSQQQYDPSTGPPVQNAASLHTPLPQLPGRLPPAGVPTAALSSALQFAQQPQVVEAQTQLQIPVKTQQPNVPIPAPPSSQLPIPPSQPAQLALHVPTPGKVQVQASQLSSLPQMVASTRLPVDPAPPCPRPLPTSSTSSLAPVSGSGPGPSPARSSPVNRPSSATNKALSPVTSRTPGVVASAPTKPQSPAQNATSSQDSSQDTLTEQITLENQVHQRIAELRKAGLWSQRRLPKLQEAPRPKSHWDYLLEEMQWMATDFAQERRWKVAAAKKLVRTVVRHHEEKQLREERGKKEEQSRLRRIAASTAREIECFWSNIEQVVEIKLRVELEEKRKKALNLQKVSRRGKELRPKGFDALQESSLDSGMSGRKRKASISLTDDEVDDEEETIEEEEANEGVVDHQTELSNLAKEAELPLLDLMKLYEGAFLPSSQWPRPKPDGEDTSGEEDADDCPGDRESRKDLVLIDSLFIMDQFKAAERMNIGKPNAKDIADVTAVAEAILPKGSARVTTSVKFNAPSLLYGALRDYQKIGLDWLAKLYRKNLNGILADEAGLGKTVQIIAFFAHLACNEGNWGPHLVVVRSCNILKWELELKRWCPGLKILSYIGSHRELKAKRQEWAEPNSFHVCITSYTQFFRGLTAFTRVRWKCLVIDEMQRVKGMTERHWEAVFTLQSQQRLLLIDSPLHNTFLELWTMVHFLVPGISRPYLSSPLRAPSEESQDYYHKVVIRLHRVTQPFILRRTKRDVEKQLTKKYEHVLKCRLSNRQKALYEDVILQPGTQEALKSGHFVNVLSILVRLQRICNHPGLVEPRHPGSSYVAGPLEYPSASLILKALERDFWKEADLSMFDLIGLENKITRHEAELLSKKKIPRKLMEEISTSAAPAARPAAAKLKASRLFQPVQYGQKPEGRTVAFPSTHPPRTAAPTTASAAPQGPLRGRPPIATFSANPEAKAAAAPFQTSQASASAPRHQPASASSTAASPAHPAKLRAQTTAQASTPGQPPPQPQAPSHAAGQSALPQRLVLPSQAQARLPSGEVVKIAQLASITGPQSRVAQPETPVTLQFQGSKFTLSHSQLRQLTAGQPLQLQGSVLQIVSAPGQPYLRAPGPVVMQTVSQAGAVHGALGSKPPAGGPSPAPLTPQVGVPGRVAVNALAVGEPGTASKPASPIGGPTQEEKTRLLKERLDQIYLVNERRCSQAPVYGRDLLRICALPSHGRVQWRGSLDGRRGKEAGPAHSYTSSSESPSELMLTLCRCGESLQDVIDRVAFVIPPVVAAPPSLRVPRPPPLYSHRMRILRQGLREHAAPYFQQLRQTTAPRLLQFPELRLVQFDSGKLEALAILLQKLKSEGRRVLILSQMILMLDILEMFLNFHYLTYVRIDENASSEQRQELMRSFNRDRRIFCAILSTHSRTTGINLVEADTVVFYDNDLNPVMDAKAQEWCDRIGRCKDIHIYRLVSGNSIEEKLLKNGTKDLIREVAAQGNDYSMAFLTQRTIQELFEVYSPMDDAGFPVKAEEFVVLSQEPSVTETIAPKIARPFIEALKSIEYLEEDAQKSAQEGVLGPHTDALSSDSENMPCDEEPSQLEELADFMEQLTPIEKYALNYLELFHTSIEQEKERNSEDAVMTAVRAWEFWNLKTLQEREARLRLEQEEAELLTYTREDAYSMEYVYEDVDGQTEVMPLWTPPTPPQDDSDIYLDSVMCLMYEATPIPEAKLPPVYVRKERKRHKTDPSAAGRKKKQRHGEAVVPPRSLFDRATPGLLKIRREGKEQKKNILLKQQVPFAKPLPTFAKPTAEPGQDNPEWLISEDWALLQAVKQLLELPLNLTIVSPAHTPNWDLVSDVVNSCSRIYRSSKQCRNRYENVIIPREEGKSKNNRPLRTSQIYAQDENATHTQLYTSHFDLMKMTAGKRSPPIKPLLGMNPFQKNPKHASVLAESGINYDKPLPPIQVASLRAERIAKEKKALADQQKAQQPAVAQPPPPQPQPPPPPQQPPPPLPQPQAAGSQPPAGPPAVQPQPQPQPQTQPQPVQAPAKAQPAITTGGSAAVLAGTIKTSVTGTSMPTGAVSGNVIVNTIAGVPAATFQSINKRLASPVAPGALTTPGGSAPAQVVHTQPPPRAVGSPATATPDLVSMATTQGVRAVTSVTASAVVTTNLTPVQTPARSLVPQVSQATGVQLPGKTITPAHFQLLRQQQQQQQQQQQQQQQQQQQQQQQQQQQQQTTTTSQVQVPQIQGQAQSPAQIKAVGKLTPEHLIKMQKQKLQMPPQPPPPQAQSAPPQPTAQVQVQTSQPPQQQSPQLTTVTAPRPGALLTGTTVANLQVARLTRVPTSQLQAQGQMQTQAPQPAQVALAKPPVVSVPAAVVSSPGVTTLPMNVAGISVAIGQPQKAAGQTVVAQPVHMQQLLKLKQQAVQQQKAIQPQAAQGPAAVQQKITAQQITTPGAQQKVAYAAQPALKTQFLTTPISQAQKLAGAQQVQTQIQVAKLPQVVQQQTPVASIQQVASASQQASPQTVALTQATAAGQQVQMIPAVTATAQVVQQKLIQQQVVTTASAPLQTPGAPNPAQVPASSDSPSQQPKLQMRVPAVRLKTPTKPPCQ

SEQ ID NO: 11101 - protein, 886 aa, Homo sapiens
MRAEEPCAPGAPSALGAQRTPGPELRLSSQLLPELCTFVVRVLFYLGPVYLAGYLGLSITWLLLGALLWMWWRRNRRGKLGRLAAAFEFLDNEREFISRELRGQHLPAWIHFPDVERVEWANKIISQTWPYLSMIMESKFREKLEPKIREKSIHLRTFTFTKLYFGQKCPRVNGVKAHTNTCNRRRVTVDLQICYIGDCEISVELQKIQAGVNGIQLQGTLRVILEPLLVDKPFVGAVTVFFLQKPHLQINWTGLTNLLDAPGINDVSDSLLEDLIATHLVLPNRVTVPVKKGLDLTNLRFPLPCGVIRVHLLEAEQLAQKDNFLGLRGKSDPYAKVSIGLQHFRSRTIYRNLNPTWNEVFEFMVYEVPGQDLEVDLYDEDTDRDDFLGSLQICLGDVMTNRVVDEWFVLNDTTSGRLHLRLEWLSLLTDQEVLTEDHGGLSTAILVVFLESACNLPRNPFDYLNGEYRAKKLSRFARNKVSKDPSSYVKLSVGKKTHTSKTCPHNKDPVWSQVFSFFVHNVATERLHLKVLDDDQECALGMLEVPLCQILPYADLTLEQRFQLDHSGLDSLISMRLVLRFLQVEERELGSPYTGPEALKKGPLLIKKVATNQGPKAQPQEEGPTDLPCPPDPASDTKDVSRSTTTTTSATTVATEPTSQETGPEPKGKDSAKRFCEPIGEKKSPATIFLTVPGPHSPGPIKSPRPMKCPASPFAWPPKRLAPSMSSLNSLASSCFDLADISLNIEGGDLRRRQLGEIQLTVRYVCLRRCLSVLINGCRNLTPCTSSGADPYVRVYLLPERKWACRKKTSVKRKTLEPLFDETFEFFVPMEEVKKRSLDVAVKNSRPLGSHRRKELGKVLIDLSKEDLIKGFSQWYELTPNGQPRS

SEQ ID NO: 11102 - protein, 664 aa, Homo sapiens
MDSNHQSNYKLSKTEKKFLRKQIKAKHTLLRHEGIETVSYATQSLVVANGGLGNGVSRNQLLPVLEKCGLVDALLMPPNKPYSFARYRTTEESKRAYVTLNGKEVVDDLGQKITLYLNFVEKVQWKELRPQALPPGLMVVEEIISSEEEKMLLESVDWTEDTDNQNSQKSLKHRRVKHFGYEFHYENNNVDKDKPLSGGLPDICESFLEKWLRKGYIKHKPDQMTINQYEPGQGIPAHIDTHSAFEDEIVSLSLGSEIVMDFKHPDGIAVPVMLPRRSLLVMTGESRYLWTHGITCRKFDTVQASESLKSGIITSDVGDLTLSKRGLRTSFTFRKVRQTPCNCSYPLVCDSQRKETPPSFPESDKEASRLEQEYVHQVYEEIAGHFSSTRHTPWPHIVEFLKALPSGSIVADIGCGNGKYLGINKELYMIGCDRSQNLVDICRERQFQAFVCDALAVPVRSGSCDACISIAVIHHFATAERRVAALQEIVRLLRPGGKALIYVWAMEQEYNKQKSKYLRGNRNSQGKKEEMNSDTSVQRSLVEQMRDMGSRDSASSVPRINDSQEGGCNSRQVSNSKLPVHVNRTSFYSQDVLVPWHLKGNPDKGKPVEPFGPIGSQDPSPVFHRYYHVFREGELEGACRTVSDVRILQSYYDQGNWCVILQKA

SEQ ID NO: 11103 - protein, 702 aa, Homo sapiens
MSRRSLRLATTACTLGDGEAVGADSGTSSAVSLKNRAARTTKQRRSTNKSAFSINHVSRQVTSSGVSHGGTVSLQDAVTRRPPVLDESWIREQTTVDHFWGLDDDGDLKGGNKAAIQGNGDVGAAAATAHNGFSCSNCSMLSERKDVLTAHPAAPGPVSRVYSRDRNQKWKAASGVFWWLGIGWYQFVTLISWLNVFLLTRCLRNICKFLVLLIPLFLLLAGLSLRGQGNFFSFLPVLNWASMHRTQRVDDPQDVFKPTTSRLKQPLQGDSEAFPWHWMSGVEQQVASLSGQCHHHGENLRELTTLLQKLQARVDQMEGGAAGPSASVRDAVGQPPRETDFMAFHQEHEVRMSHLEDILGKLREKSEAIQKELEQTKQKTISAVGEQLLPTVEHLQLELDQLKSELSSWRHVKTGCETVDAVQERVDVQVREMVKLLFSEDQQGGSLEQLLQRFSSQFVSKGDLQTMLRDLQLQILRNVTHHVSVTKQLPTSEAVVSAVSEAGASGITEAQARAIVNSALKLYSQDKTGMVDFALESGGGSILSTRCSETYETKTALMSLFGIPLWYFSQSPRVVIQPDIYPGNCWAFKGSQGYLVVRLSMMIHPAAFTLEHIPKTLSPTGNISSAPKDFAVYGLENEYQEEGQLLGQFTYDQDGESLQMFQALKRPDDTAFQIVELRIFSNWGHPEYTCLYRFRVHGEPVK

SEQ ID NO: 11104 - protein, 559 aa, Homo sapiens
MVEKILIHRILTLFPNAIARKLLLMLTFILIFWIIYLASKDHTKFSFNLENHIILNQGNIFKKYSHSETPLCPAVSPKETELRIKDIMEKLDQQIPPRPFTHVNTTTSATHSTATILNPQDTYCRGDQLDILLEVRDHLGHRKQYGGDFLRARMYSTALMAGASGKVTDFNNGTYLVSFTLFWEGQVSLSLLLIHPSEGVSALWRARNQGCDRIIFTGLFANRSSNVFTECGLTLNTNAELCQYMDDRDQEAFYCVRPQHMPCEALTHMTTRTRNISYLSKEEWRLFHRSNIGVEMMKNFTPIEVIPCNKSENIKKNCQIGMKTPFPSGYTLKKMWITAFCKQIKFNETKNINDCLERKLIYLMGDSTLHQWIYYLQKAVKTLKYFDHHGAGIFKTHVLLDVERHILIQWKKHGHPFVTKKLFSVKDENYIPREIDQVAGDKNTAIVITLGQHFRPFPINIFIRRAINIQKAIERLFLRSPETKVILKTENTREIEQNAEMFSDFHGYIQNLIIRDIFVDLNVGIIDAWDMTIAYCTNNAHPPDYVIQNQIGMFLNYIC

SEQ ID NO: 11105 - protein, 537 aa, Homo sapiens
MRLVHYRYKPEFAASAGIEATAPETGVIAQEVKEILPEAVKDTGDMVFANGKTIENFLVVNKERIFMENVGAVKELCKLTDNLETRIDELERWSHKLAKLRRLDSLKSTGSSGAFSHAGSQFSRAGSVPHKKRPPKVASKSSSVVPDQACISQRFLQGTIIALVVVMAFSVVSMSTLYVLSLRTEEDLVDTDGSFAVSTSCLLALLRPQPPGGSEALCPWSSQSFGTTQLRQSPLTTGLPGIQPSLLLVTTSLTSSAPGSAVRTLDMCSSHPCPVICCSSPTTNPTTGPSLGPSFNPGHVLSPSPSPSTNRSGPSQMALLPVTNIRAKSWGLSVNGIGHSKHHKSLEPLASPAVPFPGGQGKAKNSPSLGFHGRARRGALQSSVGPAEPTWAQGQSEPVPSLTSIQVLENSMSITSQYCAPGDACRPGNFTYHIPVSSGTPLHLSLTLQMNSSSPVSVVLCSLRSKEEPCEEGSLPQSLHTHQDTQGTSHRWPITILSFREFTYHFRVALLGQANCSSEALAQPATDYHFHFYRLCD

SEQ ID NO: 11106 - protein, 190 aa, Homo sapiens
MAFIAKSFYDLSAISLDGEKVDFNTFRGRAVLIENVASLUGTTTRDFTQLNELQCRFPRRLVVLGFPCNQFGHQENCQNEEILNSLKYVRPGGGYQPTFTLVQKCEVNGQNEHPVFAYLKDKLPYPYDDPFSLMTDPKLIIWSPVRRSDVAWNFEKFLIGPEGEPFRRYSRTFPTINIEPDIKRLLKVAI

SEQ ID NO: 11107 - protein, 2970 aa, Homo sapiens
MSSGRRRGSAPWHSFSRFFAPRSPSRDKEEEEEERPGTSPPPAPGRSAASVENEPMSTSQKKENVLSSEAVKIRQSEDKRNHAEKPVTLPVQEDPKKAYDLSSSTSDTKIGESDRQPKESFFQFLGNLFNISGKSSLGEAKQSSFKDDQDKTEKDLQNPSDHHEDGIKREREIFSGSLRTQTHPTEEQDSNSSELSDAFSLDTTQDSDQETTNLLKQIDGKPEKPSVTYATYRGPRHIGKYLKQQTGLATVNTLDRENESSDSSTNRHIDPGSEIEAGVLPLLLSASTDSSMKGNLLEGPLEDSDCSKTSFNKENSLTNNPELQNIASSNNLLNKNAWGSIERNRSSPSSVTNSSYDGESDSQHHLSCEPVSQTNRNLVCSALLTGSNHRKVPCSPDFQRVTTTENTIKENSTVMSNRTLVQREELVEPQGPAISDFSCSKSDGSDTTEQESTNLPSPNKSIRHEHLQLPESECSDKQTIDSSSKQAATHTNIIALQRHAVTDTEFVNEGKRLSAQDSQKNVAVREIRRETESASAGESIASSHVKAPEDKIESLPKDTDQYFETKAKKLDFRSHDKIPHIRMNKKDLASLNYISESAVVASLGNENAPELKFELNRSHISETPLDSESPQQAEVSPDAKTSLSLDCKKLNFSISPPTFVSGVGMLSKLDIPDLMNEGSPVPIETGNVNIVGISYQPRKCKEENVKNHVEAAGRKSPPPSFCLEYTSAIFEFKEVLSNSEKCQVLPGSEASGPHLTGLELLSFDSGNLSKDCSSILSQDPNRVELVSSNTKANMSIIEKSDSLSLEAKTANIVSKAEIDGQNNVLVESHSGRGKTISLSKVSLSKVEPRNISQDKMSSFPLKITHVPEKPILSELTFLEVEQGKRFQSINHNEIGEKCSDAGLKENCQAELSPAASKYEDKPEPEVDALGSPPALLKSNISWILPPIHDEKISRQMAQNCEAHTCVFHQSLDICGTKKISGHSEMAELSLTNISPKFQETGSMKVNSPFLDSDSSLEKNSSASEDSSFLKVPSVLKLEKKSSSYRKKENIHFLNGGIDSVSSSSSYPEEVSMIVNSHKPQNNLDSIQVTKDLTHEGTSVTNLLYPTTSYLEFETSVSIGTEVTPFQEHFGIYTGKISIDFPTAAQFDNLVEAETGAVAGPAASVNSSGQQCSEASAEHIEARRRAHDQLLDLKSSLLKKADTLIGEIFNSVREELKFKHTVSTCQEHIAIEGIMNLGTLKEDISEKNPSEVTLTEIQQTEGLEEQGMENMSEVKEKPCVSPTVGEKNLLVDPNSMNVSCLLEDKARELVNEIIYVAQEKLRNDTFEDTEDTWDSELQANTSKILNSDSVKPHDVVREFLVSEQPVNQSTQISENKVLNEFFSLSNLASGTESIKGGEIVLYQKSLFSGNGSGLSDSINLQESDTVLLAEDMSHKRLDDRVKTHLFRSEDCNETMEIENVDNNKTETEDRRTLVLNFKWPPLVNDDIHAPGTSKSSLSDSLVCISEKNLPGHSKNTPLAMSDVGKVHKKDNEINIGKIELIPSMLETGKTNKKDAELNILKYEAVPPMIEMGRIHKMDAELNVTKTEPKANVFKMGEVYQMDAESCIEKTEGSAVILGMEKAYKMKDTEGDIGKIEVIPMMPEVKNIHQKDAEGDIVKTEMTPVTVDMENIYQTHAEGDIGKTGTIALSEVENIHQKGGEGISEKAEVIPVTLAMENTYQKDAEGDIGKAEVMPVRLEMENTYPKDTERDGGKTEVMPLALEVVNTYQKNAKGFTGNTEGSVLKMEATYRKTAEEVIKNTEIVPCVLKVKEAHETAPAPLEMEKACKRDVKETIGATVSTPSVIEMEKISPEDRGENIGKHKVLPAVVDIEKIHGTGLELTTKQGEAMLPAFESKTPQEYAEGSVEETKEEPTEIKEGLIAHENRLPTYFRGYESPTLSKDYEGYPAPAMPDFQPGDTTVRLDKRMSLTAIYDKRRETDYSDKGYNLAFVSQDEQENSSFTILYEEPLQEEDKYASAEARQTQSVLFHDTSADSMPVLACERSESRTDLVHHFEKGTKLGETFDSDSSEMFLSVEAKRYKIYPLALSPIYEDDSSQEDILSSEVSPGHHGPRKSRDSENQSSSVLSLLQSVSERLKMNFDEDDREAADEEEEEEEAAVLHKGDLRAGSGERVTFQLPDPSITFYPDDQESVGISKNSYVMPNEPTTSNLQVGLWPEKTSFLQKSDLTSKLHSSLKSAYHQYLQTSQSHSSEKGARFGGIFQEPVSKYFRVQDSPGRLSPFIENVDKQTLRCNPRPGKMVIYDLHESTYKQEVYCNIPDATSWSFPNGVLIKVVRGCWILYEKPHFRGQKCVLEEGEKVLNRDWILQNRRHPQRNFILGSLKRVLKDCSIPEIELFPQSDPACCPVYIQRAVPNLEELNISKSVSFTVKSGVWLAYPDINFKGQATVLEEDHGLFEISTAEMKSLHPLQMGGLKVEMPMNLKVIIYEKPHFHGQAKEFSEHIDSVPNFLKNNGDFHRIGSIRVIGGVWVAYEKEHFKGQQFLLEEGDFEDSNACGALSSPILSFRYLQANFIESSVTLFESDLESGKFIDITNQEISDLEEIGFGSKTRSIHVKSGVWVAYQQKFFCGEQYILEKGKYKCFFDWGGSNNIIMSIRPIQLEPLGINEPPHLLKAFSKPGFQGECIDFTEETSDLTSLMPCSFKVLRGCWLLYYQEDMFVNHCVLEEGLYADLTSCGCPASKVKSLKPIDYVFEEPSISLFALEHCEGRELHLEEAVNSVLNKDLHFYTQSVWVKSGLWIAYEGSNFLGRQILLRPNEIPNWTAFSRWKTIGSLRPMKQPAVYIRIKNRAQGEYLTVTGSLADTRATSVCISPYSGKNTQIWYYCRGLFKSKASDTCLDVIGGRDTPGAKVALWTEHGQFRQKWRLNKNGTISSYLSDQLVLDVKGGNYCDKTHVIVNQPLEGEETQKWDIEIL

SEQ ID NO: 11108 - protein, 1573 aa, Homo sapiens
MRVLACLLAALVGIQAVERLRLADGPHGCAGRLEVWHGGRWGTVCDDGWDLRDAAVACRQLGCGGALAAPGGAFFGEGAGPVWLSELACRGNEGQLGLCHHRGWKAHICSHEEDAGVVCAGQRVANSRDDSTSPLDGAPWPGLLLELSPSTEEPLVTHAPRPAGNPQNASRKKSPRPKQAKSTRAPLLTTGAPRQERLRLVSGPHRCAGRLEVWHGGRWGTVCDDGWDLRDAAVACRELGCGGALAAPGGARFGPGAGPVWMDDVGCGGGEQALRDCPRSPWGRSNCDHSEDAGLVCTGPAPRLRLADGPHGCAGRLEVWHGGRWGSVCDDAWDLRDAAVACRELGCGGALAAPGGAFFGEGSGPIILDDLRCRGNETALRFCPARPWGQHDCHHREDAGAVCDGMPLGYVPPTAPTDSNNSTPREAASRPPSTMTSQAPGTAGVSPPPASPTVLWEPGPEAGSPQLRLVAGPSKCSGRLEVWHDQRWGTVCDDSWDMRDSAVVCRELGCGGPQQPDPAAGRFGWGAGPIWLDDVGCVGTEASLSDCPAAPWGKHNCAHNEDVGVTCTGPPGLDSISDPFSWSWIPGLGRDRDAWLPGELATKPSASVTASVLEKTTTKAPGKMPKSTKKWVTKNAKRPTTQPPVMPTTKHSRAQSPPDLTSQTTAALTTEASRRPTSEFTRRPTTEAPQRWTSHTTATLTPQAPRERTTKTMAMLTTQGPQEMTSESTIKSIPQASLEPSAEIPEGSPESPKDPAPSPSVSTTGESGLFRVRLADGPNRCAGRLEVWHAGRWGTVCDDNWDLRDATVACWELGCGKVRPRVGKTHYGPGTGPIWLDDMGCKGSEASLSDCPSGAWGKHNCDHEEDVGLTCTGYTDYDDYPPWTWDPTSREDLAKGTTTAGVPGHTLPWRTTRRPGSSSPAIRRLPDTGSKDGYKLPWTWDTPSGRGLAEGTPTAGKLGPTLGAGTTRSPGSPPTLRVHGDTGSPRKPWPERRPPRPAATRTAPPTPSPGPSASPGPPGPALTSDSSRELTPHSALTSEATSDAPDTSPPTPDPASRTNPDLILTSPDFALSTPDSSVVPALTPEPSPTPLPTLPKELTSDPSTPSEVTSLSPTSEQVPESDTTPDLDTTPYSSTVSEYSRSPDPSPSPHPTTTPDPTMAPDPITTLNPTVTPHFPTTPHPTTTPHPTTITHSTMIPDPTTTPQPFTTITHSTMIPDPTTTPQPFTTMQPTTTPHSTTPHPTTTPHPTTITHSTMIPDPTTTPQPFTTMQPTTMPHPTTTPHPTTTPHPTTTPHPTTTPHPTMTPDPTTTPYPTTTPDPTTTPHPTTPDPSSTPVITTVSLPTSLGTELSSPTLAPTVKPSLHPQLTFTAPAPHTSTSQIPTLEPSPALESSPSRSSTATSMDPLSTEDFKPPRSQSPNLTPPPTHTPHSASDLTVSPDPLLSPTAHPLDHPPLDPLTLGPTPGQSPGPHGPCVAPTPPVRVMACEPPALVELVAAVRDVGGQLQRLTQVVEQERQERQALLLGLTQLVEAARGLGQLGEAVKRLAEMAWTTSMPAPTTTTPEEEERPLRGDV

SEQ ID NO: 11109 - protein, 915 aa, Homo sapiens
MLPLGSEPALNELLLRKEEEWRALQAHRTQLQEAALQDTRSQLEEAQGKLRCLQEDFVYNLQVLEERDLELERYDAAFAQAREWEEARRAEVSELKIEAAKLRQALAREARKVEELQQQQQLAFQEHRLELERVHSDKNGEIDHHREQYENLKWTLERKLEELDGELALQRQELLLEFESKMRKREHEFRLQADNMSNTALSRELKVKLLHKELEALKEAGAKAAESLQRAEATNAELERKLQSRAGELQDLEAMSRARVKDLEDKLHSVQLTRKKEEETFKRKHEELDRLAREKDAVLVAVKGAHVEQLQELQTRVLELQAHCETLEAQLRRAEWRQADTAKEKDAAIDQLREDASTVKSAWDAQIAQLSKEMVSRDLQIQTLQEEEVKLKAQVARSQQDIERYKQQLSLAVERERSLERDQVQLGLDWQRRCDDIERDQIQKSEALIQGLSMAKSQVAAKLQETEQALQEQEVVLKAVTLERDQAVQALRMHGLPRPGAQMLLRQHEEEISKDFPSSEIQRLREQNTSLRNAIAQMRKEMEALSHQIPPPIQTAAESTDANQPDPEAGGDAATPDYVLALEAEIRTLKHKFKTLEKHLEDVLDPLKMSSPHAESQPSVRTSTETTGGSAQAGQAGGSVQAGQAGGSVQAGPVSSGLALRKLGDRVQLLNLLVTRLRQKVLREPLEPAALQRELPREVDQVHLEVLELRKQVAELGKHLRIAQHGGAEPSGRKQPPASDAVALGREDAKSAEDEAPSRHLGKHQPRSAQVGSRLDALQGPKTQHSIHTVTCKSPRQKEDRSPKPPQAPQHPEEHGRQSHSSSSFASGTLQDMWRLLDLGSSPSGVTSQGDSTPELPAPPAADRRPVKMQAGIATPGMKTAAQAKAKTTGASRSHPAKAKGCQRPPKIRNYNIMD

SEQ ID NO: 11110 - protein, 694 aa, Homo sapiens
MPSATSHSGSGSKSSGPPPPSGSSGSEAAAGAGAAAPASQHPATGTGAVQTEAMKQILGVIDKKLRNLEKKKGKLDDYQERMNKGERLNQDQLDAVSKYQEVTNNLEFAKELQRSFMALSQDIQKTIKKTARREQLMREEAEQKRLKTVLELQYVLDKLGDDEVRTDLKQGLNGVPILSEEELSLLDEFYKLVDPERDMSLRLNEQYEHASIHLWDLLEGKEKPVCGTTYKVLKEIVERVFQSNYFDSTHNHQNGLCEEEEAASAPAVEDQVPEAEPEPAEEYTEQSEVESTEYVNRQFMAETQFTSGEKEQVDEWTVETVEVVNSLQQQPQAASPSVPEPHSLTPVAQADPLVRRQRVQDLMAQMQGPYNFIQDSMLDFENQTLDPAIVSAQPMNPTQNMDMPQLVCPPVHSESRLAQPNQVPVQPEATQVPLVSSTSEGYTASQPLYQPSHATEQRPQKEPIDQIQATISLNTDQTTASSSLPAASQPQVFQAGTSKPLHSSGINVNAAPFQSMQTVFNMNAPVPPVNEPETLKQQNQYQASYNQSFSSQPHQVEQTELQQEQLQTVVGTYHGSPDQSHQVTGNHQQPPQQNTGFPRSNQPYYNSRGVSRGGSRGARGLMNGYRGPANGFRGGYDGYRPSFSNTPNSGYTQSQFSAPRDYSGYQRDGYQQNFKRGSGQSGPRGAPRGNILWW

SEQ ID NO: 11111 - protein, 1452 aa, Homo sapiens
VPPGFPSAEEAYNFFTFNFDPEPEGSEEKPKARHRAGTNQEEEEGEEEEPPAQGGGKEMDEEELLNGDDAEDFLLGLDHVADDFVAVRPADYESIHDRLQMEREMLFIPSRQTVPTYKKLPENVQPRFLEDEGLYTGVRPEVARTNQNIMENRLLMQDPERRWFGDDGRILALPNPIKPFPSRPPVLTQEQSIKAELETLYKKAVKYVHSSQHVIRSGDPPGNFQLDIDISGLIFTHHPCFSREHVLAAKLAQLYDQYLARHQRNKAKFLTDKLQALRNAVQTGLDPEKPHQSLDTIQKTINEYKSEIRQTRKFRDAEQEKDRTLLKTIIKVWKEMKSLREFQRFTNTPLKLVLRKEKADQKADEEAYEAEIQAEISELLEEHTEEYAQKMEEYRTSLQQWKAWRKVQRAKKKKRKQAAEEHPGDEIAEPYPEEDLVKPSPPEPTDRAVIEQEVRERAAQSRRRPWEPTLVPELSLAGSVTPNDQCPRAEVSRREDVKKRSVYLKVLFNNKEVSRTVSRPLGADFRVHFGQIFNLQIVNWPESLTLQVYETVGHSSPTLLAEVFLPIPETTVVTGRAPTEEVEFSSNQHVTLDHEGVGSGVPFSFEADGSNQLTLMTSGKVSHSVAWAIGENGIPLIPPLSQQNIGFRSALKKADAISSIGTSGLTDMKKLAKWAAESKLDPNDPNNAPLMQLISVATSGESYVPDFFRLEQLQQEFNFVSDQELNRSKRFRLLHLRSQEVPEFRNYKQVPVYDREIMEKVFQDYEKRLRDRNVIETKEHIDTHRAIVAKYLQQVRESVINRFLIAKQYFLLADMIVEEEVPNISSEGSGILGLSLFKLAEQKRPLRPRRKGRKKVTAQNLSDGDIKLLVNIVRAYDIPVRKPAVSKFQQPSRSSRMFSEKHAASPSTYSPTHNADYPLGQVLVRPFVEVSFQRTVCHTTTAEGPNPSWNEELELPFRAPNGDYSTASLQSVKDVVFINIFDEVLHDVLEDDRERGSGIHTRIERHWLGCVKMPFSTIYFQARIDGTFKIDIPPVLLGYSKERNMILERGFDSVRSLSEGSYITLFITIEPQLVPGESIREKMSNMLKKFESQEDEKLLQATEKFQAECALKFPNRQCLTTVIDISGKTVFITRYLKPLNPPQELLNVYPNNLQATAELVARYVSLIPFLPDTVSFGGICDLWSTSDQFLDLLAGDEEEHAVLLCNYFLSLGKKAWLLMGNAIPEGPTAYVLTWEQGRYLIWNPCSGHFYGQFDTFCPLKNVGCLIGPDNIWFNIQRYESPLRINFDVTRPKLWKSFFSRSLPYPGLSSVQPEELIYQRSDKAAAAELQDRIEKILKEKIMDWRPRHLTRWNRYCTSTLRHFLPLLEKSQGEDVEDDHRAELLKQLGDYRFSGFPLHMPYSEVKPLIDAVYSTGVHNIDVPNVEFALAVYIHPYPKNVLSVWIYVASLIRNR

SEQ ID NO: 11112 - protein, 3075 aa, Homo sapiens
MRGGVLLVLLLCVAAQCRQRGLFPAILNLASNAHISTNATCGEKGPEMFCKLVEHVPGRPVRNPQCRICDGNSANPRERHPISHAIDGTNNWWQSPSIQNGREYHWVTITLDLRQVFQVAYVIIKAANAPRPGNWILERSLDGTTFSPWQYYAVSDSECLSRYNITPRRGPPTYRADDEVICTSYYSRLVPLEHGEIHTSLINGRPSADDLSPKLLEFTSARYIRLRLQRIRTLNADLMTLSHREPKELDPIVTRRYYYSIKDISVGGMCICYGHASSCPWDETTKKLQCQCEHNTCGESCNRCCPGYHQQPWRPGTVSSGNTCEACNCHNKAKDCYYDESVAKQKKSLNTAGQFRGGGVCINCLQNTMGINCETCIDGYYRPHKVSPYEDEPCRPCNCDPVGSLSSVCIKDDLHSDLHNGKQPGQCPCKEGYTGEKCDRCQLGYKDYPTCVSCGCNPVGSASDEPCTGPCVCKENVEGKACDRCKPGFYNLKEKNPRGCSECFCFGVSDVCSSLSWPVGQVNSMSGWLVTDLISPRKIPSQQDALGGRHQVSINNTAVMQRLAPKYYWAAPEAYLGNKLTAFGGFLKYTVSYDIPVETVDSNLMSHADVIIKGNGLTLSTQAEGLSLQPYEEYLNVVRLVPENFQDFHSKRQIDRDQLMTVLANVTHLLIRANYNSAKMALYRLESVSLDIASSNAIDLVVAADVEHCECPQGYTGTSCESCLSGYYRVDGILFGGICQPCECHGHAAECNVHGVCIACAHNTTGVHCEQCLPGFYGEPSRGTPGDCQPCACPLTIASNNFSPTCHLNDGDEVVCDWCAPGYSGAWCERCADGYYGNPTVPGESCVPCDCSGNVDPSEAGHCDSVTGECLKCLGNTDGAHCERCADGFYGDAVTAKNCRACECHVKGSHSAVCHLETGLCDCKPNVTGQQCDQCLHGYYGLDSGHGCRPCNCSVAGSVSDGCTDEGQCHCVPGVAGKRCDRCAHGFYAYQDGSCTPCDCPHTQNTCDPETGECVCPPHTQGVKCEECEDGHWGYDAEVGCQACNCSLVGSTHHRCDVVTGHCQCKSKFGGRACDQCSLGYRDFPDCVPCDCDLRGTSGDACNLEQGLCGCVEETGACPCKENVFGPQCNECREGTFALRADNPLGCSPCFCSGLSHLCSELEDYVRTPVTLGSDQPLLRVVSQSNLRGTTEGVYYQAPDFLLDAATVRQHIRAEPFYWRLPQQFQGDQLMAYGGKLKYSVAFYSLDGVGTSNFEPQVLIKGGRIRKQVIYMDAPAPENGVRQEQEVAMRENFWKYFNSVSEKPVTREDFMSVLSDIEYILIKASYGQGLQQSRISDISMEVGRKAEKLHPEEEVASLLENCVCPPGTVGFSCQDCAPGYHRGKLPAGSDRGPRPLVAPCVPCSCNNHSDTCDPNTGKCLNCGDNTAGDHCDVCTSGYYGKVTGSASDCALCACPHSPPASFSPTCVLEGDHDFRCDACLLGYEGKHCERCSSSYYGNPQTPGGSCQKCDCNPHGSVHGDCDRTSGQCVCRLGASGLRCDECEPRHILMETDCVSCDDECVGVLLNDLDEIGDAVLSLNLTGIIPVPYGILSNLENTTKYLQESLLKENMQKDLGKIKLEGVAEETDNLQKKLTRMLASTQKVNRATERIFKESQDLAIAIERLQMSITEIMEKTTLNQTLDEDFLLPNSTLQNMQQNGTSLLEIMQIRDFTQLHQNATLELKAAEDLLSQIQENYQKPLEELEVLKEAASHVLSKHNNELKAAEALVREAEAKMQESNHLLLMVNANLREFSDKKLHVQEEQNLTSELIVQGRGLIDAAAAQTDAVQDALEHLEDHQDKLLLWSAKIRHHIDDLVMHMSQRNAVDLVYRAEDHAAEFQRLADVLYSGLENIRNVSLNATSAAYVHYNIQSLIEESEELARDAHRTVTETSLLSESLVSNGKAAVQRSSRFLKEGNNLSRKLPGIALELSELRNKTNRFQENAVEITRQTNESLLILRAIPKGIRDKGAKTKELATSASQSAVSTLRDVAGLSQELLNTSASLSRVNTTLRETHQLLQDSTMATLLAGRKVKDVEIQANLLFDRLKPLKMLEENLSRNLSEIKLLISQARKQAASIKVAVSADRDCIRAYQPQISSTNYNTLTLNVKTQEPDNLLFYLGSSTASDFLAVEMRRGRVAFLWDLGSGSTRLEFPDFPIDDNRWHSIHVARFGNIGSLSVKEMSSNQKSPTKTSKSPGTANVLDVNNSTLMFVGGLGGQIKKSPAVKVTHFKGCLGEAFLNGKSIGLWNYIEREGKCRGCFGSSQNEDPSFHFDGSGYSVVEKSLPATVTQIIMLFNTFSPNGLLLYLGSYGTKDFLSIELFRGRVKVMTDLGSGPITLLTDRRYNNGTWYKIAFQRNRKQGVLAVIDAYNTSNKETKQGETPGASSDLNRLDKDPIYVGGLPRSRVVRRGVTTKSFVGCIKNLEISRSTFDLLRNSYGVRKGCLLEPIRSVSFLKGGYIELPPKSLSPESEWLVTFATTNSSGIILAALGGDVEKRGDREEAHVPFFSVMLIGGNIEVHVNPGDGTGLRKALLHAPTGTCSDGQAHSISLVRNRRIITVQLDENNPVEMKLGTLVESRTINVSNLYVGGIPEGEGTSLLTMRRSFHGCIKNLIFNLELLDFNSAVGHEQVDLDTCWLSERPKLAPDAEDSKLLPEPRAFPEQCVVDAALEYVPGAHQFGLTQNSHFILPFNQSAVRKKLSVELSIRTFASSGLIYYMAHQNQADYAVLQLHGGRLHFMFDLGKGRTKVSHPALLSDGKWHTVKTDYVKRKGFITVDGRESPMVTVVGDGTMLDVEGLFYLGGLPSQYQARKIGNITHSIPACIGDVTVNSKQLDKDSPVSAFTVNRCYAVAQEGTYFDGSGYAALVKEGYKVQSDVNITLEFRTSSQNGVLLGISTAKVDAIGLELVDGKVLFHVNNGAGRITAAYEPKTATVLCDGKWHTLQANKSKHRITLIVDGNAVGAESPHTQSTSVDTNNPIYVGGYPAGVKQKCLRSQTSFRGCLRKLALIKSPQVQSFDFSRAFELHGVFLHSCPGTES

SEQ ID NO: 11113 - protein, 2277 aa, Homo sapiens
MFTYIKIITSGDSDNITHVWNEDDGQTLSPSSLAAQLLILENFEDALLNISANSPYIPYLACVRNVTDSLARGSPENLRLLQSTIRFKKSFLRNGSYEDYFPPVPEVLKSKLSQLRNLTELLCESETFSLIEKSCQLSDMSFGSLCEESEFDLQLLEAAELGTEIAASLLYHDNVISKKVRDLLTGDPSKINLNMDQFLEQALQMNYLENITQLIPIIEAMLHVNNSADASEKPGQLLEMFKNVEELKEDLRRTTGMSNRTIDKLLAIPIPDNRAEIISQVFWLHSCDTNITTPKLEDAMKEFCNLSLSERSRQSYLIGLTLLHYLNIYNFTYKVFFPRKDQKPVEKMMELFIRLKEILNQMASGTHPLLDKMRSLKQMHLPRSVPLTQAMYRSNRMNTPQGSFSTISQALCSQGITTEYLTAMLPSSQRPKGNHTKDFLTYKLTKEQIASKYGIPINSTPFCFSLYKDIINMPAGPVIWAFLKPMLLGRILYAPYNPVTKAIMEKSNVTLRQLAELREKSQEWMDKSPLFMNSFHLLNQAIPMLQNTLRNPFVQVFVKFSVGLDAVELLKQIDELDILRLKLENNIDIIDQLNTLSSLTVNISSCVLYDRIQAAKTIDEMEREAKRLYKSNELFGSVIFKLPSNRSWHRGYDSGNVFLPPVIKYTIRMSLKTAQTTRSLRTKIWAPGPHNSPSHNQIYGRAFIYLQDSIERAIIELQTGRNSQEIAVQVQAIPYPCFMKDNFLTSVSYSLPIVLMVAWVVFIAAFVKKLVYEKDLRLHEYMKMMGVNSCSHFFAWLIESVGFLLVTIVILIIILKFGNILPKTNGFILFLYFSDYSFSVIAMSYLISVFFNNTNIAALIGSLIYIIAFFPFIVLVTVENELSYVLKVFMSLLSPTAFSYASQYIARYEEQGIGLQWENMYTSPVQDDTTSFGWLCCLILADSFIYFLIAWYVRNVFPGTYGMAAPWYFPILPSYWKERFGCAEVKPEKSNGLMFTNIMMQNTNPSASPEYMFSSNIEPEPKDLTVGVALHGVTKIYGSKVAVDNLNLNFYEGHITSLLGPNGAGKTTTISMLTGLFGASAGTIFVYGKDIKTDLHTVRKNMGVCMQHDVLFSYLTTKEHLLLYGSIKVPHWTKKQLHEEVKRTLKDTGLYSHRHKRVGTLSGGMKRKLSISIALIGGSRVVILDEPSTGVDPCSRRSIWDVISKNKTARTIILSTHHLDEAEVLSDRIAFLEQGGLRCCGSPFYLKEAFGDGYHLTLTKKKSPNLNANAVCDTMAVTAMIQSHLPEAYLKEDIGGELVYVLPPFSTKVSGAYLSLLRALDNGMGDLNIGCYGISDTTVEEVFLNLTKESQKNSAMSLEHLTQKKIGNSNANGISTPDDLSVSSSNFTDRDDKILTRGERLDGFGLLLKKIMAILIKRFHHTRRNWKGLIAQVILPIVFVTTAMGLGTLRNSSNSYPEIQISPSLYGTSEQTAFYANYHPSTEALVSAMWDFPGIDNMCLNTSDLQCLNKDSLEKWNTSGEPITNFGVCSCSENVQECPKFNYSPPHRRTYSSQVIYNLTGQRVENYLISTANEFVQKRYGGWSFGLPLTKDLRFDITGVPANRTLAKVWYDPEGYHSLPAYLNSLNNFLLRVNMSKYDAARHGIIMYSHPYPGVQDQEQATISSLIDILVALSILMGYSVTTASFVTYVVREHQTKAKQLQHISGIGVTCYWVTNFIYDMVFYLVPVAFSIGIIAIFKLPAFYSENNLGAVSLLLLLFGYATFSWMYLLAGLFHETGMAFITYVCVNLFFGINSIVSLSVVYFLSKEKPNDPTLELISETLKRIFLIFPQFCFGYGLIELSQQQSVLDFLKAYGVEYPNETFEMNKLGAMFVALVSQGTMFFSLRLLINESLIKKLRLFFRKFNSSHVRETIDEDEDVRAERLRVESGAAEFDLVQLYCLTKTYQLIHKKIIAVNNISIGIPAGECFGLLGVNGAGKTTIFKMLTGDIIPSSGNILIRNKTGSLGHVDSHSSLVGYCPQEDALDDLVTVEEHLYFYARVHGIPEKDIKETVHKLLRRLHLMPFKDRATSMCSYGTKRKLSTALALIGKPSILLLDEPSSGMDPKSKRHLWKIISEEVQNKCSVILTSHSMEECEALCTRLAIMVNGKFQCIGSLQHIKSRFGRGFTVKVHLKNNKVTMETLTKFMQLHFPKTYLKDQHLSMLEYHVPVTAGGVANIFDLLETNKTALNITNFLVSQTTLEEVFINFAKDQKSYETADTSSQGSTISVDSQDDQMES

SEQ ID NO: 11114 - protein, 1130 aa, Homo sapiens
MQFPSPPAARSSPAPQAASSSEAAAPATGQPGPSCPVPGTSRRGRPGTPPAGRVEEEEEEEEEDVDKDPHPTQNTCLRCRHFSLRERKREPRRTMGGCEVREFLLQFGFFLPLLTAWPGDCSHVSNNQVVLLDTTTVLGELGWKTYPLNGWDAITEMDEHNRPIHTYQVCNVMEPNQNNWLRTNWISRDAAQKIYVEMKFTLRDCNSIPWVLGTCKETFNLFYMESDESHGIKFKPNQYTKIDTIAADESFTQMDLGDRILKLNTEIREVGPIERKGFYLAFQDIGACIALVSVRVFYKKCPFTVRNLAMFPDTIPRVDSSSLVEVRGSCVKSAEERDTPKLYCGADGDWLVPLGRCICSTGYEEIEGSCHACRPGFYKAFAGNTKCSKCPPHSLTYMEATSVCQCEKGYFRAEKDPPSMACTRPPSAPRNVVFNINETALILEWSPPSDTGGRKDLTYSVICKKCGLDTSQCEDCGGGLRFIPRHTGLINNSVIVLDFVSHVNYTFEIEAMNGVSELSFSPKPFTAITVTTDQDAPSLIGVVRKDWASQNSIALSWQAPAFSNGAILDYEIKYYEKEHEQLTYSSTRSKAPSVIITGLKPATKYVFHIRVRTATGYSGYSQKFEFETGDETSDMAAEQGQILVIATAAVGGFTLLVILTLFFLITGRCQWYIKAKMKSEEKRRNHLQNGHLRFPGIKTYIDPDTYEDPSLAVHEFAKEIDPSRIRIERVIGAGEFGEVCSGRLKTPGKREIPVAIKTLKGGHMDRQRRDFLREASIMGQFDHPNIIRLEGVVTKRSFPAIGVEAFCPSFLRAGFLNSIQAPHPVPGGGSLPPRIPAGRPVMIVVEYMENGSLDSFLRKHDGHFTVIQLVGMLRGIASGMKYLSDMGYVHRDLAARNILVNSNLVCKVSDFGLSRVLEDDPEAAYTTTGGKIPIRWTAPEAIAYRKFSSASDAWSYGIVMWEVMSYGERPYWEMSNQDVILSIEEGYRLPAPMGCPASLHQLMLHCWQKERNHRPKFTDIVSFLDKLIRNPSALHTLVEDILVMPESPGEVPEYPLFVTVGDWLDSIKMGQYKNNFVAAGFTTFDLISRMSIDDIRRIGVILIGHQRRIVSSIQTLRLHMMHIQEKGFHV

SEQ ID NO: 11115 - protein, 489 aa, Homo sapiens
MSPKCSADAENSFKESMEKSSYSDWLINNSIAELVASTGLPVNISDAYQDPRFDAEADQISGFHIRSVLCVPIWNSNHQIIGVAQVLNRLDGKPFDDADQRLFEAFVIFCGLGINNTIMYDQVKKSWAKQSVALDVLSYHATCSKAEVDKFKAANIPLVSELAIDDIHFDDFSLDVDAMITAALRMFMELGMVQKFKIDYETLCRWLLTVRKNYRMVLYHNWRHAFNVCQLMFAMLTTAGFQDILTEVEILAVIVGCLCHDLDHRGTNNAFQAKSGSALAQLYGTSATLEHHHFNHAVMILQSEGHNIFANLSSKEYSDLMQLLKQSILATDLTLYFERRTEFFELVSKGEYDWNIKNHRDIFRSMLMTACDLGAVTKPWEISRQVAELVTSEFFEQGDRERLELKLTPSAIFDRNRKDELPRLQLEWIDSICMPLYQALVKVNVKLKPMLDSVATNRSKWEELHQKRLLASTASSSPASVMVAKEDRN

SEQ ID NO: 11116 - protein, 2036 aa, Homo sapiens
MFSKKPHGDVKKSTQKVLDTKKDALTRLKHLRIVIENAESIDLKQFFDQHFSHIYYVFFENFVTIEASLKQKGHKSQREELDAILFIFEKILQLLPERIHQRWQFHSIGLILKKLLHTGNSLKIRREGVRLFLLWLQALQNNCSKEQLWMFSCLIPGFSAPQSEHGPRTLDNLINPPLNLQETQVTIEEITPLVPPQSGDKGQEDLTSYFLEALLKYIVIQVKSLEWKNKENQERGFSFLFSHFKKYYLPYIFPNICKENSLYHPILDIPQMRPKPHYVVIKKDAETNEAIYCTKEPFIKARVIVIRWLVSFWLEPKPHTGPHIPGMEGEVLPKNIQRAAASLVSREESKNDNADKTDRTTEPEQSHSNTSTLTEREPSSSSLCSIDEEHLTDIEIVRRVFSSKRSNVNFVTEIFRQAFLLPICEAAAMRKVVKVYQEWIQQEEKPLFMQEPEEIVITSSDLPCIENVTDHDISMEEGEKREEENGTNTADHVRNSSWAKNGSYQGALHNASEEATEQNIRAGTQAVLQVFIINSSNIFLLEPANEIKNLLDEHTDMCKRILNIYRYMVVQVSMDKKTWEQMLLVLLRVTESVLKMPSQAFLQFQGKKNMTLAGRLAGPLFQTLIVAWIKANLNVYISRELWDDLLSVLSSLTYWEELATEWSLTMETLTKVLARNLYSLDLSDLPLDKLSEQKQKKHKGKGVGHEFQKVSVDKSFSRGWSRDQPGQAPMRQRSATTTGSPGTEKARSIVRQKTVDIDDAQILPRSTRVRHFSQSEETGNEVFGALNEEQPLPRSSSTSDILEPFTVERAKVNKEDMSQKLPPLNSDIGGSSANVPDLMDEFIAERLRSGNASTMTRRGSSPGSLEIPKDLPDILNKQNQMRPIDDPGVPSEWTSPASAGSSDLISSDSHSDSFSAFQYDGRKFDNFGFGTDTGVTSSADVDSGSGHHQSAEEQEVASLTTLHIDSETSSLNQQAFSAEVATITGSESASPVHSPLGSRSQTPSPSTLNIDHMEQKDLQLDEKLHHSVLQTPDDLEISEFPSECCSVMAGGTLTGWHADVATVMWRRMLGILGDVNSIMDPEIHAQVFDYLCELWQNLAKIRDNLGISTDNLTSPSPPVLIPPLRILTPWLFKATMLTDKYKQGKLHAYKLICNTMKRRQDVSPNRDFLTHFYNIMHCGLLHIDQDIVNTIIKHCSPQFFSLGLPGATMLIMDFIVAAGRVASSAFLNAPRVEAQVLLGSLVCFPNLYCELPSLHPNIPDVAVSQFTDVKELIIKTVLSSARDEPSGPARCVALCSLGIWICEELVHESHHPQIKEALNVICVSLKFTNKTVAHVACNMLHMLVHYVPRLQIYQPDSPLKIIQILIATITHLLPSTEASSYEMDKRLVVSLLLCLLDWIMALPLKTLLQPFHATGAESDKTEKSVLNCIYKVLHGCVYGAQCFSNPRYFPMSLSDLASVDYDPFMHLESLKEPEPLHSPDSERSSKLQPVTEVKTQMQHGLISIAARTVITHLVNHLGHYPMSGGPAMLTSQVCENHDNHYSESTELSPELFESPNIQFFVLNNTTLVSCIQIRSEENMPGGGLSAGLASANSNVRIIVRDLSGKYSWDSAILYGPPPVSGLSEPTSFMLSLSHQEKPEEPPTSNECLEDITVKDGLSLQFKRFRETVPTWDTIRDEEDVLDELLQYLGVTSPECLQRTGISLNIPAPQPVCISEKQENDVINAILKQHTEEKEFVEKHFNDLNMKAVEQDEPIPQKPQSAFYYCRLLLSILGMNSWDKRRSFHLLKKNEKLLRELRNLDSRQCRETHKIAVFYVAEGQEDKHSILTNTGGSQAYEDFVAGLGWEVNLTNHCGFMGGLQKNKSTGLTTPYFATSTVEVIFHVSTRMPSDSDDSLTKKLRHLGNDEVHIVWSEHTRDYRRGIIPTEFGDVLIVIYPMKNHMFSIQIMKKPEVPFFGPLFDGAIVNGKVLPIMVRATAINASRALKSLIPLYQNFYEERARYLQTIVQHHLEPTTFEDFAAQVFSPAPYHHLPSDADH

SEQ ID NO: 11117 - protein, 625 aa, Homo sapiens
MADQRMDISSTISDFMSPGPTDLLSSSLGTSGVDCNRKRKGSSTDYQESMDTDKDDPHGRLEYTEHQGRIKNAREAHSQIEKRRRDKMNSFIDELASLVPTCNAMSRKLDKLTVLRMAVQHMKTLRGATNPYTEANYKPTFLSDDELKHLILRAADGFLFVVGCDRGKILFVSESVFKILNYSQNDLIGQSLFDYLHPKDIAKVKEQLSSSDTAPRERLIDAKTGLPVKTDITPGPSRLCSGARRSFFCRMKCNRPSVKVEDKDFPSTCSKKKDRKSFCTIHSTGYLKSWPPTKMGLDEDNEPDNEGCNLSCLVAIGRLHSHVVPQPVNGEIRVKSMEYVSRHAIDGKFVFVDQRATAILAYLPQELLGTSCYEYFHQDDIGHLAECHRQVLQTREKITTNCYKFKIKDGSFITLRSRWFSFMNPWTKEVEYIVSTNTVVLANVLEGGDPTFPQLTASPHSMDSMLPSGEGGPKRTHPTVPGIPGGTRAGAGKIGRMIAEEIMEIHRIRGSSPSSCGSSPLNITSTPPPDASSPGGKKILNGGTPDIPSSGLLSGQAQENPGYPYSDSSSILGENPHIGIDMIDNDQGSSSPSNDEAAMAVIMSLLEADAGLGGPVDFSDLPWPL

SEQ ID NO: 11118 - protein, 858 aa, Homo sapiens
MDLPALLPAPTARGGQHGGGPGPLRRAPAPLGASPARRRLLLVRGPEDGGPGARPGEASGPSPPPAEDDSDGDSFLVLLEVPHGGAAAEAAGSQEAEPGSRVNLASRPEQGPSGPAAPPGPGVAPAGAVTISSQDLLVRLDRGVLALSAPPGPATAGAAAPRRAPQASGPSTPGYRCPEPQCALAFAKKHQLKVHLLTHGGGQGRRPFKCPLEGCGWAFTTSYKLKRHLQSHDKLRPFGCPVGGCGKKFTTVYNLKAHMKGHEQESLFKCEVCAERFPTHAKLSSHQRSHFEPERPYKCDFPGCEKTFITVSALFSHNRAHFREQELFSCSFPGCSKQYDKACRLKIHLRSHTGERPFICDSDSCGWTFTSMSKLLRHRRKHDDDRRFTCPVEGCGKSFTRAEHLKGHSITHLGTKPFECPVEGCCARFSARSSLYIHSKKHVQDVGAPKSRCPVSTCNRLFTSKHSMKAHMVRQHSRRQDLLPQLEAPSSLTPSSELSSPGQSELTNMDLAALFSDTPANASGSAGGSDEALNSGILTIDVTSVSSSLGGNLPANNSSLGPMEPLVLVAHSDIPPSLDSPLVLGTAATVLQQGSFSVDDVQTVSAGALGCLVALPMKNLSDDPLALTSNSNLAAHITTPTSSSTPRENASVPELLAPIKVEPDSPSRPGAVGQQEGSHGLPQSTLPSPAEQHGAQDTELSAGTGNFYLESGGSARTDYRAIQLAKEKKQRGAGSNAGASQSTQRKIKEGKMSPPHFHASQNSWLCGSLVVPSGGRPGPAPAAGVQCGAQGVQVQLVQDDPSGEGVLPSARGPATFLPFLTVDLPVYVLQEVLPSSGGPAGPEATQFPGSTINLQDLQ

SEQ ID NO: 11119 - protein, 2137 aa, Homo sapiens
MTSATEFENVGNQPPYSRINARWDAPDDELDNDNSSARLFERSRIKALADEREVVQKKTFTKWVNSHLARVSCRITDLYKDLRDGRMLIKLLEVLSGEMLPKPTKGKMRIHCLENVDKALQFLKEQRVHLENMGSHDIVDGNHRLVLGLIWTIILRFQIQDIVVQTQEGRETRSAKDALLLWCQMKTAGYPHVNVTNFTSSWKDGLAFNALIHKHRPDLIDFDKLKDSNARHNLEHAFNVAERQLGIIPLLDPEDVFTENPDEKSIITYVVAFYHYFSKMKVLAVEGKRVGKVIDHAIETEKMIEKYSGLASDLLTWIEQTITVLNSRKFANSLTGVQQQLQAFSTYRTVEKPPKFQEKGNLEVLLFTIQSRMRANNQKVYTPHDGKLVSDINRAWESLEEAEYRRELALRNELIRQEKLEQLARRFDRKAAMRETWLSENQRLVAQDNFGYDLAAVEAAKKKHEAIETDTAAYEERVRALEDLAQELEKENYHDQKRITARKDNILRLWSYLQELLQSRRQRLETTLALQKLFQDMLHSIDWMDEIKAHLLSAEFGKHLLEVEDLLQKHKLMEADIAIQGDKVKAITAATLKFTEGKGYQPCDPQVIQDRISHLEQCFEELSNMAAGRKAQLEQSKRLWKFFWEMDEAESWIKEKEQIYSSLDYGKDLTSVLILQRKHKAFEDELRGLDAHLEQIFQEAHGMVARKQFGHPQIEARIKEVSAQWDQLKDLAAFCKKNLQDAENFFQFQGDADDLKAWLQDAHRLLSGEDVGQDEGATRALGKKHKDFLEELEESRGVMEHLEQQAQGFPEEFRDSPDVTHRLQALRELYQQVVAQADLRQQRLQEALDLYTVFGETDACELWMGEKEKWLAEMEMPDTLEDLEVVQHRFDILDQEMKTLMTQIDGVNLAANSLVESGHPRSREVKQYQDHLNTRWQAFQTLVSERREAVDSALRVHNYCVDCEETSKWITDKTKVVESTKDLGRDLAGIIAIQRKLSGLERDVAAIQARVDALERESQQLMDSHPEQKEDIGQRQKHLEELWQGLQQSLQGQEDLLGEVSQLQAFLQDLDDFQAWLSITQKAVASEDMPESLPEAEQLLQQHAGIKDEIDGHQDSYQRVKESGEKVIQGQTDPEYLLLGQRLEGLDTGWNALGRMWESRSHTLAQCLGFQEFQKDAKQAEAILSNQEYTLAHLEPPDSLEAAEAGIRKFEDFLGSMENNRDKVLSPVDSGNKLVAEGNLYSDKIKEKVQLIEDRHRKNNEKAQEASVLLRDNLELQNFLQNCQELTLWINDKLLTSQDVSYDEARNLHNKWLKHQAFVAELASHEGWLENIDAEGKQLMDEKPQFTALVSQKLEALHRLWDELQATTKEKTQHLSAARSSDLRLQTHADLNKWISAMEDQLRSDDPGKDLTSVNRMLAKLKRVEDQVNVRKEELGELFAQVPSMGEEGGDADLSIEKRFLDLLEPLGRRKKQLESSRAKLQISRDLEDETLWVEERLPLAQSADYGTNLQTVQLFMKKNQTLQNEILGHTPRVEDVLQRGQQLVEAAEIDCQDLEERLGHLQSSWDRLREAAAGRLQRLRDANEAQQYYLDADEAEAWIGEQELYVISDEIPKDEEGAIVMLKRHLRQQRAVEDYGRNIKQLASRAQGLLSAGHPEGEQIIRLQGQVDKHYAGLKDVAEERKRKLENMYHLFQLKRETDDLEQWISEKELVASSPEMGQDFDHVTLLRDKFRDFARETGAIGQERVDNVNAFIERLIDAGHSEAATIAEWKDGLNEMWADLLELIDTRMQLLAASYDLHRYFYTGAEILGLIDEKHRELPEDVGLDASTAESFHRVHTAFERELHLLGVQVQQFQDVATRLQTAYAGEKAEAIQNKEQEVSAAWQALLDACAGRRTQLVDTADKFRFFSMARDLLSWMESIIRQIETQERPRDVSSVELLMKYHQGINAEIETRSKNFSACLELGESLLQRQHQASEEIREKLQQVMSRRKEMNEKWEARWERLRMLLEVCQFSRDASVAEAWLIAQEPYLASGDFGHTVDSVEKLIKRHEAFEKSTASWAERFAALEKPTTLELKERQIAERPAEETGPQEEEGETAGEAPVSHHAATERTSPVSLWSRLSSSWESLQPEPSHPY

SEQ ID NO: 11120 - protein, 2328 aa, Homo sapiens
MTSATEFENVGNQPPYSRINARWDAPDDELDNDNSSARLFERSRIKALADEREVVQKKTFTKWVNSHLARVSCRITDLYKDLRDGRMLIKLLEVLSGEMLPKPTKGKMRIHCLENVDKALQFLKEQRVHLENMGSHDIVDGNHRLVLGLIWTIILRFQIQDIVVQTQEGRETRSAKDALLLWCQMKTAGYPHVNVTNFTSSWKDGLAFNALIHKHRPDLIDFDKLKDSNARHNLEHAFNVAERQLGIIPLLDPEDVFTENPDEKSIITYVVAFYHYFSKMKVLAVEGKRVGKVIDHAIETEKMIEKYSGLASDLLTWIEQTITVLNSRKFANSLTGVQQQLQAFSTYRTVEKPPKFQEKGNLEVLLFTIQSRMRANNQKVYTPHDGKLVSDINRAWESLEEAEYRRELALRNELIRQEKLEQLARRFDRKAAMRETWLSENQRLVAQDNFGYDLAAVEAAKKKHEAIETDTAAYEERVRALEDLAQELEKENYHDQKRITARKDNILRLWSYLQELLQSRRQRLETTLALQKLFQDMLHSIDWMDEIKAHLLSAEFGKHLLEVEDLLQKHKLMEADIAIQGDKVKAITAATLKFTEGKGYQPCDPQVIQDRISHLEQCFEELSNMAAGRKAQLEQSKRLWKFFWEMDEAESWIKEKEQIYSSLDYGKDLTSVLILQRKHKAFEDELRGLDAHLEQIFQEAHGMVARKQFGHPQIEARIKEVSAQWDQLKDLAAFCKKNLQDAENFFQFQGDADDLKAWLQDAHRLLSGEDVGQDEGATRALGKKHKDFLEELEESRGVMEHLEQQAQGFPEEFRDSPDVTHRLQALRELYQQVVAQADLRQQRLQEALDLYTVFGETDACELWMGEKEKWLAEMEMPDTLEDLEVVQHRFDILDQEMKTLMTQIDGVNLAANSLVESGHPRSREVKQYQDHLNTRWQAFQTLVSERREAVDSALRVHNYCVDCEETSKWITDKTKVVESTKDLGRDLAGIIAIQRKLSGLERDVAAIQARVDALERESQQLMDSHPEQKEDIGQRQKHLEELWQGLQQSLQGQEDLLGEVSQLQAFLQDLDDFQAWLSITQKAVASEDMPESLPEAEQLLQQHAGIKDEIDGHQDSYQRVKESGEKVIQGQTDPEYLLLGQRLEGLDTGWNALGRMWESRSHTLAQCLGFQEFQKDAKQAEAILSNQEYTLAHLEPPDSLEAAEAGIRKFEDFLGSMENNRDKVLSPVDSGNKLVAEGNLYSDKIKEKVQLIEDRHRKNNEKAQEASVLLRDNLELQNFLQNCQELTLWINDKLLTSQDVSYDEARNLHNKWLKHQAFVAELASHEGWLENIDAEGKQLMDEKPQFTALVSQKLEALHRLWDELQATTKEKTQHLSAARSSDLRLQTHADLNKWISAMEDQLRSDDPGKDLTSVNRMLAKLKRVEDQVNVRKEELGELFAQVPSMGEEGGDADLSIEKRFLDLLEPLGRRKKQLESSRAKLQISRDLEDETLWVEERLPLAQSADYGTNLQTVQLFMKKNQTLQNEILGHTPRVEDVLQRGQQLVEAAEIDCQDLEERLGHLQSSWDRLREAAAGRLQRLRDANEAQQYYLDADEAEAWIGEQELYVISDEIPKDEEGAIVMLKRHLRQQRAVEDYGRNIKQLASRAQGLLSAGHPEGEQIIRLQGQVDKHYAGLKDVAEERKRKLENMYHLFQLKRETDDLEQWISEKELVASSPEMGQDFDHVTLLRDKFRDFARETGAIGQERVDNVNAFIERLIDAGHSEAATIAEWKDGLNEMWADLLELIDTRMQLLAASYDLHRYFYTGAEILGLIDEKHRELPEDVGLDASTAESFHRVHTAFERELHLLGVQVQQFQDVATRLQTAYAGEKAEAIQNKEQEVSAAWQALLDACAGRRTQLVDTADKFRFFSMARDLLSWMESIIRQIETQERPRDVSSVELLMKYHQGINAEIETRSKNFSACLELGESLLQRQHQASEEIREKLQQVMSRRKEMNEKWEARWERLRMLLEVCQFSRDASVAEAWLIAQEPYLASGDFGHTVDSVEKLIKRHEAFEKSTASWAERFAALEKPTTLELKERQIAERPAEETGPQEEEGETAGEAPVSHHAATERTSPGEEEGTWPQNLQQPPPPGQHKDGQKSTGDERPTTEPLFKVLDTPLSEGDEPATLPAPRDHGQSVQMEGYLGRKHDLEGPNKKASNRSWNNLYCVLRNSELTFYKDAKNLALGMPYHGEEPLALRHAICEIAANYKKKKHVFKLRLSNGSEWLFHGKDEEEMLSWLQGVSTAINESQSIRVKAQSLPLPSLSGPDASLGKKDKEKRFSFFPKKK

SEQ ID NO: 11121 - protein, 757 aa, Homo sapiens
MAEVGRTGISYPGALLPQGFWAAVEVWLERPQVANKRLCGARLEARWSAALPCAEARGPGTSAGSEQKERGPGPGQGSPGGGPGPRSLSGPEQGTACCELEEAQGQCQQEEAQREAASVPLRDSGHPGHAEGREGDFPAADLDSLWEDFSQSLARGNSELLAFLTSSGAGSQPEAQRELDVVLRTVIPKTSPHCPLTTPRREIVVQDVLNGTITFLPLEEDDEGNLKVKMSNVYQIQLSHSKEEWFISVLIFCPERWHSDGIVYPKPTWLGEELLAKLAKWSVENKKSDFKSTLSLISIMKYSKAYQELKEKYKEMVKVWPEVTDPEKFVYEDVAIAAYLLILWEEERAERRLTARQSFVDLGCGNGLLVHILSSEGHPGRGIDVRRRKIWDMYGPQTQLEEDAITPNDKTLFPDVDWLIGNHSDELTPWIPVIAARSSYNCRFFVLPCCFFDFIGRYSRRQSKKTQYREYLDFIKEVGFTCGFHVDEDCLRIPSTKRVCLVGKSRTYPSSREASVDEKRTQYIKSRRGCPVSPPGWELSPSPRWVAAGSAGHCDGQQALDARVGCVTRAWAAEHGAGPQAEGPWLPGFHPREKAERVRNCAALPRDFIDQVVLQVANLLLGGKQLNTRSSRNGSLKTWNGGESLSLAEVANELDTETLRRLKRECGGLQTLLRNSHQVFQVVNGRVHIRDWREETLWKTKQPEAKQRLLSEACKTRLCWFFMHHPDGCALSTDCCPFAHGPAELRPPRTTPRKKIS

SEQ ID NO: 11122 - protein, 731 aa, Homo sapiens
MSLFLSNLSTNDSSLWKENHNSTDLLNPPGTLNIYLFCLTCLMTFAALVGSIYSLISLLKMQNRTVVSMLVASWSVDDLMSVLSVTIFMFLQWPNEVPGYFQFLCTTSALMYLCQGLSSNLKATLLVSYNFYTMHRGVGSQTASRRSGQVLGVVLTVWAASLLLSALPLCGWGAFVRTPWGCLVDCSSSYVLFLSIVYALAFGLLVGLSVPLTHRLLCSEEPPRLHSNYQEISRGASIPGTPPTAGRVVSLSPEDAPGPSLRRSGGCSPSSDTVFGPGAPAAAGAEACRRENRGTLYGTRSFTVSVAQKRFALILALTKVVLWLPMMMHMVVQNVVGFQSLPLETFSFLLTLLATTVTPVFVLSKRWTHLPCGCIINCRQNAYAVASDGKKIKRKGFEFNLSFQKSYGIYKIAHEDYYDDDENSIFYHNLMNSECETTKDPQRDNRNIFNAIKVEISTTPSLDSSTQRGINKCTNTDITEAKQDSNNKKDAFSDKTGGDINYEETTFSEGPERRLSHEESQKPDLSDWEWCRSKSERTPRQRSGYALAIPLCAFQGTVSLHAPTGKTLSLSTYEVSAEGQKITPASKKIEVYRSKSVGHEPNSEDSSSTFVDTSVKIHLEVLEICDNEEALDTVSIISNISQSSTQVRSPSLRYSRKENRFVSCDLGETASYSLFLPTSNPDGDINISIPDTVEAHRQNSKRQHQERDGYQEEIQLLNKAYRKREEESKGS

SEQ ID NO: 11123 - protein, 1674 aa, Homo sapiens
MTEAITEAAVASSEEVSEERDDLGPLELHDSGTFQQVVNLLDIIDSESAKTDTTGAGLDMRKTLASVIIMEKATTEPSVVINTLIRCLQVPEISTQRKVNIYNILQDIIQQEGELEEQCVQRLVAIASKEMREIPEMEGYMKAEVASDTLVALSRNHFSLVMYELQHHLKPLNLTDEFVIITLAKLANGNVFEFMPYMGITLATIFTMLRLANEAKIRQAICSAMETFCETVQFYLKHLEESVYPVMTEEEFALKVFPMYRYFVTVWLRHYNPEVKLGVIKSLKPMLGLLLPNDDLREQVYDYIPLLLAEYQGSLEVLFVTQVLRQILELSVTTNTPVPQMQLHTIFTELHVQVCNKAPAQHQYSSQNLMEMVHCFVALARSYPKELMKFFFSQMETNKEAVRVGTLNLIRAIVSADEPRMSIRAIYLAIRVVKNTISDTRSKVRMAILHIIGQLALCGYQERIKGWGLKYLSVQLTLSTYKLTNRREKFYQRDLEERMVHKVTMDTVKIITSSVSGMTTEFWVRLLCYIMETDYVEALTPICISLTNLAEHQLHGQDVDVSVAGKSRQVDLPAPQKLLARLLVLMSSPYKGEGRGIAMLNLLRTLSQSIAPSMADMWELEIALLVRYLEEHTEFTWDQKAWEDKLIQFLRNSLKKTRGSSWSLRLSKELNNQIASFDSPSLEKGFLYRALGFTLATGLEASKVEVLLLELLYKTDYSNDFDSEGVIMCFGLCARGQVKTVLNVLHDFEERIQESEQSWQISAWRKDHPWRRETVKSALMVMYSCVASYCHPQLLLNLVDSPITAKIIHHYVSSCQDICLKMAFMKSVVQVTKAINNIKDLEDFHFAQKTTLTSIIVAVIKAEPTDNLVSPVRALAMEALSHLSKLKPFYSTEENSELMDISIHSVISLQLPGEDNESIKTLYANALSSLEQLMESLLQRQLDPKGLQEMVQLLEKWILSEKEWEREKAVSLHLYLMWIYVHSTAVCIHLKLGQFGTMVGLIAPCTCDAHQRTRMASMNVLSSLLDLHASQTCSLWGPSKQKELEKCKGDLQSTDVEKIFCASSRIAKVVCMEFSCDEVVSLIQKLCENTGAMNLQHDKASVTWIAFFLQMRAKELEDKVAEILSAILVHLPVVDHPEVRRLLIDGILLLAHHHQETILTSLLRQPLPMESHLAEVWLAVSENVPFARTMLHSLMGRLQSRLSPRISATSKADIWRLAAVDPLMTLCTIHLLIQKLDENDKLPDFLPDLIYTLLLQLGSSHRPEAAPPVLKMWKLVHTTPLPEEMNLQRVTIKSMQLLFKRVKSQHLAHTLDEQAVWDLLQDGGTFLEGVSLLARLCMQHVEGHRQRLAELVLRGMDSEVLSCRISSTAVCFMSGPVLYQEKLLKPAALLLEKGADQEEDEALRVLSLRALGNMALGAPKKVKQYRKVLLEKCLGPLREPVSNSVTAEGMEALTKILAELREGDVGSSFDAMSEQCRIFFDNESELLRLKAFILFGKLARVVGMSKKHFFKGEVKKAWIPLMLHSQDPCSNAAQACMATMFQCVHFWGWKSLEHPSGPSDTATDDKMTVFQTTMCSILTRKKPAVLYRFLLETMAYVKNNLSRIRIAACNLAGIIMKQMSTHYLKKLDFPALRNSLQELQLDPDPGVRRAALETLTVLDSCSQHGFLASPQGMS

SEQ ID NO: 11124 - protein, 464 aa, Homo sapiens
MAGQDPALSTSHPFYDVARHGILQVAGDDRFGRRVVTFSCCRMPPSHELDHQRLLEYLKYTLDQYVENDYTIVYFHYGLNSRNKPSLGWLQSAYKEFDRKDGDLTMWPRLVSNSKLKRSSHLSLPKYWDYRYKKNLKALYVVHPTSFIKVLWNILKPLISHKFGKKVIYFNYLSELHEHLKYDQLVIPPEVLRYDEKLQSLHEGRTPPPTKTPPPRPPLPTQQFGVSLQYLKDKNQGELIPPVLRFTVTYLREKGLRTEGLFRRSASVQTVREIQRLYNQGKPVNFDDYGDIHIPAVILKTFLRELPQPLLTFQAYEQILGITCVESSLRVTGCRQILRSLPEHNYVVLRYLMGFLHAVSRESIFNKMNSSNLACVFGLNLIWPSQGVSSLSALVPLNMFTELLIEYYEKIFSTPEAPGEHGLAPWEQGSRAAPLQEAVPRTQATGLTKPTLPPSPLMAARRRL

SEQ ID NO: 11125 - protein, 3801 aa, Homo sapiens
MSTDSNSLAREFLTDVNRLCNAVVQRVEAREEEEEETHMATLGQYLVHGRGFLLLTKLNSIIDQALTCREELLTLLLSLLPLVWKIPVQEEKATDFNLPLSADIILTKEKNSSSQRSTQEKLHLEGSALSSQVSAKVNVFRKSRRQRKITHRYSVRDARKTQLSTSDSEANSDEKGIAMNKHRRPHLLHHFLTSFPKQDHPKAKLDRLATKEQTPPDAMALENSREIIPRQGSNTDILSEPAALSVISNMNNSPFDLCHVLLSLLEKVCKFDVTLNHNSPLAASVVPTLTEFLAGFGDCCSLSDNLESRVVSAGWTEEPVALIQRMLFRTVLHLLSVDVSTAEMMPENLRKNLTELLRAALKIRICLEKQPDPFAPRQKKTLQEVQEDFVFSKYRHRALLLPELLEGVLQILICCLQSAASNPFYFSQAMDLVQEFIQHHGFNLFETAVLQMEWLVLRDGVPPEASEHLKALINSVMKIMSTVKKVKSEQLHHSMCTRKRHRRCEYSHFMHHHRDLSGLLVSAFKNQVSKNPFEETADGDVYYPERCCCIAVCAHQCLRLLQQASLSSTCVQILSGVHNIGICCCMDPKSVIIPLLHAFKLPALKNFQQHILNILNKLILDQLGGAEISPKIKKAACNICTVDSDQLAQLEETLQGNLCDAELSSSLSSPSYRFQGILPSSGSEDLLWKWDALKAYQNFVFEEDRLHSIQIANHICNLIQKGNIVVQWKLYNYIFNPVLQRGVELAHHCQHLSVTSAQSHVCSHHNQCLPQDVLQIYVKTLPILLKSRVIRDLFLSCNGVSQIIELNCLNGIRSHSLKAFETLIISLGEQQKDASVPDIDGIDIEQKELSSVHVGTSFHHQQAYSDSPQSLSKFYAGLKEAYPKRRKTVNQDVHINTINLFLCVAFLCVSKEAESDRESANDSEDTSGYDSTASEPLSHMLPCISLESLVLPSPEHMHQAADIWSMCRWIYMLSSVFQKQFYRLGGFRVCHKLIFMIIQKLFRSHKEEQGKKEGDTSVNENQDLNRISQPKRTMKEDLLSLAIKSDPIPSELGSLKKSADSLGKLELQHISSINVEEVSATEAAPEEAKLFTSQESETSLQSIRLLEALLAICLHGARTSQQKMELELPNQNLSVESILFEMRDHLSQSKVIETQLAKPLFDALLRVALGNYSADFEHNDAMTEKSHQSAEELSSQPGDFSEEAEDSQCCSFKLLVEEEGYEADSESNPEDGETQDDGVDLKSETEGFSASSSPNDLLENLTQGEIIYPEICMLELNLLSASKAKLDVLAHVFESFLKIIRQKEKNVFLLMQQGTVKNLLGGFLSILTQDDSDFQACQRVLVDLLVSLMSSRTCSEELTLLLRIFLEKSPCTKILLLGILKIIESDTTMSPSQYLTFPLLHAPNLSNGVSSQKYPGILNSKAMGLLRRARVSRSKKEADRESFPHRLLSSWHIAPVHLPLLGQNCWPHLSEGFSVSLWFNVECIHEAESTTEKGKKIKKRNKSLILPDSSFDGTESDRPEGAEYINPGERLIEEGCIHIISLGSKALMIQVWADPHNATLIFRVCMDSNDDMKAVLLAQVESQENIFLPSKWQHLVLTYLQQPQGKRRIHGKISIWVSGQRKPDVTLDFMLPRKTSLSSDSNKTFCMIGHCLSSQEEFLQLAGKWDLGNLLLFNGAKVGSQEAFYLYACGPNHTSVMPCKYGKPVNDYSKYINKEILRCEQIRELFMTKKDVDIGLLIESLSVVYTTYCPAQYTIYEPVIRLKGQMKTQLSQRPFSSKEVQSILLEPHHLKNLQPTEYKTIQGILHEIGGTGIFVFLFARVVELSSCEETQALALRVILSLIKYNQQRVHELENCNGLSMIHQVLIKQKCIVGFYILKTLLEGCCGEDIIYMNENGEFKLDVDSNAIIQDVKLLEELLLDWKIWSKAEQGVWETLLAALEVLIRADHHQQMFNIKQLLKAQVVHHFLLTCQVLQEYKEGQLTPMPREVCRSFVKIIAEVLGSPPDLELLTIIFNFLLAVHPPTNTYVCHNPTNFYFSLHIDGKIFQEKVRSIMYLRHSSSGGRSLMSPGFMVISPSGFTASPYEGENSSNIIPQQMAAHMLRSRSLPAFPTSSLLTQSQKLTGSLGCSIDRLQNIADTYVATQSKKQNSLGSSDTLKKGKEDAFISSCESAKTVCEMEAVLSAQVSVSDVPKGVLGFPVVKADHKQLGAEPRSEDDSPGDESCPRRPDYLKGLASFQRSHSTIASLGLAFPSQNGSAAVGRWPSLVDRNTDDWENFAYSLGYEPNYNRTASAHSVTEDCLVPICCGLYELLSGVLLILPDVLLEDVMDKLIQADTLLVLVNHPSPAIQQGVIKLLDAYFARASKEQKDKFLKNRGFSLLANQLYLHRGTQELLECFIEMFFGRHIGLDEEFDLEDVRNMGLFQKWSVIPILGLIETSLYDNILLHNALLLLLQILNSCSKVADMLLDNGLLYVLCNTVAALNGLEKNIPMSEYKLLACDIQQLFIAVTIHACSSSGSQYFRVIEDLIVMLGYLQNSKNKRTQNMAVALQLRVLQAAMEFIRTTANHDSENLTDSLQSPSAPHHAVVQKRKSIAGPRKFPLAQTESLLMKMRSVANDELHVMMQRRMSQENPSQATETELAQRLQRLTVLAVNRIIYQEFNSDIIDILRTPENVTQSKTSVFQTEISEENIHHEQSSVFNPFQKEIFTYLVEGFKVSIGSSKASGSKQQWTKILWSCKETFRMQLGRLLVHILSPAHAAQERKQIFEIVHEPNHQEILRDCLSPSLQHGAKLVLYLSELIHNHQGELTEEELGTAELLMNALKLCGHKCIPPSASTKADLIKMIKEEQKKYETEEGVNKAAWQKTVNNNQQSLFQRLDSKSKDISKIAADITQAVSLSQGNERKKVIQHIRGMYKVDLSASRHWQELIQQLTHDRAVWYDPIYYPTSWQLDPTEGPNRERRRLQRCYLTIPNKYLLRDRQKSEDVVKPPLSYLFEDKTHSSFSSTVKDKAASESIRVNRRCISVAPSRETAGELLLGKCGMYFVEDNASDTVESSSLQGELEPASFSWTYEEIKEVHKRWWQLRDNAVEIFLTNGRTLLLAFDNTKVRDDVYHNILTNNLPNLLEYGNITALTNLWYTGQITNFEYLTHLNKHAGRSFNDLMQYPVFPFILADYVSETLDLNDLLIYRNLSKPIAVQYKEKEDRYVDTYKYLEEEYRKGAREDDPMPPVQPYHYGSHYSNSGTVLHFLVRMPPFTKMFLAYQDQSFDIPDRTFHSTNTTWRLSSFESMTDVKELIPEFFYLPEFLVNREGFDFGVRQNGERVNHVNLPPWARNDPRLFILIHRQALESDYVSQNICQWIDLVFGYKQKGKASVQAINVFHPATYFGMDVSAVEDPVQRRALETMIKTYGQTPRQLFHMAHVSRPGAKLNIEGELPAAVGLLVQFAFRETREQVKEITYPSPLSWIKGLKWGEYVGSPSAPVPVVCFSQPHGERFGSLQALPTRAICGLSRNFCLLMTYSKEQGVRSMNSTDIQWSAILSWGYADNILRLKSKQSEPPVNFIQSSQQYQVTSCAWVPDSCQLFTGSKCGVITAYTNRFTSSTPSEIEMETQIHLYGHTEEITSLFVCKPYSILISVSRDGTCIIWDLNRLCYVQSLAGHKSPVTAVSASETSGDIATVCDSAGGGSDLRLWTVNGDLVGHVHCREIICSVAFSNQPEGVSINVIAGGLENGIVRLWSTWDLKPVREITFPKSNKPIISLTFSCDGHHLYTANSDGTVIAWCRKDQQRLKQPMFYSFLSSYAAG

SEQ ID NO: 11126 - protein, 1382 aa, Homo sapiens
MSTDSNSLAREFLTDVNRLCNAVVQRVEAREEEEEETHMATLGQYLVHGRGFLLLTKLNSIIDQALTCREELLTLLLSLLPLVWKIPVQEEKATDFNLPLSADIILTKEKNSSSQRSTQEKLHLEGSALSSQVSAKVNVFRKSRRQRKITHRYSVRDARKTQLSTSDSEANSDEKGIAMNKHRRPHLLHHFLTSFPKQDHPKAKLDRLATKEQTPPDAMALENSREIIPRQGSNTDILSEPAALSVISNMNNSPFDLCHVLLSLLEKVCKFDVTLNHNSPLAASVVPTLTEFLAGFGDCCSLSDNLESRVVSAGWTEEPVALIQRMLFRTVLHLLSVDVSTAEMMPENLRKNLTELLRAALKIRICLEKQPDPFAPRQKKTLQEVQEDFVFSKYRHRALLLPELLEGVLQILICCLQSAASNPFYFSQAMDLVQEFIQHHGFNLFETAVLQMEWLVLRDGVPPEASEHLKALINSVMKIMSTVKKVKSEQLHHSMCTRKRHRRCEYSHFMHHHRDLSGLLVSAFKNQVSKNPFEETADGDVYYPERCCCIAVCAHQCLRLLQQASLSSTCVQILSGVHNIGICCCMDPKSVIIPLLHAFKLPALKNFQQHILNILNKLILDQLGGAEISPKIKKAACNICTVDSDQLAQLEETLQGNLCDAELSSSLSSPSYRFQGILPSSGSEDLLWKWDALKAYQNFVFEEDRLHSIQIANHICNLIQKGNIVVQWKLYNYIFNPVLQRGVELAHHCQHLSVTSAQSHVCSHHNQCLPQDVLQIYVKTLPILLKSRVIRDLFLSCNGVSQIIELNCLNGIRSHSLKAFETLIISLGEQQKDASVPDIDGIDIEQKELSSVHVGTSFHHQQAYSDSPQSLSKFYAGLKEAYPKRRKTVNQDVHINTINLFLCVAFLCVSKEAESDRESANDSEDTSGYDSTASEPLSHMLPCISLESLVLPSPEHMHQAADIWSMCRWIYMLSSVFQKQFYRLGGFRVCHKLIFMIIQKLFRSHKEEQGKKEGDTSVNENQDLNRISQPKRTMKEDLLSLAIKSDPIPSELGSLKKSADSLGKLELQHISSINVEEVSATEAAPEEAKLFTSQESETSLQSIRLLEALLAICLHGARTSQQKMELELPNQNLSVESILFEMRDHLSQSKVIETQLAKPLFDALLRVALGNYSADFEHNDAMTEKSHQSAEELSSQPGDFSEEAEDSQCCSFKLLVEEEGYEADSESNPEDGETQDDGVDLKSETEGFSASSSPNDLLENLTQGEIIYPEICMLELNLLSASKAKLDVLAHVFESFLKIIRQKEKNVFLLMQQGTVKNLLGGFLSILTQDDSDFQACQRVLVDLLVSLMSSRTCSEELTLLLRIFLEKSPCTRATDQKVQST

SEQ ID NO: 11127 - protein, 763 aa, Homo sapiens
MATPGSEPQPFVPALSVATLHPLHHPHHHHHHHQHHGGTGAPGGAGGGGGGSGGFNLPLNRGLERALEEAANSGGLNLSARKLKEFPRTAAPGHDLSDTVQADLSKNRLVEVPMELCHFVSLEILNLYHNCIRVIPEAIVNLQMLTYLNLSRNQLSALPACLCGLPLKVLIASNNKLGSLPEEIGQLKQLMELDVSCNEITALPQQIGQLKSLRELNVRRNYLKVLPQELVDLSLVKFDFSCNKVLVIPICFREMKQLQVLLLENNPLQSPPAQICTKGKVHIFKYLSIQACQIKTADSLYLHTMERPHLHQHVEDGKKDSDSGVGSDNGDKRLSATEPSDEDTVSLNVPMSNIMEEEQIIKEDSCHRLSPVKGEFHQEFQPEPSLLGDSTNSGEERDQFTDRADGLHSEFMNYKARAEDCEELLRIEEDVHWQTEGIISSSKDQDMDIAMIEQLREAVDLLQDPNGLSTDITERSVLNLYPMGSAEALELQDSALNGQIQLETSPVCEVQSDLTLQSNGSQYSPNEIRENSPAVSPTTNSTAPFGLKPRSDPALILPPISFNTLTQAQTWDSSSYSVPSEGDSDNVFLRPQRNLESIDPQFTIRRKMEQMREEKELVEQLRESIEMRLKVSLHEDLGAALMDGVVLCHLVNHIRPRSVASIHVPSPAVPKLSMAKCRRNVENFLEACRKLGVPEADLCSPCDILQLDFRHIRKTVDTLLALGEKAPPPTSALRSRDLIGFCLVHILFIVLVYITYHWNALSA

SEQ ID NO: 11128 - protein, 728 aa, Homo sapiens
MATPGSEPQPFVPALSVATLHPLHHPHHHHHHHQHHGGTGAPGGAGGGGGGSGGFNLPLNRGLERALEEAANSGGLNLSARKLKEFPRTAAPGHDLSDTVQADLSKNRLVEVPMELCHFVSLEILNLYHNCIRVIPEAIVNLQMLTYLNLSRNQLSALPACLCGLPLKVLIASNNKLGSLPEEIGQLKQLMELDVSCNEITALPQQIGQLKSLRELNVRRNYLKVLPQELVDLSLVKFDFSCNKVLVIPICFREMKQLQVLLLENNPLQSPPAQICTKGKVHIFKYLSIQACQIKTADSLYLHTMERPHLHQHVEDGKKDSDSGVGSDNGDKRLSATEPSDEDTVSLNVPMSNIMEEEQIIKEDSCHRLSPVKGEFHQEFQPEPSLLGDSTNSGEERDQFTDRADGLHSEFMNYKARAEDCEELLRIEEDVHWQTEGIISSSKDQDMDIAMIEQLREAVDLLQDPNGLSTDITERSVLNLYPMGSAEALELQDSALNGQIQLETSPVCEVQSDLTLQSNGSQYSPNEIRENSPAVSPTTNSTAPFGLKPRSVFLRPQRNLESIDPQFTIRRKMEQMREEKELVEQLRESIEMRLKVSLHEDLGAALMDGVVLCHLVNHIRPRSVASIHVPSPAVPKLSMAKCRRNVENFLEACRKLGVPEADLCSPCDILQLDFRHIRKTVDTLLALGEKAPPPTSALRSRDLIGFCLVHILFIVLVYITYHWNALSA

SEQ ID NO: 11129 - protein, 547 aa, Homo sapiens
MRALTVQRVKFAMDLPLLKRAGQDLAEKTKNFVSRSLVIGEVLSMADMATGVKCGIIYWLFGGAIRNLGSPEHVTKWFQPLQEQKYTGMFAMTERGHGSNARGIQTEATFDLSAQEFVIDTPCENAEKMYIGNAMYGNYAAVFAQLIIDGRSQGPHCFIVPVRDENGSLYPGVTAIDMMYKEGLHGVDNGILIFDKVRIPRENLLDKFGSVAPDGQYHSPIRNKSARFNAMLAALTPSRLAVAFQAMGAMKLGLTIAIRYSHSRRQFGPKTKEEVKIIEHQTQTLRLMPHLATALALTFVSRYAGALLDEDVFQGKELVNSRSLQALVAGLKAYSTWENIRCLQDCRECTGGMGYMMENRISGLKCDTDVFATFEGDDVVMLQVVGRELLAQYTKQYEEKPLFGLLQNWAESVGDKLRTSFLAFNMDTVDDLAFLLKAVKFRERVLQRGLVARIYYKVKTKKEDFFHAWNSCLHHVASLSLAHTHRVTLEQFSLAVKSCPDQEDQTLLMKFCLLYGTKLVFQERAWYLEHKYLTPMASTRIRNQERC

SEQ ID NO: 11130 - protein, 1581 aa, Homo sapiens
MPLAFCGSENHSAAYRVDQGVLNNGCFVDALNVVPHVFLLFITFPILFIGWGSQSSKVHIHHSTWLHFPGHNLRWILTFMLLFVLVCEIAEGILSDGVTESHHLHLYMPAGMAFMAAVTSVVYYHNIETSNFPKLLIALLVYWTLAFITKTIKFVKFLDHAIGFSQLRFCLTGLLVILYGMLLLVEVNVIRVRRYIFFKTPREVKPPEDLQDLGVRFLQPFVNLLSKGTYWWMNAFIKTAHKKPIDLRAIGKLPIAMRALTNYQRLCEAFDAQVRKDIQGTQGARAIWQALSHAFGRRLVLSSTFRILADLLGFAGPLCIFGIVDHLGKENDVFQPKTQFLGVYFVSSQEFLANAYVLAVLLFLALLLQRTFLQASYYVAIETGINLRGAIQTKIYNKIMHLSTSNLSMGEMTAGQICNLVAIDTNQLMWFFFLCPNLWAMPVQIIVGVILLYYILGVSALIGAAVIILLAPVQYFVATKLSQAQRSTLEYSNERLKQTNEMLRGIKLLKLYAWENIFRTRVETTRRKEMTSLRAFAIYTSISIFMNTAIPIAAVLITFVGHVSFFKEADFSPSVAFASLSLFHILVTPLFLLSSVVRSTVKALVSVQKLSEFLSSAEIREEQCAPHEPTPQGPASKYQAVPLRVVNRKRPAREDCRGLTGPLQSLVPSADGDADNCCVQIMGGYFTWTPDGIPTLSNITIRIPRGQLTMIVGQVGCGKSSLLLAALGEMQKVSGAVFWSSLPDSEIGEDPSPERETATDLDIRKRGPVAYASQKPWLLNATVEENIIFESPFNKQRYKMVIEACSLQPDIDILPHGDQTQIGERGINLSGGQRQRISVARALYQHANVVFLDDPFSALDIHLSDHLMQAGILELLRDDKRTVVLVTHKLQYLPHADWIIAMKDGTIQREGTLKDFQRSECQLFEHWKTLMNRQDQELEKETVTERKATEPPQGLSRAMSSRDGLLQDEEEEEEEAAESEEDDNLSSMLHQRAEIPWRACAKYLSSAGILLLSLLVFSQLLKHMVLVAIDYWLAKWTDSALTLTPAARNCSLSQECTLDQTVYAMVFTVLCSLGIVLCLVTSVTVEWTGLKVAKRLHRSLLNRIILAPMRFFETTPLGSILNRFSSDCNTIDQHIPSTLECLSRSTLLCVSALAVISYVTPVFLVALLPLAIVCYFIQKYFRVASRDLQQLDDTTQLPLLSHFAETVEGLTTIRAFRYEARFQQKLLEYTDSNNIASLFLTAANRWLEVRMEYIGACVVLIAAVTSISNSLHRELSAGLVGLGLTYALMVSNYLNWMVRNLADMELQLGAVKRIHGLLKTEAESYEGLLAPSLIPKNWPDQGKIQIQNLSVRYDSSLKPVLKHVNALIAPGQKIGICGRTGSGKSSFSLAFFRMVDTFEGHIIIDGIDIAKLPLHTLRSRLSIILQDPVLFSGTIRFNLDPERKCSDSTLWEALEIAQLKLVVKALPGGLDAIITEGGENFSQGQRQLFCLARAFVRKTSIFIMDEATASIDMATENILQKVVMTAFADRTVVTIAHRVHTILSADLVIVLKRGAILEFDKPEKLLSRKDSVFASFVRADK

SEQ ID NO: 11131 - protein, 312 aa, Homo sapiens
MMEPREAGQHVGAANGAQEDVAFNLIILSLTEGLGLGGLLGNGAVLWLLSSNVYRNPFAIYLLDVACADLIFLGCHMVAIVPDLLQGRLDFPGFVQTSLATLRFFCYIVGLSLLAAVSVEQCLAALFPAWYSCRRPRHLTTCVCALTWALCLLLHLLLSGACTQFFGEPSRHLCRTLWLVAAVLLALLCCTMCGASLMLLLRVERGPQRPPPRGFPGLILLTVLLFLFCGLPFGIYWLSRNLLWYIPHYFYHFSFLMAAVHCAAKPVVYFCLGSAQGRRLPLRLVLQRALGDEAELGAVRETSRRGLVDIAA

SEQ ID NO: 11132 - protein, 4462 aa, Homo sapiens
MTMAPDVRLEYLEEVASIVLKFKPDKWSKLIGAEENVALFTEFFEKPDVQVLVLTLNAAGMIIPCLGFPQSLKSKGVYFIKTKSENINKDNYRARLLYGDISPTPVDQLIAVVEEVLSSLLNQSENMAGWPQVVSEDIVKQVHRLKNEMFVMSGKIKGKTLLPIPEHLGSLDGTLESMERIPSSLDNLLLHAIETTIIDWSHQIRDVLSKDSAQALLDGLHPLPQVEFEFWDTRLLNLKCIHEQLNRPKVNKIVEILEKAKSCYWPALQNVYTNVTEGLKEANDIVLYLKPLRILLEEMEQADFTMLPTFIAKVLDTICFIWATSEYYNTPARIIVILQEFCNQIIEMTRTFLSPEEVLKGLQGEIEEVLSGISLAVNVLKELYQTYDFCCVNMKLFFKDKEPVPWEFPSSLAFSRINSFFQRIQTIEELYKTAIEFLKLEKIELGGVRGNLLGSLVTRIYDEVFELVKVFADCKYDPLDPGDSNFDRDYADFEIKIQDLDRRLATIFCQGFDDCSCIKSSAKLLYMCGGLMERPLILAEVAPRYSVMLELFDAELDNAKILYDAQMAASEEGNIPLIHKNMPPVAGQLKWSLELQERLEVSMKHLKHVEHPVMSGAEAKLTYQKYDEMMELLRCHREKIYQQWVAGVDQDCHFNLGQPLILRDAASNLIHVNFSKALVAVLREVKYLNFQQQKEIPDSAESLFSENETFRKFVGNLELIVGWYNEIKTIVKAVEFLLIKSELEAIDVKLLSAETTLFWNGEGVFQYIQEVREILHNLQNRMQKAKQNIEGISQAMKDWSANPLFERKDNKKEALLDLDGRIANLNKRYAAVRDAGVKIQAMVAENAELFRADTLSLPWKDYVIYIDDMVLDEFDQFIRKSLSFLMDNMVIDESIAPLFEIRMELDEDGLTFNPTLEVGSDRGFLALIEGLVNDIYNVARLIPRLAKDRMNYKMDLEDNTDLIEMREEVSSLVINAMKEAEEYQDSFERYSYLWTDNLQEFMKNFLIYGCAVTAEDLDTWTDDTIPKTPPTLAQFQEQIDSYEKLYEEVSKCENTKVFHGWLQCDCRPFKQALLSTIRRWGFMFKRHLSNHVTNSLADLEAFMKVARMGLTKPLKEGDYDGLVEVMGHLMKVKERQAATDNMFEPLKQTIELLKTYGEEMPEEIHLKLQELPEHWANTKKLAIQVKLTVAPLQANEVSILRRKCQQFELKQHEFRERFRREAPFSFSDPNPYKSLNKQQKSISAMEGIMEALSKSGGLFEVPVPDYKQLKACHREVRLLKELWDMVVVVNTSIEDWKTTKWKDINVEQMDIDCKKFAKDMRSLDKEMKTWDAFVGLDNTVKNVITSLRAVSELQNPAIRERHWQQLMQATQVKFKMSEETTLADLLQLNLHSYEDEVRNIVDKAVKESGMEKVLKALDSTWSMMEFQHEPHPRTGTMMLKSSEVLVETLEDNQVQLQNLMMSKYLAHFLKEVTSWQQKLSTADSVISIWFEVQRTWSHLESIFIGSEDIRTQLPGDSQRFDDINQEFKALMEDAVKTPNVVEATSKPGLYNKLEALKKSLAICEKALAEYLETKRLAFPRFYFVSSADLLDILSNGNDPVEVSRHLSKLFDSLCKLKFRLDASDKPLKVGLGMYSKEDEYMVFDQECDLSGQVEVWLNRVLDRMCSTLRHEIPEAVVTYEEKPREQWILDYPAQVALTCTQIWWTTEVGLAFARLEEGYENAIRDYNKKQISQLNVLITLLMGNLNAGDRMKIMTICTIDVHARDVVAKMIVAKVESSQAFTWQAQLRHRWDEEKRHCFANICDAQIQYSYEYLGNTPRLVITPLTDRCYITLTQSLHLIMGGAPAGPAGTGKTETTKDLGRALGTMVYVFNCSEQMDYKSCGNIYKGLAQTGAWGCFDEFNRISVEVLSVIAVQVKCVQDAIRAKKKAFNFLGEIIGLIPTVGIFITMNPGYAGRAELPENLKALFRPCAMVVPDFELICEIMLMAEGFLEARLLARKFITLYTLCKELLSKQDHYDWGLRAIKSVLVVAGSLKRGDPSRAEDQVLMRALRDFNIPKIVTDDLPVFMGLIGDLFPALDVPRKRDLNFEKIIKQSIVELKLQAEDSFVLKVVQLEELLQVRHSVFIVGNAGSGKSQVLKSLNKTYQNLKRKPVAVDLDPKAVTCDELFGIINPVTREWKDGLFSTIMRDLANITHDGPKWIILDGDIDPMWIESLNTVMDDNKVLTLASNERIPLNRTMRLVFEISHLRTATPATVSRAGILYINPADLGWNPVVSSWIERRKVQSEKANLMILFDKYLPTCLDKLRFGFKKITPVPEITVIQTILYLLECLLTEKTVPPDSPRELYELYFVFTCFWAFGGAMFQDQLVDYRVEFSKWWINEFKTIKFPSQGTIFDYYIDPDTKKFLPWTDKVPSFELDPDVPLQASLVHTTETIRIRYFMDLLMEKSWPVMLVGNAGTGKSVLMGDKLESLNTDNYLVQAVPFNFYTTSAMLQGVLEKPLEKKSGRNYGPPGTKKLVYFIDDMNMPEVDKYGTVAPHTLIRQHMDHRHWYDRHKLTLKDIHNCQYVACMNPTSGSFTIDSRLQRHFCVFAVSFPGQEALTTIYNTILTQHLAFRSVSMAIQRISSQLVAAALALHQKITATFLPTAIKFHYVFNLRDLSNIFQGLLFSTAEVLKTPLDLVRLWLHETERVYGDKMVDEKDQETLHRVTMASTKKFFDDLGDELLFAKPNIFCHFAQGIGDPKYVPVTDMAPLNKLLVDVLDSYNEVNAVMNLVLFEDAVAHICRINRILESPRGNALLVGVGGSGKQSLSRLAAYISGLDVFQITLKKGYGIPDLKIDLAAQYIKAAVKNVPSVFLMTDSQVAEEQFLVLINDLLASGEIPGLFMEDEVENIISSMRPQVKSLGMNDTRETCWKFFIEKVRRQLKVILCFSPVGSVLRVRARKFPAVVNCTAIDWFHEWPEDALVSVSARFLEETEGIPWEVKASISFFMSYVHTTVNEMSRVYLATERRYNYTTPKTFLEQIKLYQNLLAKKRTELVAKIERLENGLMKLQSTASQVDDLKAKLAIQEAELKQKNESADQLIQVVGIEAEKVSKEKAIADQEEVKVEVINKNVTEKQKACETDLAKAEPALLAAQEALDTLNKNNLTELKSFGSPPDAVVNVTAAVMILTAPGGKIPKDKSWKAAKIMMGKVDTFLDSLKKFDKEHIPEACLKAFKPYQGNPTFDPEFIRSKSTAAAGLCSWCINIVRFYEVYCDVAPKRQALEEANAELAEAQEKLSRIKNKIAELNANLSNLTSAFEKATAEKIKCQQEADATNRVILLANRLVGGLASENIRWAESVENFRSQGVTLCGDVLLISAFVSYVGYFTKKYRNELMEKFWIPYIHNLKVPIPITNGLDPLSLLTDDADVATWNNQGLPSDRMSTENATILGNTERWPLIVDAQLQGIKWIKNKYRSELKAIRLGQKSYLDVIEQAISEGDTLLIENIGETVDPVLDPLLGRNTIKKGKYIKIGDKEVEYHPKFRLILHTKYFNPHYKPEMQAQCTLINFLVTRDGLEDQLLAAVVAKERPDLEQLKANLTKSQNEFKIVLKELEDSLLARLSAASGNFLGDTALVENLETTKHTASEIEEKVVEAKITEVKINEARENYRPAAERASLLYFILNDLNKINPVYQFSLKAFNVVFEKAIQRTTPANEVKQRVINLTDEITYSVYMYTARGLFERDKLIFLAQVTFQVLSMKKELNPVELDFLLRFPFKAGVVSPVDFLQHQGWGGIKALSEMDEFKNLDSDIEGSAKRWKKLVESEAPEKEIFPKEWKNKTALQKLCMVRCLRPDRMTYAIKNFVEEKMGSKFVEGRSVEFSKSYEESSPSTSIFFILSPGVDPLKDVEALGKKLGFTIDNGKLHNVSLGQGQEVVAENALDVAAEKGHWVILQNIHLVARWLGTLDKKLEHYSTGSHEDYRVFISAEPAPSPETHIIPQGILENAIKITNEPPTGMHANLHKALDLFTQDTLEMCTKEMEFKCMLFALCYFHAVVAERRKFGAQGWNRSYPFNNGDLTISINVLYNYLEANPKVPWDDLRYLFGEIMYGGHITDDWDRRLCRTYLAEYIRTEMLEGDVLLAPGFQIPPNLDYKGYHEYIDENLPPESPYLYGLHPNAEIGFLTVTSEKLFRTVLEMQPKETDSGAGTGVSREEKVKAVLDDILEKIPETFNMAEIMAKAAEKTPYVVVAFQECERMNILTNEMRRSLKELNLGLKGELTITTDVEDLSTALFYDTVPDTWVARAYPSMMGLAAWYADLLLRIRELEAWTTDFALPTTVWLAGFFNPQSFLTAIMQSMARKNEWPLDKMCLSVEVTKKNREDMTAPPREGSYVYGLFMEGARWDTQTGVIAEARLKELTPAMPVIFIKAIPVDRMETKNIYECPVYKTRIRGPTYVWTFNLKTKEKAAKWILAAVALLLQV

SEQ ID NO: 11133 - protein, 2028 aa, Homo sapiens
MDVTVSELLELFLQSPLVTWVKTFGPFGSGSQDNLTMYMDLVDGIFLNQIMLQIDPRPTNQRINKHVNNDVNLRIQNLTILVRNIKTYYQEVLQQLIVMNLPNVLMIGRDPLSGKSMEEIKKVLLLVLGCAVQCERKEEFIERIKQLDIETQAGIVAHIQEVTHNQENVFDLQWLELPDVAPEELEALSRSMVLHLRRLIDQRDECTELIVDLTQERDYLQAQHPPSPIKSSSADSTPSPTSSLSSEDKQHLAVELADTKARLRRVRQELEDKTEQLVDTRHEVDQLVLELQKVKQENIQLAADARSARAYRDELDSLREKANRVERLELELTRCKEKLHDVDFYKARMEELREDNIILIETKAMLEEQLTAARARGDKVHELEKENLQLKSKLHDLELDRDTDKKRIEELLEENMVLEIAQKQSMNESAHLGWELEQLSKNADLSDASRKSFVFELNECASSRILKLEKENQSLQSTIQGLRDASLVLEESGLKCGELEKENHQLSKKIEKLQTQLEREKQSNQDLETLSEELIREKEQLQSDMETLKADKARQIKDLEQEKDHLNRAMWSLRERSQVSSEARMKDVEKENKALHQTVTEANGKLSQLEFEKRQLHRDLEQAKEKGERAEKLERELQRLQEENGRLARKVTSLETATEKVEALEHESQGLQLENRTLRKSLDTLQNVSLQLEGLERDNKQLDAENLELRRLVETMRFTSTKLAQMERENQQLEREKEELRKNVDLLKALGKKSERLELSYQSVSAENLRLQQSLESSSHKTQTLESELGELEAERQALRRDLEALRLANAQLEGAEKDRKALEQEVAQLEKDKKLLEKEAKRLWQQVELKDAVLDDSTAKLSAVEKESRALDKELARCRDAAGKLKELEKDNRDLTKQVTVHARTLTTLREDLVLEKLKSQQLSSELDKLSQELEKVGLNRELLLQEDDSGSDTKYKILEGRNESALKTTLAMKEEKIVLLEAQMEEKASLNRQLESELQMLKKECETLRQNQGEGQHLQNSFKHPAGKTAASHQGKEAWGPGHKEATMELLRVKDRAIELERNNAALQAEKQLLKEQLQHLETQNVTFSSQILTLQKQSAFLQEHNTTLQTQTAKLQVENSTLSSQSAALTAQYTLLQNHHTAKETENESLQRQQEQLTAAYEALLQDHEHLGTLHERQSAEYEALIRQHSCLKTLHRNLELEHKELGERHGDMLKRKAELEEREKVLTTEREALQQEQRTNALAMGENQRLRGELDRVNFLHHQLKGEYEELHAHTKELKTSLNNAQLELNRWQARFDELKEQHQTMDISLTKLDNHCELLSRLKGNLEEENHHLLSQIQLLSQQNQMLLEQNMENKEQYHEEQKQYIDKLNALRRHKEKLEEKIMDQYKFYDPPPKKKNHWIGAKALVKLIKPKKEGSRERLKSTVDSPPWQLESSDPASPAASQPLRSQAENPDTPALGSNCAEERDAHNGSVGKGPGDLKPKRGSPHRGSLDRTDASTDLAMRSWPSELGSRTCSTSATTTAPSNSTPIARHPGRTKGYNSDDNLCEPSLEFEVPNHRQYVSRPSSLESSRNTSSNSSPLNLKGSSEQLHGRSESFSSEDLIPSRDLATLPREASTPGRNALGRHEYPLPRNGPLPQEGAQKRGTAPPYVGVRPCSASPSSEMVTLEEFLEESNRSSPTHDTPSCRDDLLSDYFRKASDPPAIGGQPGPPAKKEGAKMPTNFVAPTVKMAAPTSEGRPLKPGQYVKPNFRLTEAEAPPSVAPRQAQPPQSLSLGRPRQAPVPPASHAPASRSASLSRAFSLASADLLRASGPEACKQESPQKLGAPEALGGRETGSHTLQSPAPPSSHSLARERTPLVGKAGSSCQGPGPRSRPLDTRRFSLAPPKEERLAPLHQSATAPAIATAGAGAAAAGSGSNSQLLHFSPAAAPAARTKPKAPPRSGEVATITPVRAGLSLSEGDGVPGQGCSEGLPAKSPGRSPDLAPHLGRALEDCSRGSVSKSSPASPEPGGDPQTVWYEYGCV

SEQ ID NO: 11134 - protein, 927 aa, Homo sapiens
MPGPLGLLCFLALGLLGSAGPSGAAPPLCAAPCSCDGDRRVDCSGKGLTAVPEGLSAFTQALQLAGNDLSFIHPKALSGLKELKVLTLQNNQLKTVPSEAIRGLSALQSLRLDANHITSVPEDSFEGLVQLRHLWLDDNSLTEVPVHPLSNLPTLQALTLALNKISSIPDFAFTNLSSLVVLHLHNNKIRSLSQHCFDGLDNLETLDLNYNNLGEFPQAIKALPSLKELGFHSNSISVIPDGAFDGNPLLRTIHLYDNPLSFVGNSAFHNLSDLHSLVIRGASMVQQFPNLTGTVHLESLTLTGTKISSIPNNLCQEQKMLRTLDLSYNNIRDLPSFNGCHALEEISLQRNQIYQIKEGTFQGLISLRILDLSRNLIHEIHSRAFATLGPITNLDVSFNELTSFPTEGLNGLNQLKLVGNFKLKEALAAKDFVNLRSLSVPYAYQCCAFWGCDSYANLNTEDNSLQDHSVAQEKGTADAANVTSTLENEEHSQIIIHCTPSTGAFKPCEYLLGSWMIRLTVWFIFLVALFFNLLVILTTFASCTSLPSSKLFIGLISVSNLFMGIYTGILTFLDAVSWGRFAEFGIWWETGSGCKVAGFLAVFSSESAIFLLMLATVERSLSAKDIMKNGKSNHLKQFRVAALLAFLGATVAGCFPLFHRGEYSASPLCLPFPTGETPSLGFTVTLVLLNSLAFLLMAVIYTKLYCNLEKEDLSENSQSSMIKHVAWLIFTNCIFFCPVAFFSFAPLITAISISPEIMKSVTLIFFPLPACLNPVLYVFFNPKFKEDWKLLKRRVTKKSGSVSVSISSQGGCLEQDFYYDCGMYSHLQGNLTVCDCCESFLLTKPVSCKHLIKSHSCPALAVASCQRPEGYWSDCGTQSAHSDYADEEDSFVSDSSDQVQACGRACFYQSRGFPLVRYAYNLPRVKD

SEQ ID NO: 11135 - protein, 714 aa, Homo sapiens
MDIEDEENMSSSSTDVKENRNLDNVSPKDGSTPGPGEGSQLSNGGGGGPGRKRPLEEGSNGHSKYRLKKRRKTPGPVLPKNALMQLNEIKPGLQYTLLSQTGPVHAPLFVMSVEVNGQVFEGSGPTKKKAKLHAAEKALRSFVQFPNASEAHLAMGRTLSVNTDFTSDQADFPDTLFNGFETPDKAEPPFYVGSNGDDSFSSSGDLSLSASPVPASLAQPPLPVLPPFPPPSGKNPVMILNELRPGLKYDFLSESGESHAKSFVMSVVVDGQFFEGSGRNKKLAKARAAQSALAAIFNLHLDQTPSRQPIPSEGLQLHLPQVLADAVSRLVLGKFGDLTDNFSSPHARRKVLAGVVMTTGTDVKDAKVISVSTGTKCINGEYMSDRGLALNDCHAEIISRRSLLRFLYTQLELYLNNKDDQKRSIFQKSERGGFRLKENVQFHLYISTSPCGDARIFSPHEPILEGSRSYTQAGVQWCNHGSLQPRPPGLLSDPSTSTFQGAGTTEPADRHPNRKARGQLRTKIESGEGTIPVRSNASIQTWDGVLQGERLLTMSCSDKIARWNVVGIQGSLLSIFVEPIYFSSIILGSLYHGDHLSRAMYQRISNIEDLPPLYTLNKPLLSGISNAEARQPGKAPNFSVNWTVGDSAIEVINATTGKDELGRASRLCKHALYCRWMRVHGKVPSHLLRSKITKPNVYHESKLAAKEYQAAKVH

SEQ ID NO: 11136 - protein, 1580 aa, Homo sapiens
VLAEKFGDLDPSSAEFFLQEERLTQMRNEYERQCRVLQDQVDELQSELEEYRAQGRVLRLPLKNSPSEEVEANSGGIEPEHGLGSEECNPLNMSIEAELVIEQMKEQHHRDICCLRLELEDKVRHYEKQLDETVVSCKKAQENMKQRHENETHTLEKQISDLKNEIAELQGQAAVLKEAHHEATCRHEEEKKQLQVKLEEEKTHLQEKLRLQHEMELKARLTQAQASFEREREGLQSSAWTEEKVRGLTQELEQFHQEQLTSLVEKHTLEKEELRKELLEKHQRELQEGREKMETECNRRTSQIEAQFQSDCQKVTERCESALQSLEGRYRQELKDLQEQQREEKSQWEFEKDELTQECAEAQELLKETLKREKTTSLVLTQEREMLEKTYKEHLNSMVVERQQLLQDLEDLRNVSETQQSLLSDQILELKSSHKRELREREEVLCQAGASEQLASQRLERLEMEHDQERQEMMSKLLAMENIHKATCETADRERAEMSTEISRLQSKIKEMQQATSPLSMLQSGCQVIGEEEVEGDGALSLLQQGEQLLEENGDVLLSLQRAHEQAVKENVKMATEISRLQQRLQKLEPGLVMSSCLDEPATEFFGNTAEQTEQFLQQNRTKQVEGVTRRHVLSDLEDDEVRDLGSTGTSSVQRQEVKIEESEASVEGFSELENSEETRTESWELKNQISQLQEQLMMLCADCDRASEKKQDLLFDVSVLKKKLKMLERIPEASPKYKLLYEDVSRENDCLQEELRMMETRYDEALENNKELTAEVFRLQDELKKMEEVTETFLSLEKSYDEVKIENEGLNVLVLRLQGKIEKLQESVVQRCDCCLWEASLENLEIEPDGNILQLNQTLEECVPRVRSVHHVIEECKQENQYLEGNTQLLEKVKAHEIAWLHGTIQTHQERPRVQNQVILEENTTLLGFQDKHFQHQATIAELELEKTKLQELTRKLKERVTILVKQKDVLSHGEKEEELKAMMHDLQITCSEMQQKVELLRYESEKLQQENSILRNEITTLNEEDSISNLKLGTLNGSQEEMWQKTETVKQENAAVQKMVENLKKQISELKIKNQQLDLENTELSQKNSQNQEKLQELNQRLTEMLCQKEKEPGNSALEEREQEKFNLKEELERCKVQSSTLVSSLEAELSEVKIQTHIVQQENHLLKDELEKMKQLHRCPDLSDFQQKISSVLSYNEKLLKEKEALSEELNSCVDKLAKSSLLEHRIATMKQEQKSWEHQSASLKSQLVASQEKVQNLEDTVQNVNLQMSRMKSDLRVTQQEKEALKQEVMSLHKQLQNAGGKSWAPEIATHPSGLHNQQKRLSWDKLDHLMNEEQQLLWQENERLQTMVQNTKAELTHSREKVRQLESNLLPKHQKHLNPSGTMNPTEQEKLSLKRECDQFQKEQSPANRKVSQMNSLEQELETIHLENEGLKKKQVKLDEQLMEMQHLRSTATPSPSPHAWDLQLLQQQACPMVPREQFLQLQRQLLQAERINQHLQEELENRTSETNTPQGNQEQLVTVMEERMIEVEQKLKLVKRLLQEKVNQLKEQVSLPGHLCSPTSHSSFNSSFTSLYCH

SEQ ID NO: 11137 - protein, 326 aa, Homo sapiens
MEEGNNNEEVIHLNNFHCHRGQEWINLRDGPITISDSSDEERIPMLVTPAPQQHEEEDLDDDVILTEDDSEDDYGEFLDLGPPGISEFTKPSGQTEREPKPGPSHNQAANDIVNPRSEQKVIILEEGSLLYTESDPLETQNQSSEDSETELLSNLGESAALADDQAIEEDCWLDHPYFQSLNQQPREITNQVVPQERQPEAELGRLLFQHEFPGPAFPRPEPQQGGISGPSSPQPAHPLGEFEDQQLASDDEEPGPAFPMQESQEPNLENIWGQEAAEVDQELVELLVKETRCSIFVEAMKNGSVKWGQRTRSLKTFLDLIFYVDR

SEQ ID NO: 11138 - protein, 923 aa, Homo sapiens
MEEGNNNEEVIHLNNFHCHRGQEWINLRDGPITISDSSDEERIPMLVTPAPQQHEEEDLDDDVILTETNKPQRSRPNLIKPAAQWQDLKRLGEERPKKSRAAFESDKSSYFSVCNNPLFDSGAQDDSEDDYGEFLDLGPPGISEFTKPSGQTEREPKPGPSHNQAANDIVNPRSEQKVIILEEGSLLYTESDPLETQNQSSEDSETELLSNLGESAALADDQAIEEDCWLDHPYFQSLNQQPREITNQVVPQERQPEAELGRLLFQHEFPGPAFPRPEPQQGGISGPSSPQPAHPLGEFEDQQLASDDEEPGPAFPMQESQEPNLENIWGQEAAEVDQELVELLVKETEARFPDVANGFIEEIIHFKNYYDLNVLCNFLLENPDYPKREDRIIINPSSSLLASQDETKLPKIDFFDYSKLTPLDQRCFIQAADLLMADFKVLSSQDIKWALHELKGHYAITRKALSDAIKKWQELSPETSGKRKKRKQMNQYSYIDFKFEQGDIKIEKRMFFLENKRRHCRSYDRRALLPAVQQEQEFYEQKIKEMAEHEDFLLALQMNEEQYQKDGQLIECRCCYGEFPFEELTQCADAHLFCKECLIRYAQEAVFGSGKLELSCMEGSCTCSFPTSELEKVLPQTILYKYYERKAEEEVAAAYADELVRCPSCSFPALLDSDVKRFSCPNPHCRKETCRKCQGLWKEHNGLTCEELAEKDDIKYRTSIEEKMTAARIRKCHKCGTGLIKSEGCNRMSCRCGAQMCYLCRVSINGYDHFCQHPRSPGAPCQECSRCSLWTDPTEDDEKLIEEIQKEAEEEQKRKNGENTFKRIGPPLEKPVEKVQRVEALPRPVPQNLPQPQMPPYAFAHPPFPLPPVRPVFNNFPLNMGPIPAPYVPPLPNVRVNYDFGPIHMPLEHNLPMHFGPQPRHRF

SEQ ID NO: 11139 - protein, 710 aa, Homo sapiens [sequence omitted]

SEQ ID NO: 11140 - protein, 662 aa, Homo sapiens
MVSQSTVRQDSPVEPWEGISDHSGIIDGSPRLLNTDHPPCQLDIRLMRHKAVWINPQDVQQQPQDLQSQVPAAGNSGTHFVTDAASPSGPSPSCLGDSLAETTLSEDTTDSVGSASPHGSSEKSSSFSLSSTEVHMVRPGYSHRVSLPTSPGILATSPYPETDSAFFEPSHLTSAADEGAVQVSRRTISSNSFSPEVFVLPVDVEKENAHFYVADMIISAMEKMKCNILSQQQTESWSKEVSGLLGSDQPDSEMTFDTNIKQESGSSTSSYSGYEGCAVLQVSPVTETRTYHDVKEICKCDVDEFVILELGDFNDITETCSCSCSSSKSVTYEPDFNSAELLAKELYRVFQKCWILSVVNSQLAGSLSAAGSIVVNEECVRKDFESSMNVVQEIKFKSRIRGTEDWAPPRFQIIFNIHPPLKRDLVVAAQNFFCAGCGTPVEPKFVKRLRYCEYLGKYFCDCCHSYAESCIPARILMMWDFKKYYVSNFSKQLLDSIWHQPIFNLLSIGQSLYAKAKELDRVKEIQEQLFHIKKLLKTCRFANSALKEFEQVPGHLTDELHLFSLEDLVRIKKGLLAPLLKDILKASLAHVAGCELCQGKGFICEFCQNTTVIFPFQTATCRRCSACRACFHKQCFQSSECPRCARITARRKLLESVASAAT

SEQ ID NO: 11141 - protein, 998 aa, Homo sapiens
MKDSGDSKDQQLMVALRVRPISVAELEEGATLIAHKVDEQMVVLMDPMEDPDDILRAHRSREKSYLFDVAFDFTATQEMVYQATTKSLIEGVISGYNATVFAYGPTGCGKTYTMLGTDQEPGIYVQTLNDLFRAIEETSNDMEYEVSMSYLEIYNEMIRDLLNPSLGYLELREDSKGVIQVAGITEVSTINAKEIMQLLMKGNRQRTQEPTAANQTSSRSHAVLQVTVRQRSRVKNILQEVRQGRLFMIDLAGSERASQTQNRGQRMKEGAHINRSLLALGNCINALSDKGSNKYINYRDSKLTRLLKDSLGGNSRTVMIAHISPASSAFEESRNTLTYAGRAKNIKTRVKQNLLNVSYHIAQYTSIIADLRGEIQRLKRKIDEQTGRGQARGRQDRGDIRHIQAEVQLHSGQGEKAGMGQLREQLASAFQEQMDVRRRLLELENRAMEVQIDTSRHLLTIAGWKHEKSRRALKWREEQRKECYAKDDSEKDSDTGDDQPDILEPPEVAAARESIAALVDEQKQLRKQKLALEQRCRELRARGRRLEETLPRRIGSEEQREVLSLLCRVHELEVENTEMQSHALLRDGALRHRHEAVRRLEQHRSLCDEIIQGQRQIIDDYNLAVPQRLEELYEVYLRELEEGSLEQATIMDQVASRALQDSSLPKITPAGTSLTPDSDLESVKTLSSDAQHLQNSALPPLSTESEGHHVFKAGTGAWQAKSSSVPTPPPIQLGSLVTQEAPAQDSLGSWINSSPDSSENLSEIPLSHKERKEILTGTKCIWVKAARRRSRALGTEGRHLLAPATERSSLSLHSLSEGDDARPPGPLACKRPPSPTLQHAASEDNLSSSTGEAPSRAVGHHGDGPRPWLRGQKKSLGKKREESLEAKRRKRRSRSFEVTGQGLSHPKTHLLGPHQAERISDHRMPVCRHPAPGIRHLGKVTLPLAKVKLPPSQNTGPGDSSPLAVPPNPGGGSRRATRGPRLPHGTSTHGKDGCSRHN

SEQ ID NO: 11142 - protein, 938 aa, Homo sapiens
MNWNKGGPGTKRGFGFGGFAISAGKKEEPKLPQQSHSAFGATSSSSGFGKSAPPQLPSFYKIGSKRANFDEENAYFEDEEEDSSNVDLPYIPAENSPTRQQFHSKPVDSDSDDDPLEAFMAEVEDQAARDMKRLEEKDKERKNVKGIRDDIEEEDDQEAYFRYMAENPTAGVVQEEEEDNLEYDSDGNPIAPTKKIIDPLPPIDHSEIDYPPFEKNFYNEHEEITNLTPQQLIDLRHKLNLRVSGAAPPRPGSSFAHFGFDEQLMHQIRKSEYTQPTPIQCQGVPVALSGRDMIGIAKTGSGKTAAFIWPMLIHIMDQKELEPGDGPIAVIVCPTRELCQQIHAECKRFGKAYNLRSVAVYGGGSMWEQAKALQEGAEIVVCTPGRLIDHVKKKATNLQRVSYLVFDEADRMFDMGFEYQVRSIASHVRPDRQTLLFSATFRKKIEKLARDILIDPIRVVQGDIGEANEDVTQIVEILHSGPSKWNWLTRRLVEFTSSGSVLLFVTKKANAEELANNLKQEGHNLGLLHGDMDQSERNKVISDFKKKDIPVLVATDVAARGLDIPSIKTVINYDVARDIDTHTHRIGRTGRAGEKGVAYTLLTPKDSNFAGDLVRNLEGANQHVSKELLDLAMQNAWFRKSRFKGGKGKKLNIGGGGLGYRERPGLGSENMDRGNNNVMSNYEAYKPSTGAMGDRLTAMKAAFQSQYKSHFVAASLSNQKAGSSAAGASGWTSAGSLNSVPTNSAQQGHNSPDSPVTSAAKGIPGFGNTGNISGAPVTYPSAGAQGVNNTASGNNSREGTGGSNGKRERYTENRGSSRHSHGETGNRHSDSPRHGDGGRHGDGYRHPESSSRHTDGHRHGENRHGGSAGRHGENRGANDGRNGESRKEAFNRESKMEPKMEPKVDSSKMDKVDSKTDKTADGFAVPEPPKRKKSRWDS

SEQ ID NO: 11143 - protein, 1491 aa, Homo sapiens
MSRAVRLPVPCPVQLGTLRNDSLEAQLHEYVKQGNYVKVKKILKKGIYVDAVNSLGQTALFVAALLGLRKFVDVLVDYGSDPNHRCFDGSTPVHAAAFSGNQWILSKLLDAGGDLRLHDERGQNPKTWALTAGKERSTQIVEFMQRCASHMQAIIQGFSYDLLKKIDSPQRLVYSPSWCGGLVQGNPNGSPNRLLKAGVISAQNIYSFGFGKFYLTGATQMAYLGSLPVIGEKEVIQADDEPTFSFFSGPYMVMTNLVWNGSRVTVKELNLPTHPHCSRLRLADLLIAEQEHSSKLRHPYLLQLMAVCLSQDLEKTRLVYERITIGTLFSVLHERRSQFPVLHMEVIVHLLLQISDALRYLHFQGFIHRSLSSYAVHIISPGEARLTNLEYMLESEDRGVQRDLTRVPLPTQLYNWAAPEVILQKAATVKSDIYSFSMIMQEILTDDIPWKGLDGSVVKKAVVSGNYLEADVRLPKPYYDIVKSGIHVKQKDRTMNLQDIRYILKNDLKDFTGAQRTQPTESPRVQRYGLHPDVNVYLGLTSEHPRETPDMEIIELKEMGSQPHSPRVHSLFTEGTLDPQAPDPCLMARETQNQDAPCPAPFMAEEASSPSTGQPSLCSFEINEIYSGCLILEDDIEEPPGAASSLEADGPNQVDELKSMEEELDKMEREACCFGSEDESSSKAETEYSFDDWDWQNGSLSSLSLPESTREAKSNLNNMSTTEEYLISKCVLDLKIMQTIMHENDDRLRNIEQILDEVEMKQKEQEERMSLWATSREFTNAYKLPLAVGPPSLNYIPPVLQLSGGQKPDTSGNYPTLPRFPRMLPTLCDPGKQNTDEQFQCTQGAKDSLETSRIQNTSSQGRPRESTAQAKATQFNSALFTLSSHRQGPSASPSCHWDSTRMSVEPVSSEIYNAESRNKDDGKVHLKWKMEVKEMAKKAATGQLTVPPWHPQSSLTLESEAENEPDALLQPPIRSPENTDWQRVIEYHRENDEPRGNGKFDKTGNNDCDSDQHGRQPRLGSFTSIRHPSPRQKEQPEHSEAFQASSDTLVAVEKSYSHQSMQSTCSPESSEDITDEFLTPDGEYFYSSTAQENLALETSSPIEEDFEGIQGAFAQPQVSGEEKFQMRKILGKNAEILPRSQFQPVRSTEDEQEETSKESPKELKEKDISLTDIQDLSSISYEPDSSFKEASCKTPKINHAPTSVSTPLSPGSVSSAASQYKDCLESITFQVKTEFASCWNSQEFIQTLSDDFISVRERAKKLDSLLTSSETPPSRLTGLKRLSSFIGAGSPSLVKACDSSPPHATQRRSLPKVEAFSQHHIDELPPPSQELLDDIELLKQQQGSSTVLHENTASDGGGTANDQRHLEEQETDSKKEDSSMLLSKETEDLGEDTERAHSTLDEDLERWLQPPEESVELQDLPKGSERETNIKDQKVGEEKRKREDSITPERRKSEGVLGTSEEDELKSCFWKRLGWSESSRIIVLDQSDLSD

SEQ ID NO: 11144 - protein, 910 aa, Homo sapiens
MIDLSFLTEEEQEAIMKVLQRDAALKRAEEERVRHLPEKIKDDQQLKNMSGQWFYEAKAKRHRDKIHGADIIRASMRKKRPQIAAEQSKDRENGAKESWVNNVNKDAFLPPELAGVVEEPEEDAAPASPSSSVVNPASSVIDMSQENTRKPNVSPEKRKNPFNSSKLPEGHSSQQTKNEQSKNGRTGLFQTSKEDELSESKEKSTVADTSIQKLEKSKQTLPGLSNGSQIKAPIPKARKMIYKSTDLNKDDNQSFPRQRTDSLKARGAPRGILKRNSSSSSTDSETLRYNHNFEPKSKIVSPGLTIHERISEKEHSLEDNSSPNSLEPLKHVRFSAVKDELPQSPGLIHGREVGEFSVLESDRLKNGMEDAGDTEEFQSDPKPSQYRKPSLFHQSTSSPYVSKSETHQPMTSGSFPINGLHSHSEVLTARPQSMENSPTINEPKDKSSELTRLESVLPRSPADELSHCVEPEPSQVPGGSSRDRQQGSEEEPSPVLKTLERSAARKMPSKSLEDISSDSSNQAKVDNQPEELVRSAEDDEKPDQKPVTNECVPRISTVPTQPDNPFSHPDKLKRMSKSVPAFLQDEVSGSVMSVYSGDFGNLEVKGNIQFAIEYVESLKELHVFVAQCKDLAAADVKKQRSDPYVKAYLLPDKGKMGKKKTLVVKKTLNPVYNEILRYKIEKQILKTQKLNLSIWHRDTFKRNSFLGEVELDLETWDWDNKQNKQLRWYPLKRKTAPVALEAENRGEMKLALQYVPEPVPGKKLPTTGEVHIWVKECLDLPLLRGSHLNSFVKCTILPDTSRKSRQKTRAVGKTTNPIFNHTMVYDGFRPEDLMEACVELTVWDHYKLTNQFLGGLRIGFGTGKSYGTEVDWMDSTSEEVALWEKMVNSPNTWIEATLPLRMLLIAKISK

SEQ ID NO: 11145 - protein, 494 aa, Homo sapiens [sequence omitted]

SEQ ID NO: 11146 - protein, 678 aa, Homo sapiens
MRTVVLTMKASVIEMFLVLLVTGVHSNKETAKKIKRPKFTVPQINCDVKAGKIIDPEFIVKCPAGCQDPKYHVYGTDVYASYSSVCGAAVHSGVLDNSGGKILVRKVAGQSGYKGSYSNGVQSLSLPRWRESFIVLESKPKKGVTYPSALTYSSSKSPAAQAGETTKAYQRPPIPGTTAQPVTLMQLLAVTVAVATPTTLPRPSPSAASTTSIPRPQSVGHRSQEMDLWSTATYTSSQNRPRADPGIQRQDPSGAAFQKPVGADVSLGLVPKEELSTQSLEPVSLGDPNCKIDLSFLIDGSTSIGKRRFRIQKQLLADVAQALDIGPAGPLMGVVQYGDNPATHFNLKTHTNSRDLKTAIEKITQRGGLSNVGRAISFVTKNFFSKANGNRSGAPNVVVVMVDGWPTDKVEEASRLARESGINIFFITIEGAAENEKQYVVEPNFANKAVCRTNGFYSLHVQSWFGLHKTLQPLVKRVCDTDRLACSKTCLNSADIGFVIDGSSSVGTGNFRTVLQFVTNLTKEFEISDTDTRIGAVQYTYEQRLEFGFDKYSSKPDILNAIKRVGYWSGGTSTGAAINFALEQLFKKSKPNKRKLMILITDGRSYDDVRIPAMAAHLKGVITYAIGVAWAAQEELEVIATHPARDHSFFVDEFDNLHQYVPRIIQNICTEFNSQPRN

SEQ ID NO: 11147 - protein, 690 aa, Homo sapiens
MTTTVATDYDNIEIQQQYSDVNNRWDVDDWDNENSSARLFERSRIKALADEREAVQKKTFTKWVNSHLARVSCRITDLYTDLRDGRMLIKLLEVLSGERLPKPTKGRMRIHCLENVDKALQFLKEQRVHLENMGSHDIVDGNHRLTLGLIWTIILRFQIQDISVETEDNKEKKSAKDALLLWCQMKTAGYPNVNIHNFTTSWRDGMAFNALIHKHRPDLIDFDKLKKSNAHYNLQNAFNLAEQHLGLTKLLDPEDISVDHPDEKSIITYVVTYYHYFSKMKALAVEGKRIGKVLDNAIETEKMIEKYESLASDLLEWIEQTIIILNNRKFANSLVGVQQQLQAFNTYRTVEKPPKFTEKGNLEVLLFTIQSKMRANNQKVYMPREGKLISDINKAWERLEKAEHERELALRNELIRQEKLEQLARRFDRKAAMRETWLSENQRLVSQDNFGFDLPAVEAATKKHEAIETDIAAYEERVQAVVAVARELEAENYHDIKRITARKDNVIRLWEYLLELLRARRQRLEMNLGLQKIFQEMLYIMDWMDEMKVLVLSQDYGKHLLGVEDLLQKHTLVEADIGIQAERVRGVNASAQKFATDGEGYKPCDPQVIRDRVAHMEFCYQELCQLAAERRARLEESRRLWKFFWEMAEEEGWIREKEKILSSDDYGKDLTSVMRLLSKHRAFEDEMSGR

SEQ ID NO: 11148 - protein, 571 aa, Homo sapiens
MEPAERAGVGEPPEPGGRPEPGPRGFVPQKEIVYNKLLPYAERLDAESDLQLAQIKCNLGRAVQLQELWPGGLFWTRKLSTYIRLYGRKFSKEDHVLFIKLLYELVSIPKLEISMMQGFARLLINLLKKKELLSRADLELPWRPLYDMVERILYSKTEHLGLNWFPNSVENILKTLVKSCRPYFPADATAEMLEEWRPLMCPFDVTMQKAITYFEIFLPTSLPPELHHKGFKLWFDELIGLWVSVQNLPQWEGQLVNLFARLATDNIGYIDWDPYVPKIFTRILRSLNLPVGSSQVLVPRFLTNAYDIGHAVIWITAMMGGPSKLVQKHLAGLFNSITSFYHPSNNGRWLNKLMKLLQRLPNSVVRRLHRERYKKPSWLTPVPDSHKLTDQDVTDFVQCIIQPVLLAMFSKTGSLEAAQALQNLALMRPELVIPPVLERTYPALETLTEPHQLTATLSCVIGVARSLVSGGRWFPEGPTHMLPLLMRALPGVDPNDFSKCMITFQFIATFSTLVPLVDCSSVLQERNDLTEVERELCSATAEFEDFVLQFMDRWPFRRFLIFLLHIYLKQE

SEQ ID NO: 11149 - protein, 619 aa, Homo sapiens
MSHPDYRMNLRPLGTPRGVSAVAGPHDIGASPGDKKSKNRSTRGKKKSIFETYMSKEDVSEGLKRGTLIQGVLRINPKKFHEAFIPSPDGDRDIFIDGVVARNRALNGDLVVVKLLPEEHWKVVKPESNDKETEAAYESDIPEELCGHHLPQQSLKSYNDSPDVIVEAQFDGSDSEDGHGITQNVLVDGVKKLSVCVSEKGREDGDAPVTKDETTCISQDTRALSEKSLQRSAKVVYILEKKHSRAATGFLKLLADKNSELFRKYALFSPSDHRVPRIYVPLKDCPQDFVARPKDYANTLFICRIVDWKEDCNFALGQLAKSLGQAGEIEPETEGILTEYGVDFSDFSSEVLECLPQGLPWTIPPEEFSKRRDLRKDCIFTIDPSTARDLDDALSCKPLADGNFKVGVHIADVSYFVPEGSDLDKVAAERATSVYLVQKVVPMLPRLLCEELCSLNPMSDKLTFSVIWTLTPEGKILDEWFGRTIIRSCTKLSYEHAQSMIESPTEKIPAKELPPISPEHSSEEVHQAVLNLHGIAKQLRQQRFVDGALRLDQLKLAFTLDHETGLPQGCHIYEYRESNKPCCAGTPRPKQGCSVTWWNSATRWGCPWTSAPQEPSIKA

SEQ ID NO: 11150 - protein, 106 aa, Homo sapiens
TVAAPSVFIFPPSDEQLKSGTASVVCLLNNFYPREAKVQWKVDNALQSGNSQESVTEQDSKDSTYSLSSTLTLSKADYEKHKVYACEVTHQGLSSPVTKSFNRGEC

SEQ ID NO: 11151 - protein, 121 aa, Homo sapiens
MVLQTQVFISLLLWISGAYGDIVMTQSPDSLAVSLGERATINCKSSQSVLYSSNNKNYLAWYQQKPGQPPKLLIYWASTRESGVPDRFSGSGSGTDFTLTISSLQAEDVAVYYCQQYYSTP

SEQ ID NO: 11152 - protein, 119 aa, Homo sapiens
MAWTPLLFLTLLLHCTGSLSQLVLTQSPSASASLGASVKLTCTLSSGHSSYAIAWHQQQPEKGPRYLMKLNSDGSHSKGDGIPDRFSGSSSGAERYLTISSLQSEDEADYYCQTWGTGI

SEQ ID NO: 11153 - protein, 120 aa, Homo sapiens
MAWTPLLLLFPLLLHCTGSLSQPVLTQSSSASASLGSSVKLTCTLSSGHSSYIIAWHQQQPGKAPRYLMKLEGSGSYNKGSGVPDRFSGSSSGADRYLTISNLQFEDEADYYCETWDSNT

SEQ ID NO: 11154 - protein, 117 aa, Homo sapiens
MAWAPLLLTLLAHCTGSWANFMLTQPHSVSESPGKTVTISCTGSSGSIASNYVQWYQQRPGSAPTTVIYEDNQRPSGVPDRFSGSIDSSSNSASLTISGLKTEDEADYYCQSYDSSN

SEQ ID NO: 11155 - protein, 117 aa, Homo sapiens
MAGFPLLLTLLTHCAGSWAQSVLTQPPSASGTPGQRVTISCSGSSSNIGSNYVYWYQQLPGTAPKLLIYSNNQRPSGVPDRFSGSKSGTSASLAISGLRSEDEADYYCAAWDDSLSG

SEQ ID NO: 11156 - protein, 117 aa, Homo sapiens
MAWTPLFLFLLTCCPGSNSQAVVTQEPSLTVSPGGTVTLTCGSSTGAVTSGHYPYWFQQKPGQAPRTLIYDTSNKHSWTPARFSGSLLGGKAALTLLGAQPEDEAEYYCLLSYSGAR

SEQ ID NO: 11157 - protein, 117 aa, Homo sapiens
MASFPLLLTLLTHCAGSWAQSVLTQPPSASGTPGQRVTISCSGSSSNIGSNTVNWYQQLPGTAPKLLIYSNNQRPSGVPDRFSGSKSGTSASLAISGLQSEDEADYYCAAWDDSLNG

SEQ ID NO: 11158 - protein, 118 aa, Homo sapiens
MAWALLLLTLLTQGTGSWAQSALTQPPFVSGAPGQSVTISCTGTSSDVGDYDHVFWYQKRLSTTSRLLIYNVNTRPSGISDLFSGSKSGNMASLTISGLKSEVEANYHCSLYSSSYTF

SEQ ID NO: 11159 - protein, 114 aa, Homo sapiens
MAWTPPLLVLTLCTGSVISSGPTQVPAVSVALGQMARITCQGDSMEGSYEHWYQQKPGQAPVLVIYDSSDRPSRIPERFSGSKSGNTTTLTITGAQAEDEADYYYQLIDNHATQ

SEQ ID NO: 11160 - protein, 112 aa, Homo sapiens
MAWIPLLLPLLTLCTGSEASYELTQPPSVSVSPGQTARITCSGDALPKQYAYWYQQKPGQAPVLVIYKDSERPSGIPERFSGSSSGTTVTLTISGVQAEDEADYYCQSADSS

SEQ ID NO: 11161 - protein, 113 aa, Homo sapiens
MAWALLLLTLLTQDTGSWAQSALTQPASVSGSPGQSITISCTGTSSDVGSYNLVSWYQQHPGKAPKLMIYEGSKRPSGVSNRFSGSKSGNTASLTISGLQAEDEADYYCCSYA

SEQ ID NO: 11162 - protein, 117 aa, Homo sapiens
MAWTVLLLGLLSHCTGSVTSYVLTQPPSVSVAPGQTARITCGGNNIGSKSVHWYQQKPGQAPVLVVYDDSDRPSGIPERFSGSNSGNTATLTISRVEAGDEADYYCQVWDSSSDHPT

SEQ ID NO: 11163 - protein, 112 aa, Homo sapiens
MAWTPLWLTLLTLCIGSVVSSELTQDPAVSVALGQTVRITCQGDSLRSYYASWYQQKPGQAPVLVIYGKNNRPSGIPDRFSGSSSGNTASLTITGAQAEDEADYYCNSRDSS

SEQ ID NO: 11164 - protein, 120 aa, Homo sapiens
MAWALLLLTLLTQGTGSWAQSALTQPASVSGSPGQSITISCTGTSSDVGGYNYVSWYQQHPGKAPKLMIYEVSNRPSGVSNRFSGSKSGNTASLTISGLQAEDEADYYCSSYTSSSTLHS

SEQ ID NO: 11165 - protein, 122 aa, Homo sapiens
MAWVSFYLLPFIFSTGLCALPVLTQPPSASALLGASIKLTCTLSSEHSTYTIEWYQQRPGRSPQYIMKVKSDGSHSKGDGIPDRFMGSSSGADRYLTFSNLQSDDEAEYHCGESHTIDGQVG

SEQ ID NO: 11166 - protein, 115 aa, Homo sapiens
MAWIPLFLGVLAYCTGSVASYELTQPPSVSVSPGQTASITCSGDKLGDKYACWYQQKPGQSPVLVIYQDSKRPSGIPERFSGSNSGNTATLTISGTQAMDEADYYCQAWDSSTAH

SEQ ID NO: 11167 - protein, 117 aa, Homo sapiens
MFIGNSPLLLTVGLGLSKVEQFQLSISTEVKKSIDIPCKISSTRFETDVIHWYRQKPNQALEHLIYIVSTKSAARRSMGKTSNKVEARKNSQTLTSILTIKSVEKEDMAVYYCAAWD

SEQ ID NO: 11168 - protein, 114 aa, Homo sapiens
MGTRLFFYVALCLLWAGHRDAEITQSPRHKITETGRQVTLACHQTWNHNNMFWYRQDLGHGLRLIHYSYGVHDTNKGEVSDGYSVSRSNTEDLPLTLESAASSQTSVYFCASSE

SEQ ID NO: 11169 - protein, 115 aa, Homo sapiens
MSTRLLCWMALCLLGAELSEAEVAQSPRYKITEKSQAVAFWCDPISGHATLYWYRQILGQGPELLVQFQDESVVDDSQLPKDRFSAERLKGVDSTLKIQPAELGDSAMYLCASSL

SEQ ID NO: 11170 - protein, 114 aa, Homo sapiens
MGPGLLCWVLLCLLGAGPVDAGVTQSPTHLIKTRGQQVTLRCSPISGHKSVSWYQQVLGQGPQFIFQYYEKEERGRGNFPDRFSARQFPNYSSELNVNALLLGDSALYLCASSL

SEQ ID NO: 11171 - protein, 114 aa, Homo sapiens
MGPGLLCWVLLCPLGEGPVDAGVTQSPTHLIKTRGQHVTLRCSPISGHTSVSSYQQALGQGPQFIFQYYEKEERGRGNFPDQFSGHQFPNYSSELNVNALLLGDSALYLCASSL

SEQ ID NO: 11172 - protein, 111 aa, Homo sapiens
MLLLLLLLGPGSGLGAVVSQHPSRVICKSGTSVKIECRSLDFQATTMFWYRQFPKQSLMLMATSNEGSKATYEQGVEKDKFLINHASLTLSTLTVTSAHPEDSSFYICSAR

SEQ ID NO: 11173 - protein, 428 aa, Homo sapiens
ASTQSPSVFPLTRCCKNIPSNATSVTLGCLATGYFPEPVMVTWDTGSLNGTTMTLPATTLTLSGHYATISLLTVSGAWAKQMFTCRVAHTPSSTDWVDNKTFSVCSRDFTPPTVKILQSSCDGGGHFPPTIQLLCLVSGYTPGTINITWLEDGQVMDVDLSTASTTQEGELASTQSELTLSQKHWLSDRTYTCQVTYQGHTFEDSTKKCADSNPRGVSAYLSRPSPFDLFIRKSPTITCLVVDLAPSKGTVNLTWSRASGKPVNHSTRKEEKQRNGTLTVTSTLPVGTRDWIEGETYQCRVTHPHLPRALMRSTTKTSGPRAAPEVYAFATPEWPGSRDKRTLACLIQNFMPEDISVQWLHNEVQLPDARHSTTQPRKTKGSGFFVFSRLEVTRAEWEQKDEFICRAVHEAASPSQTVQRAVSVNPGK

SEQ ID NO: 11174 - protein, 295 aa, Homo sapiens
ASTKGPSVFPLAPSSKSTSGGTAALGCLVKDYFPEPVTVSWNSGALTSGVHTFPAVLQSSGLYSLSSVVTVPSSSLGTQTYICNVNHKPSNTKVDKKVEPKSCDKTHTCPPCPAPELLGGPSVFLFPPKPKDTLMISRTPEVTCVVVDVSHEDPEVKFNWYVDGVEYKCKVSNKALPAPIEKTISKAKGQPREPQVYTLPPSRDELTKNQVSLTCLVKGFYPSDIAVEWESNGQPENNYKTTPPVLDSDGSFFLYSKLTVDKSRWQQGNVFSCSVMHEALHNHYTQKSLSLSPGK

SEQ ID NO: 11175 - protein, 326 aa, Homo sapiens
ASTKGPSVFPLAPCSRSTSESTAALGCLVKDYFPEPVTVSWNSGALTSGVHTFPAVLQSSGLYSLSSVVTVPSSNFGTQTYTCNVDHKPSNTKVDKTVERKCCVECPPCPAPPVAGPSVFLFPPKPKDTLMISRTPEVTCVVVDVSHEDPEVQFNWYVDGVEVHNAKTKPREEQFNSTFRVVSVLTVVHQDWLNGKEYKCKVSNKGLPAPIEKTISKTKGQPREPQVYTLPPSREEMTKNQVSLTCLVKGFYPSDISVEWESNGQPENNYKTTPPMLDSDGSFFLYSKLTVDKSRWQQGNVFSCSVMHEALHNHYTQKSLSLSPGK

SEQ ID NO: 11176 - protein, 353 aa, Homo sapiens
ASPTSPKVFPLSLCSTQPDGNVVIACLVQGFFPQEPLSVTWSESGQGVTARNFPPSQDASGDLYTTSSQLTLPATQCLAGKSVTCHVKHYTNPSQDVTVPCPVPSTPPTPSPSTPPTPSPSCCHPRLSLHRPALEDLLLGSEANLTCTLTGLRDASGVTFTWTPSSGKSAVQGPPERDLCGCYSVSSVLPGCAEPWNHGKTFTCTAAYPESKTPLTATLSKSGNTFRPEVHLLPPPSEELALNELVTLTCLARGFSPKDVLVRWLQGSQELPREKYLTWASRQEPSQGTTTFAVTSILRVAAEDWKKGDTFSCMVGHEALPLAFTQKTIDRLAGKPTHVNVSVVMAEVDGTCY

SEQ ID NO: 11177 - protein, 399 aa, Homo sapiens
ASTKGPSVFPLAPSSKSTSGGTAALGCLVKDYFPEPVTVSWNSGALTSGVHTFPAVLQSSGLYSLSSVVTVPSSSLGTQTYICNVNHKPSNTKVDKKVEPKSCDKTHTCPPCPAPELLGGPSVFLFPPKPKDTLMISRTPEVTCVVVDVSHEDPEVKFNWYVDGVEVHNAKTKPREEQYNSTYRVVSVLTVLHQDWLNGKEYKCKVSNKALPAPIEKTISKAKGQPREPQVYTLPPSRDELTKNQVSLTCLVKGFYPSDIAVEWESNGQPENNYKTTPPVLDSDGSFFLYSKLTVDKSRWQQGNVFSCSVMHEALHNHYTQKSLSLSPELQLEESCAEAQDGELDGLWTTITIFITLFLLSVCYSATVTFFKVKWIFSSVVDLKQTIIPDYRNMIGQGA

SEQ ID NO: 11178 - protein, 330 aa, Homo sapiens [sequence omitted]

SEQ ID NO: 11179 - protein, 376 aa, Homo sapiens
STKGPSVFPLAPCSRSTSGGTAALGCLVKDYFPEPVTVSWNSGALTSGVHTFPAVLQSSGLYSLSSVVTVPSSSLGTQTYTCNVNHKPSNTKVDKRVELKTPLGDTTHTCPRCPEPKSCDTPPPCPRCPEPKSCDTPPPCPRCPEPKSCDTPPPCPRCPAPELLGGPSVFLFPPKPKDTLMISRTPEVTCVVVDVSHEDPEVQFKWYVDGVEVHNAKTKPREEQYNSTFRVVSVLTVLHQDWLNGKEYKCKVSNKALPAPIEKTISKTKGQPREPQVYTLPPSREEMTKNQVSLTCLVKGFYPSDIAVEWESSGQPENNYNTTPPMLDSDGSFFLYSKLTVDKSRWQQGNIFSCSVMHEALHNRFTQKSLSLSPGK

SEQ ID NO: 11180 - protein, 429 aa, Homo sapiens
PTKAPDVFPIISGCRHPKDNSPVVLACLITGYHPTSVTVTWYMGTQSQPQRTFPEIQRRDSYYMTSSQLSTPLQQWRQGEYKCVVQHTASKSKKEIFRWPESPKAQASSVPTAQPQAEGSLAKATTAPATTRNTGRGGEEKKKEKEKEEQEERETKTPECPSHTQPLGVYLLTPAVQDLWLRDKATFTCFVVGSDLKDAHLTWEVAGKVPTGGVEEGLLERHSNGSQSQHSRLTLPRSLWNAGTSVTCTLNHPSLPPQRLMALREPAAQAPVKLSLNLLASSDPPEAASWLLCEVSGFSPPNILLMWLEDQREVNTSGFAPARPPPQPRSTTFWAWSVLRVPAPPSPQPATYTCVVSHEDSRTLLNASRSLEVSYLAMTPLIPQSKDENSDDYTTFDDVGSLWTTLSTFVALFILTLLYSGIVTFIKVK

SEQ ID NO: 11181 - protein, 453 aa, Homo sapiens
GSASAPTLFPLVSCENSPSDTSSVAVGCLAQDFLPDSITFSWKYKNNSDISSTRGFPSVLRGGKYAATSQVLLPSKDVMQGTDEHVVCKVQHPNGNKEKNVPLPVIAELPPKVSVFVPPRDGFFGNPRKSKLICQATGFSPRQIQVSWLREGKQVGSGVTTDQVQAEAKESGPTTYKVTSTLTIKESDWLGQSMFTCRVDHRGLTFQQNASSMCVPDQDTAIRVFAIPPSFASIFLTKSTKLTCLVTDLTTYDSVTISWTRQNGEAVKTHTNISESHPNATFSAVGEASICEDDWNSGERFTCTVTHTDLPSPLKQTISRPKGVALHRPDVYLLPPAREQLNLRESATITCLVTGFSPADVFVQWMQRGQPLSPEKYVTSAPMPEPQAPGRYFAHSILTVSEEEWNTGETYTCVVAHEALPNRVTERTVDKSTGKPTLYNVSLVMSDTAGTCY

SEQ ID NO: 11182 - protein, 121 aa, Homo sapiens
MSVSFLIFLPVLGLPWGVLSQVQLQQSGPGLVKPSQTLSLTCAISGDSVSSNSAAWNWIRQSPSRGLEWLGRTYYRSKWYNDYAVSVKSRITINPDTSKNQFSLQLNSVTPEDTAVYYCAR

SEQ ID NO: 11183 - protein, 117 aa, Homo sapiens
MEFGLSWLFLVAILKGVQCEVQLVESGGGLVQPGGSLRLSCAASGFTFSSYAMSWVRQAPGKGLEWVSAISGSGGSTYYADSVKGRFTISRDNSKNTLYLQMNSLRAEDTAVYYCAK

SEQ ID NO: 11184 - protein, 123 aa, Homo sapiens
MDLLHKNMKHLWFFLLLVAAPRWVLSQVQLQQWGAGLLKPSETLSLTCAVYGGSFSGYYWSWIRQPPGKGLEWIGEINHSGSTNYNPSLKSRVTISVDTSKNQFSLKLSSVTAADTAVYYCAR

SEQ ID NO: 11185 - protein, 117 aa, Homo sapiens
MELGLCWVFLVAILEGVQCEVQLVESGGGLVQPGGSLRLSCAASGFTFSSYEMNWVRQAPGKGLEWVSYISSSGSTIYYADSVKGRFTISRDNAKNSLYLQMNSLRAEDTAVYYCAR

SEQ ID NO: 11186 - protein, 117 aa, Homo sapiens
MGSTAILALLLAVLQGVCAEVQLVQSGAEVKKPGESLKISCKGSGYSFTSYWIGWVRQMPGKGLEWMGIIYPGDSDTRYSPSFQGQVTISADKSISTAYLQWSSLKASDTAMYYCAR

SEQ ID NO: 11187 - protein, 118 aa, Homo sapiens
MKHLWFFLLLVAAPRWVLSQVQLQESGPGLVKPSETLSLTCTVSGGSVSSGSYYWSWIRQPPGKGLEWIGYIYYSGSTNYNPSLKSRVTISVDTSKNQFSLKLSSVTAADTAVYYCAR

SEQ ID NO: 11188 - protein, 117 aa, Homo sapiens
MDWTWRFLFVVAAATGVQSQVQLVQSGAEVKKPGSSVKVSCKASGGTFSSYAISWVRQAPGQGLEWMGGIIPIFGTANYAQKFQGRVTITADKSTSTAYMELSSLRSEDTAVYYCAR

SEQ ID NO: 11189 - protein, 119 aa, Homo sapiens
MDILCSTLLLLTVPSWVLSQVTLKESGPALVKPTQTLTLTCTFSGFSLSTSGMRVSWIRQPPGKALEWLARIDWDDDKFYSTSLKTRLTISKDTSKNQVVLTMTNMDPVDTATYYCARI

SEQ ID NO: 11190 - protein, 1200 aa, Homo sapiens
MKVAGGLELGAAALLSASPRALVTLSTGPTCSILPKNPLFPQNLSSQPCIKMEGDKSLTFSSYGLQWCLYELDKEEFQTFKELLKKKSSESTTCSIPQFEIENANVECLALLLHEYYGASLAWATSISIFENMNLRTLSEKARDDMKRHSPEDPEATMTDQGPSKEKVPGISQAVQQDSATAAETKEQEISQAMEQEGATAAETEEQEISQAMEQEGATAAETEEQGHGGDTWDYKSHVMTKFAEEEDVRRSFENTAADWPEMQTLAGAFDSDRWGFRPRTVVLHGKSGIGKSALARRIVLCWAQGGLYQGMFSYVFFLPVREMQRKKESSVTEFISREWPDSQAPVTEIMSRPERLLFIIDGFDDLGSVLNNDTKLCKDWAEKQPPFTLIRSLLRKVLLPESFLIVTVRDVGTEKLKSEVVSPRYLLVRGISGEQRIHLLLERGIGEHQKTQGLRAIMNNRELLDQCQVPAVGSLICVALQLQDVVGESVAPFNQTLTGLHAAFVFHQLTPRGVVRRCLNLEERVVLKRFCRMAVEGVWNRKSVFDGDDLMVQGLGESELRALFHMNILLPDSHCEEYYTFFHLSLQDFCAALYYVLEGLEIEPALCPLYVEKTKRSMELKQAGFHIHSLWMKRFLFGLVSEDVRRPLEVLLGCPVPLGVKQKLLHWVSLLGQQPNATTPGDTLDAFHCLFETQDKEFVRLALNSFQEVWLPINQNLDLIASSFCLQHCPYLRKIRVDVKGIFPRDESAEACPVVPLWMRDKTLIEEQWEDFCSMLGTHPHLRQLDLGSSILTERAMKTLCAKLRHPTCKIQTLMFRNAQITPGVQHLWRIVMANRNLRSLNLGGTHLKEEDVRMACEALKHPKCLLESLRLDCCGLTHACYLKISQILTTSPSLKSLSLAGNKVTDQGVMPLSDALRVSQCALQKLILEDCGITATGCQSLASALVSNRSLTHLCLSNNSLGNEGVNLLCRSMRLPHCSLQRLMLNQCHLDTAGCGFLALALMGNSWLTHLSLSMNPVEDNGVKLLCEVMREPSCHLQDLELVKCHLTAACCESLSCVISRSRHLKSLDLTDNALGDGGVAALCEGLKQKNSVLARLGLKACGLTSDCCEALSLALSCNRHLTSLNLVQNNFSPKGMMKLCSAFACPTSNLQIIGLWKWQYPVQIRKLLEEVQLLKPRVVIDGSWHSFDEDDRYWWKN

SEQ ID NO: 11191 - protein, 928 aa, Homo sapiens
MNEAMATDSPRRPSRCTGGVVVRPQAVTEQSYMESVVTFLQDVVPQAYSGTPLTEEKEKIVWVRFENADLNDTSRNLEFHEIHSTGNEPPLLIMIGYSDGMQVWSIPISGEAQELFSVRHGPIRAARILPAPQFGAQKCDNFAEKRPLLGVCKSIGSSGTSPPYCCVDLYSLRTGEMVKSIQFKTPIYDLHCNKRILVVVLQEKIAAFDSCTFTKKFFVTSCYPCPGPNMNPIALGSRWLAYAENKLIRCHQSRGGACGDNIQSYTATVISAAKTLKSGLTMVGKVVTQLTGTLPSGVTEDDVAIHSNSRRSPLVPGIITVIDTETVGEGQVLVSEDSDSDGIVAHFPAHEKPVCCMAFNTSGMLLVTTDTLGHDFHVFQILTHPWSSSQCAVHHLYTLHRGETEAKVQDICFSHDCRWVVVSTLRGTSHVFPINPYGGQPCVRTHMSPRVVNRMSRFQKSAGLEEIEQELTSKQGGRCSPVPGLSSSPSGSPLHGKLNSQDSYNNFTNNNPGNPRLSPLPSLMVVMPLAQIKQPMTLGTITKRTGPYLFGAGCFSIKAPCKVKPPPQISPSKSMGGEFCVAAIFGTSRSWFANNAGLKREKDQSKQVVVESLYIISCYGTLVEHMMEPRPLSTAPKISDDTPLEMMTSPRASWTLVRTPQWNELQPPFNANHPLLLAADAVQYYQFLLAGLVPPGSPGPITRHGSYDSLASDHSGQEDEEWLSQVEIVTHTGPHRRLWMGPQFQFKTIHPSGQTTVISSSSSVLQSHGPSDTPQPLLDFDTDDLDLNSLRIQPVRSDPVSMPGSSRPVSDRRGVSTVIDAASGTFDRSVTLLEVCGSWPEGFGLRHMSSMEHTEEGLRERLADAMAESPSRDVVGSGTELQREGSIETLSNSSGSTSGSIPRNFDGYRSPLPTNESQPLSLFPTGFP

SEQ ID NO: 11192 - protein, 540 aa, Homo sapiens
MGPGERAGGGGDAGKGNAAGGGGGGRSATTAGSRAVSALCLLLSVGSAAACLLLGVQAAALQGRVAALEEERELLRRAGPPGALDAWAEPHLERLLREKLDGLAKIRTAREAPSECVCPPGPPGRRGKPGRRGDPGPPGQSGRDGYPGPLGLDGKPGLPGPKGEKGAPGDFGPRGDQGQDGAAGPPGPPGPPGARGPPGDTGKDGPRGAQGPAGPKGEPGQDGEMGPKGPPGPKGEPGVPGKKGDDGTPSQPGPPGPKGEPGSMGPRGENGVDGAPGPKGEPGHRGTDGAAGPRGAPGLKGEQGDTVVIDYDGRILDALKGPPGPQGPPGPPGIPGAKGELGLPGAPGIDGEKGPKGQKGDPGEPGPAGLKGEAGEMGLSGLPGADGLKGEKGESASDSLQESLAQLIVEPGPPGPPGPPGPMGLQGIQGPKGLDGAKGEKGASGERGPSGLPGPVGPPGLIGLPGTKGEKGRPGEPGLDGFPGPRGEKGDRSERGEKGERGVPGRKGVKGQKGEPGPPGLDQPCPVGPDGLPVPGCWHK

SEQ ID NO: 11193 - protein, 367 aa, Homo sapiens
MDDAAVLKRRGYLLGINLGEGSYAKVKSAYSERLKFNVAIKIIDRKKAPADFLEKFLPREIEILAMLNHCSIIKTYEIFETSHGKVYIVMELAVQGDLLELIKTRGALHEDEARKKFHQLSLAIKYCHDLDVVHRDLKCDNLLLDKDFNIKLSDFSFSKRCLRDDSGRMALSKTFCGSPAYAAPEVLQGIPYQPKVYDIWSLGVILYIMVCGSMPYDDSNIKKMLRIQKEHRVNFPRSKHLTGECKDLIYHMLQPDVNRRLHIDEILSHCWMQPKARGSPSVAINKEGESSRGTEPLWTPEPGSDKKSATKLEPEGEAQPQAQPETKPEGTAMQMSRQSEILGFPSKPSTMETEEGPPQQPPETRAQ

SEQ ID NO: 11194 - protein, 745 aa, Homo sapiens
MRPDSHPYGFPWELVIRAAVAGFFAVLFLWRSFRSVTSRLYVRREKKFAVALSGLIEEKCKLLEKFSLVQKEYEGYEVESSLKNASFEKEATEAQSLEATCEKLNRFNSELVHEILCLEKELKEEKSKHSEQNELMADISKRIQSLEDESKSLKSQVAEAKMTFKRFQANEERLEIEIQDAWKENSELQESQKQLLQEAEVWKEQVSELIKQKRTFEDSKVHAEQVLNDKENHIKTLTERLLKMKDGVAMLEEDVTDDDNLELEMNSESEDGAYLDNPPKGALKKLIHAAKLNASLKTLEGERNQIYIQLSEVDKTKEELTEHIKNLQTEQASLQSENTHFESENQKLQQKLKVMTELYQENEMKLYRKLIVEEKCRLEKEEKLSKVDEMISHATEELETYRKRAKDLKEFEKTIHFYQKKIILHEKKAHDNWSAAWTAERNLNDLRKENAHNRQKLTEIEFKIKLLEKDPYGLDVPNTAFGRQHSPYGPSPLGWPSSETRASLYPPTLLEGPLRLSPLLPRGGGRGSRGPGNPPDHQITKERGESSCDRLTDPHRAPSDAGPLAPPWEQDYRMMFPPPGQSYPDSALPPQRQDRFYSNCARLSGPAELRSFNMPSLDKMDGSMPSEMESSRNDTKDNLGNLKVPDSSLPAENEATGPGFVPPPLAPIRGLLFPVDTRGPFIRRGPPFPPPPPGTVFGASPDYFSPRDVPGPPRAPFAMRNVYLPRGFLPYRPPRPAFFPPAPTF

SEQ ID NO: 11195 - protein, 370 aa, Homo sapiens
MFSTYFMEKWAPRQDDMLFYVRRKLAYSGSESGADGRKAAEPEVEVEVYRRDSKKLPGLGDPDIDWEESVCLNLILQKLDYMVTCAVCTRADGGDIHIHKKKSQQVFASPSKHPMDSKGEESKISYPNIFFMIDSFEEVFSDMTVGEGEMVCVELVASDKTNTFQGVIFQGSIRYEALKKVYDNRVSVAARMAQKMSFGFYKYSNMEFVRMKGPQGKGHAEMAVSRVSTGDTSPCGTEEDSSPASPMHERVTSFSTPPTPERNNRPAFFSPSLKRKVPRNRIAEMKKSHSANDSEEFFREDDGGADLHNATNLRSRSLSGTGRSLVGSWLKLNRADGNFLLYAHLTYVTLPLHRILTDILEVRQKPILMT

SEQ ID NO: 11196 - protein, 359 aa, Homo sapiens
MLETLTLISSLGCWHGGEDEAAPSKQSTCIHIYKDQGGHSGERPYECGEYRKLFKNKSCLTEPRRDHKHRNVRTGERPYECSKYGKLFHQKPTLHIHERFHTGQKTYECSECGKSFHQSSSLLQRQTLHTRERPYECIECGKAFAEKSSLINHRKVHSGAKRYECNECGKSFAYTSSLIKHRRIHTGERPYECSECGRSFAENSSLIKHLRVHTGERPYECVECGKSFRRSSSLLQHQRVHTRERPYECSECGKSFSLRSNLIHHQRVHTGERHECGQCGKSFSRKSSLIIHLRVHTGERPYECSDCGKSFAENSSLIKHLRVHTGERPYECIDCGKSFRHSSSFRRHQRVHTGMRPYK

SEQ ID NO: 11197 - protein, 496 aa, Homo sapiens
MAANCTSSWSLGESCNRPGLELPRSMASSETQLGNHDVDPEISHVNFRMFSCPKESDPIQALRKLTELCHLWLRPDLHTKEQILDMLVMEQFMISMPQELQVLVMMNGVQSCKDLEDLLRNNRRPKKWSVVTFHGKEYIVQDSDIEMAEAPSSVRDDLKDVSSQRASSVNQMRPGEGQAHRELQILPRVPALSRRQGEDFLLHKSIDVTGDPKSLRPKQTLEKDLKENREENPGLTSPEPQLPKSPTDLVRAKEGKDPPKIASVENVDADTPSACVVEREASTHSGNRGDALNLSSPKRSKPDASSISQEEPQGEATPVGNRESPGQAGMNSIHSPGPASPVSHPDGQEAKALPPFACDVCEKRFTCNSKLVIHKRSHTGERLFQCNLCGKRFMQLISLQFHQRTHTGERPYTCDVCQKQFTQKSYLKCHKRSHTGEKPFECKDCKKVFTYRGSLKEHQRIHSGEKPYKCSKCPRAFSRLKLLRRHQKTHPEATSQ

SEQ ID NO: 11198 - protein, 1058 aa, Homo sapiens [sequence omitted]

SEQ ID NO: 11199 - protein, 1038 aa, Homo sapiens
MVSSAQMGFNLQALLEQLSQDELSKFKYLITTFSLAHELQKIPHKEVDKADGKQLVEILTTHCDSYWVEMASLQVFEKMHRMDLSERAKDEVREAALKSFNKRKPLSLAFTETKGNVICLGKEVFKGKKPDKDNRCRYILKTKFREMWKSWPGDSKEVQVMAERYKMLIPFSNPRVLPGPFSYTVVLYGPAGLGKTTLAQKLMLDWAEDNLIHKFKYAFYLSCRELSRLGPCSFAELVFRDWPELQDDIPHILAQARKILFVIDGFDELGAAPGALIEDICGDWEKKKPVPVLLGSLLNRVMLPKAALLVTTRPRALRDLRILAEEPIYIRVEGFLEEDRRAYFLRHFGDEDQAMRAFELMRSNAALFQLGSAPAVCWIVCTTLKLQMEKGEDPVPTCLTRTGLFLRFLCSRFPQGAQLRGALRTLSLLAAQGLWAQTSVLHREDLERLGVQESDLRLFLDGDILRQDRVSKGCYSFIHLSFQQFLTALFYTLEKEEEEDRDGHTWDIGDVQKLLSGVERLRNPDLIQAGYYSFGLANEKRAKELEATFGCRMSPDIKQELLRCDISCKGGHSTVTDLQELLGCLYESQEEELVKEVMAQFKEISLHLNAVDVVPSSFCVKHCRNLQKMSLQVIKENLPENVTASESDAEVERSQDDQHMLPFWTDLCSIFGSNKDLMGLAINDSFLSASLVRILCEQIASDTCHLQRVVFKNISPADAHRNLCLALRGHKTVTYLTLQGNDQDDMFPALCEVLRHPECNLRYLGLVSCSATTQQWADLSLALEVNQSLTCVNLSDNELLDEGAKLLYTTLRHPKCFLQRLSLENCHLTEANCKDLAAVLVVSRELTHLCLAKNPIGNTGVKFLCEGLRYPECKLQTLVLWNCDITSDGCCDLTKLLQEKSSLLCLDLGLNHIGVKGMKFLCEALRKPLCNLRCLWLWGCSIPPFSCEDLCSALSCNQSLVTLDLGQNPLGSSGVKMLFETLTCSSGTLRTLRLKIDDFNDELNKLLEEIEEKNPQLIIDTEKHHPWAERPSSHDFMI

SEQ ID NO: 11200 - protein, 265 aa, Homo sapiens
MDPKQTTLLCLVLCLGQRIQAQEGDFPMPFISAKSSPVIPLDGSVKIQCQAIREAYLTQLMIIKNSTYREIGRRLKFWNETDPEFVIDHMDANKAGRYQCQYRIGHYRFRYSDTLELVVTGLYGKPFLSADRGLVLMPGENISLTCSSAHIPFDRFSLAKEGELSLPQHQSGEHPANFSLGPVDLNVSGIYRCYDSIHQDYTTQNLIRMAVAGLVLVALLAILVENWHSHTALNKEASADVAEPSWSQQMCQPGLTFARTPSVCK

SEQ ID NO: 11201 - protein, 449 aa, Homo sapiens
MIPTFTALLCLGLSLGPRTHMQAGPLPKPTLWAEPGSVISWGNSVTIWCQGTLEAREYRLDKEESPAPWDRQNPLEPKNKARFSIPSMTEDYAGRYRCYYRSPVGWSQPSDPLELVMTGAYSKPTLSALPSPLVTSGKSVTLLCQSRSPMDTFLLIKERAAHPLLHLRSEHGAQQHQAEFPMSPVTSVHGGTYRCFSSHGFSHYLLSHPSDPLELIVSGSLEGPRPSPTRSVSTAAGPEDQPLMPTGSVPHSGLRRHWEVLIGVLVVSILLLSLLLFLLLQHWRQGKHRTLAQRQADFQRPPGAAEPEPKDGGLQRRSSPAADVQGENFSGAAVKNTQPEDGVEMDTRQSPHDEDPQAVTYAKVKHSRPRREMASPPSPLSGEFLDTKDRQAEEDRQMDTEAAASEAPQDVTYARLHSFTLRQKATEPPPSQEGASPAEPSVYATLAIH

SEQ ID NO: 11202 - protein, 395 aa, Homo sapiens
MIPTFTALLCLGLSLGPRTHMQAGPLPKPTLWAEPGSVISWGNSVTIWCQGTLEAREYRLDKEESPAPWDRQNPLEPKNKARFSIPSMTEDYAGRYRCYYRSPVGWSQPSDPLELVMTGAYSKPTLSALPSPLVTSGKSVTLLCQSRSPMDTFLLIKERAAHPLLHLRSEHGAQQHQAEFPMSPVTSVHGGTYRCFSSHGFSHYLLSHPSDPLELIVSGSLEGPRPSPTRSVSTAAGPEDQPLMPTGSVPHSGLRRHWEVLIGVLVVSILLLSLLLFLLLQHWRQGKHRTLAQRQADFQRPPGAAEPEPKDGGLQRRSSPAADVQGENFCAAVKNTQPEDGVEMDTRAAASEAPQDVTYARLHSFTLRQKATEPPPSQEGASPAEPSVYATLAIH

SEQ ID NO: 11203 - protein, 448 aa, Homo sapiens
MIPTFTALLCLGLSLGPRTHMQAGPLPKPTLWAEPGSVISWGNSVTIWCQGTLEAREYRLDKEESPAPWDRQNPLEPKNKARFSIPSMTEDYAGRYRCYYRSPVGWSQPSDPLELVMTGAYSKPTLSALPSPLVTSGKSVTLLCQSRSPMDTFLLIKERAAHPLLHLRSEHGAQQHQAEFPMSPVTSVHGGTYRCFSSHGFSHYLLSHPSDPLELIVSGSLEGPRPSPTRSVSTAAGPEDQPLMPTGSVPHSGLRRHWEVLIGVLVVSILLLSLLLFLLLQHWRQGKHRTLAQRQADFQRPPGAAEPEPKDGGLQRRSSPAADVQGENFCAAVKNTQPEDGVEMDTRQSPHDEDPQAVTYAKVKHSRPRREMASPPSPLSGEFLDTKDRQAEEDRQMDTEAAASEAPQDVTYARLHSFTLRQKATEPPPSQEGASPAEPSVYATLAIH

SEQ ID NO: 11204 - protein, 454 aa, Homo sapiens
MTPILTVLICLGHLPKPTLWAEPGSVIIQGSPVTLRCQGSLQAEEYHLYRENKSASWVRRIQEPGKNGQFPIPSITWEHAGRYHCQYYSHNHSSEYSDPLELVVTGAYSKPTLSALPSPVVTSGGNVTLQCVSQVAFDGFILCKEGEDEHPQRLNSHSHARGWSWAIFSVGPVSPSRRWSYRCYAYDSNSPYVWSLPSDLLELLVPGVSKKPSLSVQPGPMVAPGESLTLQCVSDVGYDRFVLYKEGERDFLQRPGWQPQAGLSQANFTLGPVSPSHGGQYRCYSAHNLSSEWSAPSDPLDILITGQFYDRPSLSVQPVPTVAPGKNVTLLCQSRGQFHTFLLTKEGAGHPPLHLRSEHQAQQNQAEFRMGPVTSAHVGTYRCYSSLSSNPYLLSLPSDPLELVVSASLGQHPQDYTVENLIRMGVAGLVLVVLGILLFEAQHSQRSLQDAAGR

SEQ ID NO: 11205 - protein, 287 aa, Homo sapiens
MSPHPTALLGLVLCLAQTIHTQEEDLPRPSISAEPGTVIPLGSHVTFVCRGPVGVQTFRLERDSRSTYNDTEDVSQASPSESEARFRIDSVREGNAGLYRCIYYKPPKWSEQSDYLELLVKESSGGPDSPDTEPGSSAGPTQRPSDNSHNEHAPASQGLKAEHLYILIGVSVVFLFCLLLLVLFCLHRQNQIKQGPPRSKDEEQKPQQRPDLAVDVLERTADKATVNGLPEKDRETDTSALAAGSSQEVTYAQLDHWALTQRTARAVSPQSTKPMAESITYAAVARH

SEQ ID NO: 11206 - protein, 269 aa, Homo sapiens
MEREMEDLPRPSISAEPGTVIPLGSHVTFVCRGPVGVQTFRLERDSRSTYNDTEDVSQASPSESEARFRIDSVREGNAGLYRCIYYKPPKWSEQSDYLELLVKESSGGPDSPDTEPGSSAGPTQRPSDNSHNEHAPASQGLKAEHLYILIGVSVVFLFCLLLLVLFCLHRQNQIKQGPPRSKDEEQKPQQRPDLAVDVLERTADKATVNGLPEKDRETDTSALAAGSSQEVTYAQLDHWALTQRTARAVSPQSTKPMAESITYAAVARH

SEQ ID NO: 11207 - protein, 510 aa, Homo sapiens
MTPIVTVLICLGLSLGPRTRVQTGTIPKPTLWAEPDSVITQGSPVTLSCQGSLEAQEYRLYREKKSASWITRIRPELVKNGQFHIPSITWEHTGRYGCQYYSRARWSELSDPLVLVMTGAYPKPTLSAQPSPVVTSGGRVTLQCESQVAFGGFILCKEGEDEHPQCLNSQPHARGSSRAIFSVGPVSPNRRWSHRCYGYDLNSPYVWSSPSDLLELLVPGVSKKPSLSVQPGPVMAPGESLTLQCVSDVGYDRFVLYKEGERDLRQLPGRQPQAGLSQANFTLGPVSRSYGGQYRCYGAHNLSSECSAPSDPLDILITGQIRGTPFISVQPGPTVASGENVTLLCQSWRQFHTFLLTKAGAADAPLRLRSIHEYPKYQAEFPMSPVTSAHAGTYRCYGSLNSDPYLLSHPSEPLELVVSGPSMGSSPPPTGPISTPAGPEDQPLTPTGSDPQSGLGRHLGVVIGILVAVVLLLLLLLLLFLILRHRRQGKHWTSSPAQLPTPRKKTSMLP

SEQ ID NO: 11208 - protein, 598 aa, Homo sapiens
MTPIVTVLICLGLSLGPRTRVQTGTIPKPTLWAEPDSVITQGSPVTLSCQGSLEAQEYRLYREKKSASWITRIRPELVKNGQFHIPSITWEHTGRYGCQYYSRARWSELSDPLVLVMTGAYPKPTLSAQPSPVVTSGGRVTLQCESQVAFGGFILCKEGEDEHPQCLNSQPHARGSSRAIFSVGPVSPNRRWSHRCYGYDLNSPYVWSSPSDLLELLVPGVSKKPSLSVQPGPVMAPGESLTLQCVSDVGYDRFVLYKEGERDLRQLPGRQPQAGLSQANFTLGPVSRSYGGQYRCYGAHNLSSECSAPSDPLDILITGQIRGTPFISVQPGPTVASGENVTLLCQSWRQFHTFLLTKAGAADAPLRLRSIHEYPKYQAEFPMSPVTSAHAGTYRCYGSLNSDPYLLSHPSEPLELVVSGPSMGSSPPPTGPISTPAGPEDQPLTPTGSDPQSGLGRHLGVVIGILVAVVLLLLLLLLLFLILRHRRQGKHWTSTQRKADFQHPAGAVGPEPTDRGLQWRSSPAADAQEENLYAAVKDTQPEDGVEMDTRAAASEAPQDVTYAQLHSLTLRRKATEPPPSQEREPPAEPSIYATLAIH

SEQ ID NO: 11209 - protein, 631 aa, Homo sapiens
MTPALTALLCLGLSLGPRTRMQAGPFPKPTLWAEPGSVISWGSPVTIWCQGSLEAQEYQLDKEGSPEPWDRNNPLEPKNKARFSIPSMTQHHAGRYRCHYYSSAGWSEPSDPLELVMTGFYNKPTLSALPSPVVASGGNMTLRCGSQKGYHHFVLMKEGEHQLPRTLDSQQLHSGGFQALFPVGPVTPSHRWRFTCYYYYTNTPWVWSHPSDPLEILPSGVSRKPSLLTLQGPVLAPGQSLTLQCGSDVGYDRFVLYKEGERDFLQRPGQQPQAGLSQANFTLGPVSRSYGGQYRCYGAHNLSSEWSAPSDPLDILITGQIYDTVSLSAQPGPTVASGENMTLLCQSRGYFDTFLLTKEGAAHPPLRLRSMYGAHKYQAEFPMSPVTSAHAGTYRCYGSRSSNPHLLSFPSEPLELMVSGHSGGSSLPPTGPPSTPGLGRYLEVLIGVSVAFVLLLFLLLFLLLLRQRHSKHRTSDQRKTDFQRPAGAAETEPKDRGLLRRSSPAADVQEENLYAAVKDTQSEDRVELDSQSPHDEDPQAVTYAPVKHSSPRREMASPPSSLSGEFLDTKDRQVEEDRQMDTEAAASEASQDVTYAQLHSLTLRRKATEPPPSQEGEPPAEPSIYATLAIH

SEQ ID NO: 11210 - protein, 892 aa, Homo sapiens
MLRTAGRDGLCRLSTYLEELEAVELKKFKLYLGTATELGEGKIPWGSMEKAGPLEMAQLLITHFGPEEAWRLALSTFERINRKDLWERGQREDLVRDTPPGGPSSLGNQSTCLLEVSLVTPRKDPQETYRDYVRRKFRLMEDRNARLGECVNLSHRYTRLLLVKEHSNPMQVQQQLLDTGRGHARTVGHQASPIKIETLFEPDEERPEPPRTVVMQGAAGIGKSMLAHKVMLDWADGKLFQGRFDYLFYINCREMNQSATECSMQDLIFSCWPEPSAPLQELIRVPERLLFIIDGFDELKPSFHDPQGPWCLCWEEKRPTELLLNSLIRKKLLPELSLLITTRPTALEKLHRLLEHPRHVEILGFSEAERKEYFYKYFHNAEQAGQVFNYVRDNEPLFTMCFVPLVCWVVCTCLQQQLEGGGLLRQTSRTTTAVYMLYLLSLMQPKPGAPRLQPPPNQRGLCSLAADGLWNQKILFEEQDLRKHGLDGEDVSAFLNMNIFQKDINCERYYSFIHLSFQEFFAAMYYILDEGEGGAGPDQDVTRLLTEYAFSERSFLALTSRFLFGLLNEETRSHLEKSLCWKVSPHIKMDLLQWIQSKAQSDGSTLQQGSLEFFSCLYEIQEEEFIQQALSHFQVIVVSNIASKMEHMVSSFCLKRCRSAQVLHLYGATYSADGEDRARCSAGAHTLLVQLRPERTVLLDAYSEHLAAALCTNPNLIELSLYRNALGSRGVKLLCQGLRHPNCKLQNLRLKRCRISSSACEDLSAALIANKNLTRMDLSGNGVGFPGMMLLCEGLRHPQCRLQMIQLRKCQLESGACQEMASVLGTNPHLVELDLTGNALEDLGLRLLCQGLRHPVCRLRTLWWLFGMDLNKMTHSRLAALRVTKPYLDIGC

SEQ ID NO: 11211 - protein, 1062 aa, Homo sapiens
MLRTAGRDGLCRLSTYLEELEAVELKKFKLYLGTATELGEGKIPWGSMEKAGPLEMAQLLITHFGPEEAWRLALSTFERINRKDLWERGQREDLVRDTPPGGPSSLGNQSTCLLEVSLVTPRKDPQETYRDYVRRKFRLMEDRNARLGECVNLSHRYTRLLLVKEHSNPMQVQQQLLDTGRGHARTVGHQASPIKIETLFEPDEERPEPPRTVVMQGAAGIGKSMLAHKVMLDWADGKLFQGRFDYLFYINCREMNQSATECSMQDLIFSCWPEPSAPLQELIRVPERLLFIIDGFDELKPSFHDPQGPWCLCWEEKRPTELLLNSLIRKKLLPELSLLITTRPTALEKLHRLLEHPRHVEILGFSEAERKEYFYKYFHNAEQAGQVFNYVRDNEPLFTMCFVPLVCWVVCTCLQQQLEGGGLLRQTSRTTTAVYMLYLLSLMQPKPGAPRLQPPPNQRGLCSLAADGLWNQKILFEEQDLRKHGLDGEDVSAFLNMNIFQKDINCERYYSFIHLSFQEFFAAMYYILDEGEGGAGPDQDVTRLLTEYAFSERSFLALTSRFLFGLLNEETRSHLEKSLCWKVSPHIKMDLLQWIQSKAQSDGSTLQQGSLEFFSCLYEIQEEEFIQQALSHFQVIVVSNIASKMEHMVSSFCLKRCRSAQVLHLYGATYSADGEDRARCSAGAHTLLVQLRPERTVLLDAYSEHLAAALCTNPNLIELSLYRNALGSRGVKLLCQGLRHPNCKLQNLRLKRCRISSSACEDLSAALIANKNLTRMDLSGNGVGFPGMMLLCEGLRHPQCRLQMIQLRKCQLESGACQEMASVLGTNPHLVELDLTGNALEDLGLRLLCQGLRHPVCRLRTLWLKICRLTAAACDELASTLSVNQSLRELDLSLNELGDLGVLLLCEGLRHPTCKLQTLRLGICRLGSAACEGLSVVLQANHNLRELDLSFNDLGDWGLWLLAEGLQHPACRLQKLWLDSCGLTAKACENLYFTLGINQTLTDLYLTNNALGDTGVRLLCKRLSHPGCKLRVLWLFGMDLNKMTHSRLAALRVTKPYLDIGC

SEQ ID NO: 11212 - protein, 1004 aa, Homo sapiens
MLRTAGRDGLCRLSTYLEELEAVELKKFKLYLGTATELGEGKIPWGSMEKAGPLEMAQLLITHFGPEEAWRLALSTFERINRKDLWERGQREDLVRDTPPGGPSSLGNQSTCLLEVSLVTPRKDPQETYRDYVRRKFRLMEDRNARLGECVNLSHRYTRLLLVKEHSNPMQVQQQLLDTGRGHARTVGHQASPIKIETLFEPDEERPEPPRTVVMQGAAGIGKSMLAHKVMLDWADGKLFQGRFDYLFYINCREMNQSATECSMQDLIFSCWPEPSAPLQELIRVPERLLFIIDGFDELKPSFHDPQGPWCLCWEEKRPTELLLNSLIRKKLLPELSLLITTRPTALEKLHRLLEHPRHVEILGFSEAERKEYFYKYFHNAEQAGQVFNYVRDNEPLFTMCFVPLVCWVVCTCLQQQLEGGGLLRQTSRTTTAVYMLYLLSLMQPKPGAPRLQPPPNQRGLCSLAADGLWNQKILFEEQDLRKHGLDGEDVSAFLNMNIFQKDINCERYYSFIHLSFQEFFAAMYYILDEGEGGAGPDQDVTRLLTEYAFSERSFLALTSRFLFGLLNEETRSHLEKSLCWKVSPHIKMDLLQWIQSKAQSDGSTLQQGSLEFFSCLYEIQEEEFIQQALSHFQVIVVSNIASKMEHMVSSFCLKRCRSAQVLHLYGATYSADGEDRARCSAGAHTLLVQLPERTVLLDAYSEHLAAALCTNPNLIELSLYRNALGSRGVKLLCQGLRHPNCKLQNLRLKRCRISSSACEDLSAALIANKNLTRMDLSGNGVGFPGMMLLCEGLRHPQCRLQMIQLRKCQLESGACQEMASVLGTNPHLVELDLTGNALEDLGLRLLCQGLRHPVCRLRTLWLKICRLTAAACDELASTLSVNQSLRELDLSLNELGDLGVLLLCEGLRHPTCKLQTLRLDSCGLTAKACENLYFTLGINQTLTDLYLTNNALGDTGVRLLCKRLSHPGCKLRVLWLFGMDLNKMTHSRLAALRVTKPYLDIGC

SEQ ID NO: 11213 - protein, 509 aa, Homo sapiens
MALSQGLLTFRDVAIEFSQEEWKCLDPAQRTLYRDVMLENYRNLVSLDISSKCMMNTLSSTGQGNTEVIHTGTLQRQASYHIGAFCSQEIEKDIHDFVFQWQEDETNDHEAPMTEIKKLTSSTDRYDQRHAGNKPIKGQLESRFHLHLRRHRRIHTGEKPYKCEECEKVFSCKSHLEIHRIIHTGEKPYKCKVCDKAFKHDSHLAKHTRIHRGDKHYTCNECGKVFDQKATLACHHRSHTGEKPYKCNECGKTFSQTSHLVYHHRLHTGEKPYKCNECGKTFARNSVLVIHKAVHTAEKPYKCNECGKVFKQRATLAGHRRVHTGEKPYRCEECDKVFSRKSHLERHRRIHTGEKPYKCKVCDKAFRSDSRLAEHQRVHTGERPYTCNECGKVFSTKAYLACHQKLHTGEKLYECEECDKVYIRKSHLERHRRIHTGEKPHKCGDCGKAFNSPSHLIRHQRIHTGQKSYKCHQCGKVFSLRSLLAEHQKIPFGDNCFKCNEYSKPSSIN

SEQ ID NO: 11214 - protein, 465 aa, Homo sapiens
MALLQGLLTFRDVAIEFSQEEWKCLDPAQRTLYRDVMLENYRNLVSLDTSSKCMMKMFSSTGQGNTEVVHTGTLQIHASHHIGDTCFQEIEKDIHDFVFQWQENETNGHEALMTKTKKLMSSTERHDQRHAGNKPIKNELGSSFHSHLPEVHIFHPEGKIGNQVEKAINDAFSVSASQRISCRPKTRISNKYRNNFLQSSLLTQKREVHTREKSFQRNESGKAFNGSSLLKKHQIIHLGDKQYKCDVCGKDFHQKRYLACHRCHTGENPYTCNECGKTFSHNSALLVHKAIHTGEKPYKCNECGKVFNQQSNLARHHRVHTGEKPYKCEECDKVFSRKSHLERHRRIHTGEKPYKCKVCDKAFRRDSHLAQHTVIHTGEKPYKCNECGKTFVQNSSLVMHKVIHTGEKRYKCNECGKVFNHKSNLACHRRLHTGEKPYKCNECGKVFNRKSNLERHHRLHTGKKS

SEQ ID NO: 11215 - protein, 581 aa, Homo sapiens
MLENYSNLVSVGYQASKPDALFKLEQGEPWTVENEIHSQICPEIKKVDNHLQMHSQKQRCLKRVEQCHKHNAFGNIIHQRKSDFPLRQNHDTFDLHGKILKSNLSLVNQNKRYEIKNSVGVNGDGKSFLHAKHEQFHNEMNFPEGGNSVNTNSQFIKHQRTQNIDKPHVCTECGKAFLKKSRLIYHQRVHTGEKPHGCSICGKAFSRKSGLTEHQRNHTGEKPYECTECDKAFRWKSQLNAHQKIHTGEKSYICSDCGKGFIKKSRLINHQRVHTGEKPHGCSLCGKAFSKRSRLTEHQRTHTGEKPYECTECDKAFRWKSQLNAHQKAHTGEKSYICRDCGKGFIQKGNLIVHQRIHTGEKPYICNECGKGFIQKGNLLIHRRTHTGEKPYVCNECGKGFSQKTCLISHQRFHTGKTPFVCTECGKSCSHKSGLINHQRIHTGEKPYTCSDCGKAFRDKSCLNRHRRTHTGERPYGCSDCGKAFSHLSCLVYHKGMLHAREKCVGSVKLENPCSESHSLSHTRDLIQDKDSVNMVTLQMPSVAAQTSLTNSAFQAESKVAIVSQPVARSSVSADSRICTE

SEQ ID NO: 11216 - protein, 736 aa, Homo sapiens
MRPEPTKFWEESLTLEDVAVDFTWEEWQFLSPAQKDLYRDVMLENYSNLVAVGYQASKPDALSKLERGEETCTTEDEIYSRICSEIRKIDDPLQHHLQNQSIQKSVKQCHEQNMFGNIVNQNKGHFLLKQDCDTFDLHEKPLKSNLSFENQKRSSGLKNSAEFNRDGKSLFHANHKQFYTEMKFPAIAKPINKSQFIKQQRTHNIENAHVCSECGKAFLKLSQFIDHQRVHTGEKPHVCSMCGKAFSRKSRLMDHQRTHTELKHYECTECDKTFLKKSQLNIHQKTHMGGKPYTCSQCGKAFIKKCRLIYHQRTHTGEKPHGCSVCGKAFSTKFSLTTHQKTHTGEKPYICSECGKGFIEKRRLTAHHRTHTGEKPFICNKCGKGFTLKNSLITHQQTHTGEKLYTCSECGKGFSMKHCLMVHQRTHTGEKPYKCNECGKGFALKSPLIRHQRTHTGEKPYVCTECRKGFTMKSDLIVHQRTHTAEKPYICNDCGKGFTVKSRLIVHQRTHTGEKPYVCGECGKGFPAKIRLMGHQRTHTGEKPYICNECGKGFTEKSHLNVHRRTHTGEKPYVCSECGKGLTGKSMLIAHQRTHTGEKPYICNECGKGFTMKSTLSIHQQTHTGEKPYKCNECDKTFRKKTCLIQHQRFHTGKTSFACTECGKFSLRKNDLITHQRIHTGEKPYKCSDCGKAFTTKSGLNVHQRKHTGERPYGCSDCGKAFAHLSILVKHRRIHR

SEQ ID NO: 11217 - protein, 310 aa, Homo sapiens
MPLLLLLPLLWAGALAMDPNFWLQVQESVTVQEGLCVLVPCTFFHPIPYYDKNSPVHGYWFREGAIISRDSPVATNKLDQEVQEETQGRFRLLGDPSRNNCSLSIVDARRRDNGSYFFRMERGSTKYSYKSPQLSVHVTDLTHRPKILIPGTLEPGHSKNLTCSVSWACEQGTPPIFSWLSAAPTSLGPRTTHSSVLIITPRPQDHGTNLTCQVKFAGAGVTTERTIQLNVTYVPQNPTTGIFPGDGSGKQETRAGVVHGAIGGAGVTALLALCLCLIFFIVKTHRRKAARTAVGRNDTHPTTGSASPVR

SEQ ID NO: 11218 - protein, 342 aa, Homo sapiens
MQGAQEASASEMLPLLLPLLWAGALAQERRFQLEGPESLTVQEGLCVLVPCRLPTTLPASYYGYGYWFLEGADVPVATNDPDEEVQEETRGRFHLLWDPRRKNCSLSIRDARRRDNAAYFFRLKSKWMKYGYTSSKLSVRVMGTLESGHPSNLTCSVPWVCEQGTPPIFSWMSAAPTSLGPRTTQSSVLTITPRPQDHSTNLTCQVTFPGAGVTMERTIQLNVSYAPQKVAISIFQGNSAAFKILQNTSSLPVLEGQALRLLCDADGNPPAHLSWFQGFPALNATPISNTGVLELPQVGSAEEGDFTCRAQHPLGSLQISLSLFVHWSSAPVPDRHSFRPPC

SEQ ID NO: 11219 - protein, 275 aa, Homo sapiens
MRILQLILLALATGLVGGETRIIKGFECKPHSQPWQAALFEKTRLLCGATLIAPRWLLTAAHCLKPWVSLTSPTHVSPDLSSSNYCLSHLSRYIVHLGQHNLQKEEGCEQTRTATESFPHPGFNNSLPNKDHRNDIMLVKMASPVSITWAVRPLTLSSRCVTAGTSCLISGWGSTSSPQLRLPHTLRCANITIIEHQKCENAYPGNITDTMVCASVQEGGKDSCQGDSGGPLVCNQSLQGIISWGQDPCAITRKPGVYTKVCKYVDWIQETMKNN

SEQ ID NO: 11220 - protein, 253 aa, Homo sapiens
MARSLLLPLQILLLSLALETAGEEAQGDKIIDGAPCARGSHPWQVALLSGNQLHCGGVLVNERWVLTAAHCKMNEYTVHLGSDTLGDRRAQRIKASKSFRHPGYSTQTHVNDLMLVKLNSQARLSSMVKKVRLPSRCEPPGTTCTVSGWGTTTSPDVTFPSDLMCVDVKLISPQDCTKVYKDLLENSMLCAGIPDSKKNACNGDSGGPLVCRGTLQGLVSWGTFPCGQPNDPGVYTQVCKFTKWINDTMKKHR

SEQ ID NO: 11221 - protein, 1548 aa, Homo sapiens
MQLMALEQRFGSGLPGGGQPLCLMMSSPLPPPPPHFSCLPASDYIIKEKTVLLQKKDSEGFGFVLRGAKAQTPIEEFTPTPAFPALQYLESVDEGGVAWRAGLRMGDFLIEVNGQNVVKVGHRQVVNMIRQGGNTLMVKVVMVTRHPDMDEAVHKKAPQQAKRLPPPTISLRSKSMTSELEEMEYEQQPAPVPSMEKKRTVYQMALNKLDEILAAAQQTISASESPGPGGLASLGKHRPKGFFATESSFDPHHRAQPSYERPSFLPPGPGLMLRQKSIGAAEDDRPYLAPPAMKFSRSLSVPGSEDIPPPPTTSPPEPPYSTPPVPSSSGRLTPSPRGGPFNPGSGGPLPASSPASFDGPSPPDTRVGSREKSLYHSGPLPPAHHHPPHHHHHHAPPPQPHHHHAHPPHPPEMETGGSPDDPPPRLALGPQPSLRGWRGGGPSPTPGAPSPSHHGSAGGGGGSSQGPALRYFQLPPRAASAAMYVPARSGRGRKGPLVKQTKVEGEPQKGGGLPPAPSPTSPASPQPPPAVAAPSEKNSIPIPTIIIKAPSTSSSGRSSQGSSTEAEPPTQPEPTGGGGGGGSSPSPAPAMSPVPPSPSPVPTPASPSGPATLDFTSQFGAALVGAARREGGWQNEARRRSTLFLSTDAGDEDGGDGGLGTGAAPGPRLRHSKSIDEGMFSAEPYLRLESAGSGAGYGGYGAGSRAYGGGGGSSAFTSFLPPRPLVHPLTGKALDPASPLGLALAARERALKESSEGGGAPQPPPRPPSPRYEAPPPTPHHHSPHAHHEPVLRLWGASPPDPARRELGYRAGLGSQEKSLPASPPAARRSLLHRLPPTAPGVGPLLLQLGTEPPAPHPGVSKPWRSAAPEEPERLPLHVRFLENCQPRAPVTSGRGPPSEDGPGVPPPSPRRSVPPSPTSPRASEENGLPLLVLPPPAPSVDVEDGEFLFVEPLPPPLEFSNSFEKPESPLTPGPPHPLPDTPAPATPLPPVPPPAVAAAPPTLDSTASSLTSYDSEVATLTQGASAAPGDPHPPGPPAPAAPAPAAPQPGPDPPPGTDSGIEEVDSRSSSDHPLETISSASTLSSLSAEGGGSAGGGGGAGAGVASGPELLDTYVAYLDGQAFGGSSTPGPPYPPQLMTPSKLRGRALGASGGLRPGPSGGLRDPVTPTSPTVSVTGAGTDGLLALRACSGPPTAGVAGGPVAVEPEVPPVPLPTASSLPRKLLPWEEGPGPPPPPLPGPLAQPQASALATVKASIISELSSKLQQFGGSSAAGGALPWARGGSGGGGDSHHGGASYVPERTSSLQRQRLSDDSQSSLLSKPVSSLFQNWPKPPLPPLPTGTGVSPTAAAAPGATSPSASSSSTSTRHLQGVEFEMRPPLLRRAPSPSLLPASEHKVSPAPRPSSLPILPSGPLYPGLFDIRGSPTGGAGGSADPFAPVFVPPHPGISGGLGGALSGASRSLSPTRLLSLPPDKPFGAKPLGFWTKFDVADWLEWLGLAEHRAQFLDHEIDGSHLPALTKEDYVDLGVTRVGHRMNIDRALKFFLER

SEQ ID NO: 11222 - protein, 2169 aa, Homo sapiens
MTHSPATSEDEERHSASECPEGGSESDSSPDGPGRGPRGTRGQGSGAPGSLASVRGLQGRSMSVPDDAHFSMMVFRIGIPDLHQTKCLRFNPDATIWTAKQQVLCALSESLQDVLNYGLFQPATSGRDANFLEEERLLREYPQSFEKGVPYLEFRYKTRVYKQTNLDEKQLAKLHTKTGLKKFLEYVQLGTSDKVARLLDKGLDPNYHDSDSGETPLTLAAQTEGSVEVIRTLCLGGAHIDFRARDGMTALHKAACARHCLALTALLDLGGSPNYKDRRGLTPLFHTAMVGGDPRCCELLLFNRAQLGIADENGWQEIHQACQRGHSQHLEHLLFYGAEPGAQNASGNTALHICALYNKETCARILLYRGADKDVKNNNGQTPFQVAVIAGNFELGELIRNHREQDVVPFQESPKYAARRRGPPGTGLTVPPALLRANSDTSMALPDWMVFSAPGAASSGAPGPTSGSQGQSQPSAPTTKLSSGTLRSASSPRGARARSPSRGRHPEDAKRQPRGRPSSSGTPREGPAGGTGGSGGPGGSLGSRGRRRKLYSAVPGRSFMAVKSYQAQAEGEISLSKGEKIKVLSIGEGGFWEGQVKGRVGWFPSDCLEEVANRSQESKQESRSDKAKRLFRHYTVGSYDSFDAPSLMDGIGPGSDYIIKEKTVLLQKKDSEGFGFVLRGAKAQTPIEEFTPTPAFPALQYLESVDEGGVAWRAGLRMGDFLIEVNGQNVVKVGHRQVVNMIRQGGNTLMVKVVMVTRHPDMDEAVHKKAPQQAKRLPPPTISLRSKSMTSELEEMVSPWKKKSEYEQQPAPVPSMEKKRTVYQMALNKLDEILAAAQQTISASESPGPGGLASLGKHRPKGFFATESSFDPHHRAQPSYERPSFLPPGPGLMLRQKSIGAAEDDRPYLAPPAMKFSRSLSVPGSEDIPPPPTTSPPEPPYSTPPVPSSSGRLTPSPRGGPFNPGSGGPLPASSPASFDGPSPPDTRVGSREKSLYHSGPLPPAHHHPPHHHHHHAPPPQPHHHHAHPPHPPEMETGGSPDDPPPRLALGPQPSLRGWRGGGPSPTPGAPSPSHHGSAGGGGGSSQGPALRYFQLPPRAASAAMYVPARSGRGRKGPLVKQTKVEGEPQKGGGLPPAPSPTSPASPQPPPAVAAPSEKNSIPIPTIIIKAPSTSSSGRSSQGSSTEAEPPTQPEPTGGGGGGGSSPSPAPAMSPVPPSPSPVPTPASPSGPATLDFTSQFGAALVGAARREGGWQNEARRRSTLFLSTDAGDEDGGDGGLGTGAAPGPRLRHSKSIDEGMFSAEPYLRLESAGSGAGYGGYGAGSRAYGGGGGSSAFTSFLPPRPLVHPLTGKALDPASPLGLALAARERALKESSEGGGAPQPPPRPPSPRYEAPPPTPHHHSPHAHHEPVLRLWGASPPDPARRELGYRAGLGSQEKSLPASPPAARRSLLHRLPPTAPGVGPLLLQLGTEPPAPHPGVSKPWRSAAPEEPERLPLHVRFLENCQPRAPVTSGRGPPSEDGPGVPPPSPRRSVPPSPTSPRASEENGLPLLVLPPPAPSVDVEDGEFLFVEPLPPPLEFSNSFEKPESPLTPGPPHPLPDTPAPATPLPPVPPPAVAAAPPTLDSTASSLTSYDSEVATLTQGASAAPGDPHPPGPPAPAAPAPAAPQPGPDPPPGTDSGIEEVDSRSSSDHPLETISSASTLSSLSAEGGGSAGGGGGAGAGVASGPELLDTYVAYLDGQAFGGSSTPGPPYPPQLMTPSKLRGRALGASGGLRPGPSGGLRDPVTPTSPTVSVTGAGTDGLLALRACSGPPTAGVAGGPVAVEPEVPPVPLPTASSLPRKLLPWEEGPGPPPPPLPGPLAQPQASALATVKASIISELSSKLQQFGGSSAAGGALPWARGGSGGGGDSHHGGASYVPERTSSLQRQRLSDDSQSSLLSKPVSSLFQNWPKPPLPPLPTGTGVSPTAAAAPGATSPSASSSSTSTRHLQGVEFEMRPPLLRRAPSPSLLPASEHKVSPAPRPSSLPILPSGPLYPGLFDIRGSPTGGAGGSADPFAPVFVPPHPGISGGLGGALSGASRSLSPTRLLSLPPDKPFGAKPLGFWTKFDVADWLEWLGLAEHRAQFLDHEIDGSHLPALTKEDYVDLGVTRVGHRMNIDRALKFFLER

SEQ ID NO: 11223 - protein, 979 aa, Homo sapiens
MKMASTRCKLARYLEDLEDVDLKKFKMHLEDYPPQKGCIPLPRGQTEKADHVDLATLMIDFNGEEKAWAMAVWIFAAINRRDLYEKAKRDEPKWGSDNARVSNPTVICQEDSIEEEWMGLLEYLSRISICKMKKDYRKKYRKYVRSRFQCIEDRNARLGESVSLNKRYTRLRLIKEHRSQQEREQELLAIGKTKTCESPVSPIKMELLFDPDDEHSEPVHTVVFQGAAGIGKTILARKMMLDWASGTLYQDRFDYLFYIHCREVSLVTQRSLGDLIMSCCPDPNPPIHKIVRKPSRILFLMDGFDELQGAFDEHIGPLCTDWQKAERGDILLSSLIRKKLLPEASLLITTRPVALEKLQHLLDHPRHVEILGFSEAKRKEYFFKYFSDEAQARAAFSLIQENEVLFTMCFIPLVCWIVCTGLKQQMESGKSLAQTSKTTTAVYVFFLSSLLQPRGGSQEHGLCAHLWGLCSLAADGIWNQKILFEESDLRNHGLQKADVSAFLRMNLFQKEVDCEKFYSFIHMTFQEFFAAMYYLLEEEKEGRTNVPGSRLKLPSRDVTVLLENYGKFEKGYLIFVVRFLFGLVNQERTSYLEKKLSCKISQQIRLELLKWIEVKAKAKKLQIQPSQLELFYCLYEMQEEDFVQRAMDYFPKIEINLSTRMDHMVSSFCIENCHRVESLSLGFLHNMPKEEEEEEKEGRHLDMVQCVLPSSSHAACSHGLGRCGLSHECCFDISLVLSSNQKLVELDLSDNALGDFGIRLLCVGLKHLLCNLKKLWLVSCCLTSACCQDLASVLSTSHSLTRLYVGENALGDSGVAILCEKAKNPQCNLQKLGLVNSGLTSVCCSALSSVLSTNQNLTHLYLRGNTLGDKGIKLLCEGLLHPDCKLQVLELDNCNLTSHCCWDLSTLLTSSQSLRKLSLGNNDLGDLGVMMFCEVLKQQSCLLQNLGLSEMYFNYETKSALETLQEEKPELTVVFEPSW

SEQ ID NO: 11224 - protein, 416 aa, Homo sapiens
MVRPRRAPYRSGAGGPLGGRGRPPRPLVVRAVRSRSWPASPRGPQPPRIRARSAPPMEGARVFGALGPIGPSSPGLTLGGLAVSEHRLSNKLLAWSGVLEWQEKRRPYSDSTAKLKRTLPCQAYVNQGENLETDQWPQKLIMQLIPQQLLTTLGPLFRNSQLAQFHFTNRDCDSLKGLCRIMGNGFAGCMLFPHISPCEVRVLMLLYSSKKKIFMGLIPYDQSGFVSAIRQVITTRKQAVGPGGVNSGPVQIVNNKFLAWSGVMEWQEPRPEPNSRSKRWLPSHVYVNQGEILRTEQWPRKLYMQLIPQQLLTTLVPLFRNSRLVQFHFTKDLETLKSLCRIMDNGFAGCVHFSYKASCEIRVLMLLYSSEKKIFIGLIPHDQGNFVNGIRRVIANQQQVLQRNLEQEQQQRGMGG

SEQ ID NO: 11225 - protein, 250 aa, Homo sapiens
MDDDLMLALRLQEEWNLQEAERDHAQESLSLVDASWELVDPTPDLQALFVQFNDQFFWGQLEAVEVKWSVRMTLCAGICSYEGKGGMCSIRLSEPLLKLRPRKDLVETLLHEMIHAYLFVTNNDKDREGHGPEFCKHMHRINSLTGANITVYHTFHDEVDEYRRHWWRCNGPCQHRPPYYGYVKRATNREPSAHDYWWAEHQKTCGGTYIKIKEPENYSKKGKGKAKLGKEPVLAAENKGTFVYILLIFM

SEQ ID NO: 11226 - protein, 524 aa, Homo sapiens
MAEGGGGARRRAPALLEAARARYESLHISDDVFGESGPDSGGNPFYSTSAASRSSSAASSDDEREPPGPPGAAPPPPRAPDAQEPEEDEAGAGWSAALRDRPPPRFEDTGGPTRKMPPSASAVDFFQLFVPDNVLKNMVVQTNMYAKKFQERFGSDGAWVEVTLTEMKAFLGYMISTSISHCESVLSIWSGGFYSNRSLALVMSQARFEKILKYFHVVAFRSSQTTHGLYKVQPFLDSLQNSFDSAFRPSQTQVLHEPLIDEDPVFIATCTERELRKRKKRKFSLWVRQCSSTGFIIQIYVHLKEGGGPDGLDALKNKPQLHSMVARSLCRNAAGKNYIIFTGPSITSLTLFEEFEKQGIYCCGLLRARKSDCTGLPLSMLTNPATPPARGQYQIKMKGNMSLICWYNKGHFRFLTNAYSPVQQGVIIKRKSGEIPCPLAVEAFAAHLSYICRYDDKYSKYFISHKPNKTWQQVFWFAISIAINNAYILYKMSDAYHVKRYSRAQFGERLVRELLGLEDASPTH

SEQ ID NO: 11227 - protein, 750 aa, Homo sapiens
MEDYPDPQSANHMNSSLLSLYRKGNPDSVSNTPEMEQRETTSSTPRISSKTGSIPLKTPAKDSEGGWFIDKTPSVKKDSFFLDLSCEKSNPKKPITEIQDSKDSSLLESDMKRKGKLKNKGSKRKKEDLQEVDGEIEAVLQKKAKARGLEFQISNVKFEDVGGNDMTLKEVCKMLIHMRHPEVYHHLGVVPPRGVLLHGPPGCGKTLLAHAIAGELDLPILKVAAPEIVSGVSGESEQKLRELFEQAVSNAPCIIFIDEIDAITPKREVASKDMERRIVAQLLTCMDDLNNVAATARVLVIGATNRPDSLDPALRRAGRFDREICLGIPDEASRERILQTLCRKLRLPQAFDFCHLAHLTPGFVGADLMALCREAAMCAVNRVLMKLQEQQKKNPEMEDLPSKGVQEERLGTEPTSETQDELQRLLGLLRDQDPLSEEQMQGLCIELNDFIVALSSVQPSAKREGFVTVPNVTWADIGALEDIREELTMAILAPVRNPDQFKALGLVTPAGVLLAGPPGCGKTLLAKAVANESGLNFISVKGPELLNMYVGESERAVRQVFQRAKNSAPCVIFFDEVDALCPRRSDRETGASVRVVNQLLTEMDGLEARQQVFIMAATNRPDIIDPAILRPGRLDKTLFVGLPPPADRLAILKTITKNGTKPPLDADVNLEAIAGDLRCDCYTGADLSALVREASICALRQEMARQKSGNEKGELKVSHKHFEEAFKKVRSSISKKDQIMYERLQESLSR

SEQ ID NO: 11228 - protein, 343 aa, Homo sapiens
MLVVQMPFSFPMAHFILFVFTVSTIFHVQQRLAKIQAMWELPVQIPVLASTSKALGPSQLRGMWTINAIGRLGNQMGEYATLYALAKMNGRPAFIPAQMHSTLAPIFRITLPVLHSATASRIPWQNYHLNDWMEEEYRHIPGEYVRFTGYPCSWTFYHHLRQEILQEFTLHDHVREEAQKFLRGLQVNGSRPGTFVGVHVRRGDYVHVMPKVWKGVVADRRYLQQALDWFRARYSSLIFVVTSNGMAWCRENIDTSHGDVVFAGDGIEGSPAKDFALLTQCNHTIMTIGTFGIWAAYLTGGDTIYLANYTLPDSPFLKIFKPEAAFLPEWTGIAADLSPLLKH

SEQ ID NO: 11229 - protein, 1005 aa, Homo sapiens
MDLTLAELQEMASRQQQQIEAQQQLLATKEQRLKFLKQQDQRQQQQVAEQEKLKRLKEIAENQEAKLKKVRALKGHVEQKRLSNGKLVEEIEQMNNLFQQKQRELVLAVSKVEELTRQLEMLKNGRIDSHHDNQSAVAELDRLYKELQLRNKLNQEQNAKLQQQRECLNKRNSEVAVMDKRVNELRDRLWKKKAALQQKENLPVSSDGNLPQQAASAPSRVAAVGPYIQSSTMPRMPSRPELLVKPALPDGSLVIQASEGPMKIQTLPNMRSGAASQTKGSKIHPVGPDWSPSNADLFPSQGSASVPQSTGNALDQVDDGEVPLREKEKKVRPFSMFDAVDQSNAPPSFGTLRKNQSSEDILRDAQVANKNVAKVPPPVPTKPKQINLPYFGQTNQPPSDIKPDGSSQQLSTVVPSMGTKPKPAGQQPRVLLSPSIPSVGQDQTLSPGSKQESPPAAAVRPFTPQPSKDTLLPPFRKPQTVAASSIYSMYTQQQAPGKNFQQAVQSALTKTHTRGPHFSSVYGKPVIAAAQNQQQHPENIYSNSQGKPGSPEPETEPVSSVQENHENERIPRPLSPTKLLPFLSNPYRNQSDADLEALRKKLSNAPRPLKKRSSITEPEGPNGPNIQKLLYQRTTIAAMETISVPSYPSKSASVTASSESPVEIQNPYLHVEPEKEVVSLVPESLSPEDVGNASTENSDMPAPSPGLDYEPEGVPDNSPNLQNNPEEPNPEAPHVLDVYLEEYPPYPPPPYPSGEPEGPGEDSVSMRPPEITGQVSLPPGKRTNLRKTGSERIAHGMRVKFNPLALLLDSSLEGEFDLVQRIIYEVDDPSLPNDEGITALHNAVCAGHTEIVKFLVQFGVNVNAADSDGWTPLHCAASCNNVQVCKFLVESGAAVFAMTYSDMQTAADKCEEMEEGYTQCSQFLYGVQEKMGIMNKGVIYALWDYEPQNDDELPMKEGDCMTIIHREDEDEIEWWWARLNDKEGYVPRNLLGLYPRIKPRQRSLA

SEQ ID NO: 11230 - protein, 411 aa, Homo sapiens
MAAPDLLDPKSAAQNSKPRLSFSTKPTVLASRVESDTTINVMKWKTVSTIFLVVVLYLIIGATVFKALEQPHEISQRTTIVIQKQTFISQHSCVNSTELDELIQQIVAAINAGIIPLGNTSNQISHWDLGSSFFFAGTVITTIGFGNISPRTEGGKIFCIIYALLGIPLFGFLLAGVGDQLGTIFGKGIAKVEDTFIKWNVSQTKIRIISTIIFILFGCVLFVALPAIIFKHIEGWSALDAIYFVVITLTTIGFGDYVAGGSDIEYLDFYKPVVWFWILVGLAYFAAVLSMIGDWLRVISKKTKEEVGEFRAHAAEWTANVTAEFKETRRRLSVEIYDKFQRATSIKRKLSAELAGNHNQELTPCRRTLSVNHLTSERDVLPPLLKTESIYLNGLTPHCAGEEIAVIENIK

SEQ ID NO: 11231 - protein, 422 aa, Homo sapiens
MMNPRAKRDFYLAAPDLLDPKSAAQNSKPRLSFSTKPTVLASRVESDTTINVMKWKTVSTIFLVVVLYLIIGATVFKALEQPHEISQRTTIVIQKQTFISQHSCVNSTELDELIQQIVAAINAGIIPLGNTSNQISHWDLGSSFFFAGTVITTIGFGNISPRTEGGKIFCIIYALLGIPLFGFLLAGVGDQLGTIFGKGIAKVEDTFIKWNVSQTKIRIISTIIFILFGCVLFVALPAIIFKHIEGWSALDAIYFVVITLTTIGFGDYVAGGSDIEYLDFYKPVVWFWILVGLAYFAAVLSMIGDWLRVISKKTKEEVGEFRAHAAEWTANVTAEFKETRRRLSVEIYDKFQRATSIKRKLSAELAGNHNQELTPCRRTLSVNHLTSERDVLPPLLKTESIYLNGLTPHCAGEEIAVIENIK

SEQ ID NO: 11232 - protein, 537 aa, Homo sapiens
MEKKECPEKSSSSEEELPRRDSGSSRNIDASKLIRLQGSRKLLVDNSIRELQYTKTGIFFQAEACVTNDTVYRELPCVSETLCDISHFFQEDDETEAEPLLFRAVPECQLSGGDIPSVSEEQESSEGQDSGDICSEENQIVSSYASKVCFEIEEDYKNRQFLGPEGNVDVELIDKSTNRYSVWFPTAGWYLWSATGLGFLVRDEVTVTIAFGSWSQHLALDLQHHEQWLVGGPLFDVTAEPEEAVAEIHLPHFISLQAGEVDVSWFLVAHFKNEGMVLEHPARVEPFYAVLESPSFSLMGILLRIASGTRLSIPITSNTLIYYHPHPEDIKFHLYLVPSDALLTKAIDDEEDRFHGVRLQTSPPMEPLNFGSSYIVSNSANLKVMPKELKLSYRSPGEIQHFSKFYAGQMKEPIQLEITEKRHGTLVWDTEVKPVDLQLVAASAPPPFSGAAFVKENHRQLQARMGDLKGVLDDLQDNEVLTENEKELVEQEKTRQSKNEALLSMVEKKGDLALDVLFRSISERDPYLVSYLRQQNL

SEQ ID NO: 11233 - protein, 1346 aa, Homo sapiens
MDQYSLGDEGALPSEMHLPSFSESQGLNCSDTLNRDLGPNTRGFLYAGLSGLDPDPSLPTPDMSSEVLEDNLDTLSLYSGKDSDSVKLLEEYADSESQASLQDLGLGVLKAKEADEGGRATSGSARKGKRQHSSPQNPLLDCSLCGKVFSSASSLSKHYLTHSQERKHVCKICSKAFKRQDHLTGHMLTHQKTKPFVCIEQGCSKSYCDYRSLRRHYEVHHGLCILKEAPPEEEACGDSPHAHESAGQPPPSSLRSLVPPEARSPGSLLPHRDLLRRIVSSIVHQKTPSPGPAPAGASDSEGRNTACPCPASSGSSSCTPAGPHAAPAALDTELPEEPCLPQKEPATDVFTAPNSRAAENGAPDPPEPEPDTALLQARSTAECWPEGGSVPACLPLFRGQTVPASSQPSSHSFQWLRNLPGCPKSKGNNVFVVHKPSAVPSREGSESGPGPSSGSPSEESPPGPGGGLEDALPFPAALLRVPAEAPSDPRSASGEDDPCAPKKVKVDCDSFLCQNPGEPGLQEAQKAGGLPADASPLFRQLFLKSQEPLVSHEQMQVFQMITKSQRIFSHAQVAAVSSQLPAPEGKPAALRPLQGPWPQQPPPLAPAVDSLHAGPGNPEAEGSPARRRKTTPGVPREASPGSTRRDAKGGLKVAAVPTPLAAPSLDPSRNPDISSLAKQLRSSKGTLDLEDIFPSTGQRQTQLGGEEPPGASLPGKQAPAENGAASRITKGEKGPACSRGGGYRLLGNPRAPRFSGFRKEKAKMDMCCAASPSQVAMASFSSAGPPADPSKSKLTIFSRIQGGNIYRLPHPVKEENVAGRGNQQNGSPTDWTKPRSTFVCKNCSQMFYTEKGLSSHMCFHSDQWPSPRGKQEPQVFGTEFCKPLRQVLRPEGDRHSPPGTKKPLDPTAAAPLVVPQSIPVVPVTRHIGSMAMGQEKDGEERDSKESSQQRKRKKRPPPSTAGEPGPAGCHQSRLRSPMFLVDCLLKGLFQCSPYTPPPMLSPIREGSGVYFNTLCSTSTQASPDQLISSMLDQVDGSFGICVVKDDTKISIEPHINIGSRFQAEIPELQERSLAGTDEHVASLVWKPWGDMMISSETQDRVTELCNVACSSVMPGGGTNLELALHCLHEAQGNVQVALETLLLRGPHKPRTHLLADYRYTGSDVWTPIEKRLFKKAFYAHKKDFYLIHKMIQTKTVAQCVEYYYIWKKMIKFDCGRAPGLEKRVKREPEEVERTEEKVPCSPRERPSHHPTPKLKTKSYRRESILSSSPNAGSKRTPELLGSAESQGIFPCRECERVFDKIKSRNAHMKRHRLQDHVEPIIRVKWPVKPFQLKEEELGADIGPLQW

SEQ ID NO: 11234 - protein, 760 aa, Homo sapiens
MMEERAAAAVAAAASSCRPLGSGAGPGPTGAAPVSAPAPGPGPAGKGGGGGGSPGPTAGPEPLSLPGILHFIQHEWARFEAEKARWEAERAELQAQVAFLQGERKGQENLKTDLVRRIKMLEYALKQERAKYHKLKFGTDLNQGEKKADVSEQVSNGPVESVTLENSPLVWKEGRQLLRQYLEEVGYTDTILDMRSKRVRSLLGRSLELNGAVEPSEGAPRAPPGPAGLSGGESLLVKQIEEQIKRNAAGKDGKERLGGSVLGQIPFLQNCEDEDSDEDDELDSVQHKKQRVKLPSKALVPEMEDEDEEDDSEDAINEFDFLGSGEDGEGAPDPRRCTVDGSPHELESRRVKLQGILADLRDVDGLPPKVTGPPPGTPQPRPHEGSFGFSSDVFIMDTIGGGEVSLGDLADLTVTNDNDLSCDLSDSKDAFKKTWNPKFTLRSHYDGIRSLAFHHSQSALLTASEDGTLKLWNLQKAVTAKKNAALDVEPIHAFRAHRGPVLAVAMGSNSEYCYSGGADACIHSWKIPDLSMDPYDGYDPSVLSHVLEGHGDAVWGLAFSPTSQRLASCSADGTVRIWDPSSSSPACLCTFPTASEHGVPTSVAFTSTEPAHIVASFRSGDTVLYDMEVGSALLTLESRGSSGPTQINQVVSHPNQPLTITAHDDRGIRFLDNRTGKPVHSMVAHLDAVTCLAVDPNGAFLMSGSHDCSLRLWSLDNKTCVQEITAHRKKHEEAIHAVACHPSKALIASAGADALAKVFV

SEQ ID NO: 11235 - protein, 371 aa, Homo sapiens
MALGKFRAALRDYETVVKVKPHDKDAKMKYQECNKIVKQKAFERAIAGDEHKRSVVDSLDIESMTIEDEYSGPKLEDGKVTISFMKELMQWYKDQKKLHRKCAYQTEKITVCGDTHGQFYDLLNIFELNGLPSETNPYIFNGDFVDRGSFSVEVILTLFGFKLLYPDHFHLLRGNHETDNMNQIYGFEGEVKAKYTAQMYELFSEVFEWLPLAQCINGKVLIMHGGLFSEDGVTLDDIRKIERNRQPPDSGPMCDLLWSDPQPQNGRSISKRGVSCQFGPDVTKAFLEENNLDYIIRSHEVKAEGYEVAHGGRCVTVFSAPNYCDQMGNKASYIHLQGSDLRPQFHQFTAVPHPNVKPMAYANTLLQLGMM

SEQ ID NO: 11236 - protein, 706 aa, Homo sapiens
MRELKRTLDAKGHGVLEMPSGTGKTVSLLALIMAYQRAYPLEVTKLIYCSRTVPEIEKVIEELRKLLNFYEKQEGEKLPFLGLALSSRKNLCIHPEVTPLRFGKDVDGKCHSLTASYVRAQYQHDTSLPHCRFYEEFDAHGREVPLPAGIYNLDDLKALGRRQGWCPYFLARYSILHANVVVYSYHYLLDPKIADLVSKELARKAVVVFDEAHNIDNVCIDSMSVNLTRRTLDRCQGNLETLQKTVLRIKETDEQRLRDEYRRLVEGLREASAARETDAHLANPVLPDEVLQEAVPGSIRTAEHFLGFLRRLLEYVKWRLRVQHVVQESPPAFLSGLAQRVCIQRKPLRFCAERLRSLLHTLEITDLADFSPLTLLANFATLVSTYAKGFTIIIEPFDDRTPTIANPILHFSCMDASLAIKPVFERFQSVIITSGTLSPLDIYPKILDFHPVTMATFTMTLARVCLCPMIIGRGNDQVAISSKFETREDIAVIRNYGNLLLEMSAVVPDGIVAFFTSYQYMESTVASWYEQGILENIQRNKLLFIETQDGAETSVALEKYQEACENGRGAILLSVARGKVSEGIDFVHHYGRAVIMFGVPYVYTQSRILKARLEYLRDQFQIRENDFLTFDAMRHAAQCVGRAIRGKTDYGLMVFADKRFARGDKRGKLPRWIQEHLTDANLNLTVDEGVQVAKYFLRQMAQPFHR

SEQ ID NO: 11237 - protein, 682 aa, Homo sapiens
MKLNVDGLLVYFPYDYIYPEQFSYMRELKRTLDAKGHGVLEMPSGTGKTVSLLALIMAYQRAYPLEVTKLIYCSRTVPEIEKVIEELRKLLNFYEKQEGEKLPFLGLALSSRKNLCIHPEILHANVVVYSYHYLLDPKIADLVSKELARKAVVVFDEAHNIDNVCIDSMSVNLTRRTLDRCQGNLETLQKTVLRIKETDEQRLRDEYRRLVEGLREASAARETDAHLANPVLPDEVLQEAVPGSIRTAEHFLGFLRRLLEYVKWRLRVQHVVQESPPAFLSGLAQRVCIQRKPLRFCAERLRSLLHTLEITDLADFSPLTLLANFATLVSTYAKGFTIIIEPFDDRTPTIANPILHFSCMDASLAIKPVFERFQSVIITSGTLSPLDIYPKILDFHPVTMATFTMTLARVCLCPMIIGRGNDQVAISSKFETREDIAVIRNYGNLLLEMSAVVPDGIVAFFTSYQYMESTVASWYEQGILENIQRNKLLFIETQDGAETSVALEKYQEACENGRGAILLSVARGKVSEGIDFVHHYGRAVIMFGVPYVYTQSRILKARLEYLRDQFQIRENDFLTFDAMRHAAQCVGRAIRGKTDYGLMVFADKRFARGDKRGKLPRWIQEHLTDANLNLTVDEGVQVAKYFLRQMAQPFHREDQLGLSLLSLEQLESEETLKRIEQIAQQL

SEQ ID NO: 11238 - protein, 760 aa, Homo sapiens
MKLNVDGLLVYFPYDYIYPEQFSYMRELKRTLDAKGHGVLEMPSGTGKTVSLLALIMAYQRAYPLEVTKLIYCSRTVPEIEKVIEELRKLLNFYEKQEGEKLPFLGLALSSRKNLCIHPEVTPLRFGKDVDGKCHSLTASYVRAQYQHDTSLPHCRFYEEFDAHGREVPLPAGIYNLDDLKALGRRQGWCPYFLARYSILHANVVVYSYHYLLDPKIADLVSKELARKAVVVFDEAHNIDNVCIDSMSVNLTRRTLDRCQGNLETLQKTVLRIKETDEQRLRDEYRRLVEGLREASAARETDAHLANPVLPDEVLQEAVPGSIRTAEHFLGFLRRLLEYVKWRLRVQHVVQESPPAFLSGLAQRVCIQRKPLRFCAERLRSLLHTLEITDLADFSPLTLLANFATLVSTYAKGFTIIIEPFDDRTPTIANPILHFSCMDASLAIKPVFERFQSVIITSGTLSPLDIYPKILDFHPVTMATFTMTLARVCLCPMIIGRGNDQVAISSKFETREDIAVIRNYGNLLLEMSAVVPDGIVAFFTSYQYMESTVASWYEQGILENIQRNKLLFIETQDGAETSVALEKYQEACENGRGAILLSVARGKVSEGIDFVHHYGRAVIMFGVPYVYTQSRILKARLEYLRDQFQIRENDFLTFDAMRHAAQCVGRAIRGKTDYGLMVFADKRFARGDKRGKLPRWIQEHLTDANLNLTVDEGVQVAKYFLRQMAQPFHREDQLGLSLLSLEQLESEETLKRIEQIAQQL

SEQ ID NO: 11239 - protein, 504 aa, Homo sapiens
MSVQVAAPGSAGLGPERLSPEELVRQTRQVVQGLEALRAEHHGLAGHLAEALAGQGPAAGLEMLEEKQQVVSHSLEAIELGLGEAQVLLALSAHVGALEAEKQRLRSQARRLAQENVWLREELEETQRRLRASEESVAQLEEEKRHLEFLGQLRQYDPPAESQQSESPPRRDSLASLFPSEEEERKGPEAAGAAAAQQGGYEIPARLRTLHNLVIQYAGQGRYEVAVPLCRQALEDLERSSGHCHPDVATMLNILALVYRDQNKYKEATDLLHDALQIREQTLGPEHPAVAATLNNLAVLYGKRGRYREAEPLCQRALEIREKVLGADHPDVAKQLNNLALLCQNQGKFEDVERHYARALSIYEALGGPHDPNVAKTKNNLASAYLKQNKYQQAEELYKEILHKEDLPAPLGAPNTGTAGDAEQALRRSSSLSKIRESIRRGSEKLVSRLRGEAAAGAAGMKRAMSLNTLNVDAPRAPGTQFPSWHLDKAPRTLSASTQDLSPH

SEQ ID NO: 11240 - protein, 667 aa, Homo sapiens
MRACAGSTREAGSGAQDLSTLLCLEESMEEQDEKPPEPPKVCAQEGVNFKIVTVDFTREEQGTCNPAQRTLDRDVILENHRDLVSWDLATAVGKKDSTSKQRIFDEEPANGVKIERFTRDDPWLSSCEEVDDCKDQLEKQQEKQEILLQEVAFTQRKAVIHERVCKSDETGEKSGLNSSLFSSPVIPIRNHFHKHVSHAKKWHLNAAVNSHQKINENETLYENNECGKPPQSIHLIQFTRTQTKDKSYGFSDRIQSFCHGTPLHIHEKIHGGGKTFDFKECGQVLNPKISHNEQQRIPFEESQYKCSETSHSSSLTQNMRNNSEEKPFECNQCGKSFSWSSHLVAHQRTHTGEKPYECSECGKSFSRSSHLVSHQRTHTGEKPYRCNQCGKSFSQSYVLVVHQRTHTGEKPYECNQCGKSFRQSYKLIAHQRTHTGEKPYECNQCGKSFIQSYKLIAHQRIHTGEKPYECNQCGKSFSQSYKLVAHQRTHTGEKPFECNQCGKSFSWSSQLVAHQRTHTGEKPYECSECGKSFNRSSHLVMHQRIHTGEKPYECNQCGKSFSQSYVLVVHQRTHTGEKPYECSQCGKSFRQSSCLTQHQRTHTGEKPFECNQCGKTFSLSARLIVHQRTHTGEKPFTCIQCGKAFINSYKLIRHQATHTEEKLYECN

SEQ ID NO: 11241 - protein, 670 aa, Homo sapiens
MTKFQEMVTFKDVAVVFTREELGLLDLAQRKLYQDVMLENFRNLLSVGYQPFKLDVILQLGKEDKLRMMETEIQGDGCSGHKNQNEIDTLQEVRLRFLSYEDLICWQIWEQFTSKLTSNQDLIINLQGKRSKLLKQGDSPCQVWTGESSQVSEDENYVIKLQGESSNSIKNQELPLRTTWDFWRKMYLREPQNYQSRCQQIDVKNKLCKCDHCVRQRIAHQHDDHGVHKREKAFSHNNCGKDCVKESSQHSIIQSGEQTSDENGKGLSVGSNLELHQQLHLRDKPHVNVEYGKGIGYSSGLPRHQCFHIGEKCYRNGDSGEGFSQGSHLQPHQRVSTGENLYRCQVYARSSNQNSCLPSHELTHPGEKLCTCGRCGKGFHHSLDFDIHCVDSAGERACKCDVYDKGFSQTSQLQAHQRGHSRDKTYKWEVSDRIFNRNSGLHQRVHTGEKPYKCEVCDKGFSKASNLQAHQRIHTGEKPYKCDVCDKNFSRNSHLQAHQRVHTGEKPYKCDTCGKDFSQISHLQAHQRVHKGEKPYKCETCGKGFSQSSHLQDHQQVHTGENPYKCDVCGKGFSWSSHLQAHQRVHTGEKPYKCEECRKGFIWNSYLHVHQRIHTGEKPYKCGMCGKSFSQTSHLQAHQRVHTGEKPYKCFVCGKGFSKSSLSSDSSESP

SEQ ID NO: 11242 - protein, 1043 aa, Homo sapiens
MAELEHLGGKRAESARMRRAEQLRRWRGSLTEQEPAERRGAGRQPLTRRGSPRVRFEDGAVFLAACSSGDTDEVRKLLARGADINTVNVDGLTALHQACIDENLDMVKFLVENRANVNQQDNEGWTPLHAAASCGYLNIAEYFINHGASVGIVNSEGEVPSDLAEEPAMKDLLLEQVKKQGVDLEQSRKEEEQQMLQDARQWLNSGKIEDVRQARSGATALHVAAAKGYSEVLRLLIQAGYELNVQDYDGWTPLHAAAHWGVKEACSILAEALCDMDIRNKLGQTPFDVADEGLVEHLELLQKKQNVLRSEKETRNKLIESDLNSKIQSGFFKNKEKMLYEEETPKSQEMEEENKESSSSSSEEEEGEDEASESETEKEADKKPEAFVNHSNSESKSSITEQIPAPAQNTFSASSARRFSSGLFNKPEEPKDESPSSWRLGLRKTGSHNMLSEVANSREPIRDRGSSIYRSSSSPRISALLDNKDKERENKSYISSLAPRKLNSTSDIEEKENRESAVNLVRSGSYTRQLWRDEAKGNEIPQTIAPSTYVSTYLKSASFGRSSDPTSPYISANRNSSPATSPITIGSSTSRGSQWQPASSCPAPISANTTASVHHGRTPHKSQADTTAEKTADNVSSSTPLCVITNRPLPSTANGVTATPVLSITGTDSSVEAREKRRSYLTPVRDEEAESLRKARSRQARQTRRSTQGVTLTDLQEAERTFSRSRAERQAQEQPREKPTDTEGLEGSPEKHEPSAVPATEAGEGQQPWGRSLDEEPICHRLRCPAQPDKPTTPASPSTSRPSLYTSSHLLWTNRFSVPDSESSETTTNTTTAKEMDKNENEEADLDEQSSKRLSIRERRRPKERRRGTGINFWTKDEDETDGSEEVKETWHERLSRLESGGSNPTTSDSYGDRASARARREAREARLATLTSRVEEDSNRDYKKLYESALTENQKLKTKLQEAQLELADIKSKLEKVAQQKQEKTSDRSSVLEMEKRERRALERKMSEMEEEMKVLTELKSDNQRLKDENGALIRVISKLSK

SEQ ID NO: 11243 - protein, 484 aa, Homo sapiens
MGVPRTPSRTVLFERERTGLTYRVPSLLPVPPGPTLLAFVEQRLSPDDSHAHRLVLRRGTLAGGSVRWGALHVLGTAALAEHRSMNPCPVHDAGTGTVFLFFIAVLGHTPEAVQIATGRNAARLCCVASRDAGLSWGSARDLTEEAIGGAVQDWATFAVGPGHGVQLPSGRLLVPAYTYRVDRRECFGKICRTSPHSFAFYSDDHGRTWRCGGLVPNLRSGECQLAAVDGGQAGSFLYCNARSPLGSRVQALSTDEGTSFLPAERVASLPETAWGCQGSIVGFPAPAPNRPRDDSWSVGPGSPLQPPLLGPGVHEPPEEAAVDPRGGQVPGGPFSRLQPRGDGPRQPGPRPGVSGDVGSWTLALPMPFAAPPQSPTWLLYSHPVGRRARLHMGIRLSQSPLDPRSWTEPWVIYEGPSGYSDLASIGPAPEGGLVFACLYESGARTSYDEISFCTFSLREVLENVPASPKPPNLGDKPRGCCWPS

SEQ ID NO: 11244 - protein, 672 aa, Homo sapiens
MRAGRGATPARELFRDAAFPAADSSLFCDLSTPLAQFREDITWRRPQEICATPRLFPDDPREGQVKQGLLGDCWFLCACAALQKSRHLLDQVIPPGQPSWADQEYRGSFTCRIWQFGRWVEVTTDDRLPCLAGRLCFSRCQREDVFWLPLLEKVYAKVHGSYEHLWAGQVADALVDLTGGLAERWNLKGVAGSGGQQDRPGRWEHRTCRQLLHLKDQCLISCCVLSPRAGARELGEFHAFIVSDLRELQGQAGQCILLLRIQNPWGRRCWQGLWREGGEGWSQVDAAVASELLSQLQEGEFWVEEEEFLREFDELTVGYPVTEAGHLQSLYTERLLCHTRALPGAWVKGQSAGGCRNNSGFPSNPKFWLRVSEPSEVYIAVLQRSRLHAADWAGRARALVGDSHTSWSPASIPGKHYQAVGLHLWKVEKRRVNLPRVLSMPPVAGTACHAYDREVHLRCELSPGYYLAVPSTFLKDAPGEFLLRVFSTGRVSLSAIRAVAKNTTPGAALPAGEWGTVQLRGSWRVGQTAGGSRNFASYPTNPCFPFSVPEGPGPRCVRITLHQHCRPSDTEFHPIGFHIFQVPEGGRSQDAPPLLLQEPLLSCVPHRYAQEVSRLCLLPAGTYKVVPSTYLPDTEGAFTVTIATRIDRPSIHSQEMLGQFLQEVSIMAVMKT

SEQ ID NO: 11245 - protein, 269 aa, Homo sapiens
MLLLINVILTLWVSCANGQVKPCDFPDIKHGGLFHENMRRPYFPVAVGKYYSYYCDEHFETPSGSYWDYIHCTQNGWSPAVPCLRKCYFPYLENGYNQNYGRKFVQGNSTEVACHPGYGLPKAQTTVTCTEKGWSPTPRCIRVNSSEKCGPPPPISNGDTTSFLLKVYVPQSRVEYQCQPYYELQGSNYVTCSNGEWSEPPRCIHPCIITEENMNKNNIKLKGRSDRKYYAKTGDTIEFMCKLGYNANTSILSFQAVCREGIVEYPRCE

SEQ ID NO: 11246 - protein, 625 aa, Homo sapiens
MNAAVVRRTQEALGKVIRRPPLTEKLLSKPPFRYLHDIITEVIRMTGFMKGLYTDAEMKSDNVKDKDAKISFLQKAIDVVVMVSGEPLLAKPARIVAGHEPERTNELLQIIGKCCLNKLSSDDAVRRVLAGEKGEVKGRASLTSRSQELDNKNVREEESRVHKNTEDRGDAEIKERSTSRDRKQKEELKEDRKPREKDKDKEKAKENGGNRHREGERERAKARARPDNERQKDRGNRERDRDSERKKETERKSEGGKEKERLRDRDRERDRDKGKDRDRRRVKNGEHSWDLDREKNREHDKPEKKSASSGEMSKKLSDGTFKDSKAETETEISTRASKSLTTKTSKRRSKNSVEGDSTSDAEGDAGPAGQDKSEVPETPEIPNELSSNIRRIPRPGSARPAPPRVKRQDSMEALQMDRSGSGKTVSNVITESHNSDNEEDDQFVVEAAPQLSEMSEIEMVTAVELEEEEKHGGLVKKILETKKDYEKLQQSPKPGEKERSLFESAWKKEKDIVSKEIEKLRTSIQTLCKSALPLGKIMDYIQEDVDAMQNELQMWHSENRQHAEALQQEQRITDCAVEPLKAELAELEQLIKDQQDKICAVKANILKNEEKIQKMVYSINLTSRR

SEQ ID NO: 11247 - protein, 808 aa, Homo sapiens
MTSPAAAQSREIDCLSPEAQKLAEARLAAKRAARAEAREIRMKELERQQKEEDSERYSRRSRRNTSASDEDERMSVGSRGSLRVEERPEKDFTEKGSRNMPGLSAATLASLGGTSSRRGSGDTSISIDTEASIREIKELNELKDQIQDVEGKYMQGLKEMKDSLAEVEEKYKKAMVSNAQLDNEKTNFMYQVDTLKDMLLELEEQLAESRRQYEEKNKEFEREKHAHSILQFQFAEVKEALKQREEMLEKHGIILNSEIATNGETSDTLNNVGYQGPTKMTKEELNALKSTGDGTLGRASEVEVKNEIVANVGKREILHNTEKEQHTEDTVKDCVDIEVFPAGENTEDQKSSEDTAPFLGTLAGATYEEQVQSQILESSSLPENTVQVESNEVMGAPDDRTRTPLEPSNCWSDLDGGNHTENVGEAAVTQVEEQAGTVASCPLGHSDDTVYHDDKCMVEVPQELETSTGHSLEKEFTNQEAAEPKEVPAHSTEVGRDHNEEEGEETGLRDEKPIKTEVPGSPAGTEGNCQEATGPSTVDTQNEPLDMKEPDEEKSDQQGEALDSSQKKTKNKKKKNKKKKSPVPVETLKDVKKELTYQNTDLSEIKEEEQVKSTDRKSAVEAQNEVTENPKQKIAAESSENVDCPENPKIKLDGKLDQEGDDVQTAAEEVLADGDTLDFEDDTVQSSGPRAGGEELDEGVAKDNAKIDGATQSSPAEPKSEDADRCTLPEHESPSQDISDACEAESTERCEMSEHPSQTVRKALDSNSLENDDLSAPGREPGHFNPESREDTRGGNEKGKSKEDCTMS

SEQ ID NO: 11248 - protein, 1036 aa, Homo sapiens
MRKHRHLPLVAVFCLFLSGFPTTHAQQQQAVIEVNKRDIVFLVDGSSALGLANFNAIRDFIAKVIQRLEIGQDLIQVAVAQYADTVRPEFYFNTHPTKREVITAVRKMKPLDGSALYTGSALDFVRNNLFTSSAGYRAAEGIPKLLVLITGGKSLDEISQPAQELKRSSIMAFAIGNKGADQAELEEIAFDSSLVFIPAEFRAAPLQGMLPGLLAPLRTLSGTPEVHSNKRDIIFLLDGSANVGKTNFPYVRDFVMNLVNSLDIGNDNIRVGLVQFSDTPVTEFSLNTYQTKSDILGHLRQLQLQGGSGLNTGSALSYVYANHFTEAGGSRIREHVPQLLLLLTAGQSEDSYLQAANALTRAGILTFCVGASQANKAELEQIAFNPSLVYLMDDFSSLPALPQQLIQPLTTYVSGGVEEVPLAQPESKRDILFLFDGSANLVGQFPVVRDFLYKIIDELNVKPEGTRIAVAQYSDDVKVESRFDEHQSKPEILNLVKRMKIKTGKALNLGYALDYAQRYIFVKSAGSRIEDGVLQFLVLLVAGRSSDRVDGPASNLKQSGVVPFIFQAKNADPAELEQIVLSPAFILAAESLPKIGDLHPQIVNLLKSVHNGAPAPVSGEKDVVFLLDGSEGVRSGFPLLKEFVQRVVESLDVGQDRVRVAVVQYSDRTRPEFYLNSYMNKQDVVNAVRQLTLLGGPTPNTGAALEFVLRNILVSSAGSRITEGVPQLLIVLTADRSGDDVRNPSVVVKRGGAVPIGIGIGNADITEMQTISFIPDFAVAIPTFRQLGTVQQVISERVTQLTREELSRLQPVLQPLPSPGVGGKRDVVFLIDGSQSAGPEFQYVRTLIERLVDYLDVGFDTTRVAVIQFSDDPKVEFLLNAHSSKDEVQNAVQRLRPKGGRQINVGNALEYVSRNIFKRPLGSRIEEGVPQFLVLISSGKSDDEVDDPAVELKQFGVAPFTIARNADQEELVKISLSPEYVFSVSTFRELPSLEQKLLTPITTLTSEQIQKLLASTRYPPPGEMGASEVLLGAFSI

SEQ ID NO: 11249 - protein, 1237 aa, Homo sapiens
MRKHRHLPLVAVFCLFLSGFPTTHAQQQQAAQDSADIIFLIDGSNNTGSVNFAVILDFLVNLLEKLPIGTQQIRVGVVQFSDEPRTMFSLDTYSTKAQVLGAVKALGFAGGELANIGLALDFVVENHFTRAGGSRVEEGVPQVLVLISAGPSSDEIRYGVVALKQASVFSFGLGAQAASRAELQHIATDDNLVFTVPEFRSFGDLQEKLLPYIVGVAQRHIVLKPPTIVTQVIEVNKRDIVFLVDGSSALGLANFNAIRDFIAKVIQRLEIGQDLIQVAVAQYADTVRPEFYFNTHPTKREVITAVRKMKPLDGSALYTGSALDFVRNNLFTSSAGYRAAEGIPKLLVLITGGKSLDEISQPAQELKRSSIMAFAIGNKGADQAELEEIAFDSSLVFIPAEFRAAPLQGMLPGLLAPLRTLSGTPEVHSNKRDIIFLLDGSANVGKTNFPYVRDFVMNLVNSLDIGNDNIRVGLVQFSDTPVTEFSLNTYQTKSDILGHLRQLQLQGGSGLNTGSALSYVYANHFTEAGGSRIREHVPQLLLLLTAGQSEDSYLQAANALTRAGILTFCVGASQANKAELEQIAFNPSLVYLMDDFSSLPALPQQLIQPLTTYVSGGVEEVPLAQPESKRDILFLFDGSANLVGQFPVVRDFLYKIIDELNVKPEGTRIAVAQYSDDVKVESRFDEHQSKPEILNLVKRMKIKTGKALNLGYALDYAQRYIFVKSAGSRIEDGVLQFLVLLVAGRSSDRVDGPASNLKQSGVVPFIFQAKNADPAELEQIVLSPAFILAAESLPKIGDLHPQIVNLLKSVHNGAPAPVSGEKDVVFLLDGSEGVRSGFPLLKEFVQRVVESLDVGQDRVRVAVVQYSDRTRPEFYLNSYMNKQDVVNAVRQLTLLGGPTPNTGAALEFVLRNILVSSAGSRITEGVPQLLIVLTADRSGDDVRNPSVVVKRGGAVPIGIGIGNADITEMQTISFIPDFAVAIPTFRQLGTVQQVISERVTQLTREELSRLQPVLQPLPSPGVGGKRDVVFLIDGSQSAGPEFQYVRTLIERLVDYLDVGFDTTRVAVIQFSDDPKVEFLLNAHSSKDEVQNAVQRLRPKGGRQINVGNALEYVSRNIFKRPLGSRIEEGVPQFLVLISSGKSDDEVDDPAVELKQFGVAPFTIARNADQEELVKISLSPEYVFSVSTFRELPSLEQKLLTPITTLTSEQIQKLLASTRYPPPGEMGASEVLLGAFSI

SEQ ID NO: 11250 - protein, 856 aa, Homo sapiens
MDVRRLKVNELREELQRRGLDTRGLKAELAERLQAALEAEEPDDERELDADDEPGRPGHINEEVETEGGSELEGTAQPPPPGLQPHAEPGGYSGPDGHYAMDNITRQNQFYDTQVIKQENESGYERRPLEMEQQQAYRPEMKTEMKQGAPTSFLPPEASQLKPDRQQFQSRKRPYEENRGRGYFEHREDRRGRSPQPPAEEDEDDFDDTLVAIDTYNCDLHFKVARDRSSGYPLTIEGFAYLWSGARASYGVRRGRVCFEMKINEEISVKHLPSTEPDPHVVRIGWSLDSCSTQLGEEPFSYGYGGTGKKSTNSRFENYGDKFAENDVIGCFADFECGNDVELSFTKNGKWMGIAFRIQKEALGGQALYPHVLVKNCAVEFNFGQRAEPYCSVLPGFTFIQHLPLSERIRGTVGPKSKAECEILMMVGLPAAGKTTWAIKHAASNPSKKYNILGTNAIMDKMRVMGLRRQRNYAGRWDVLIQQATQCLNRLIQIAARKKRNYILDQTNVYGSAQRRKMRPFEGFQRKAIVICPTDEDLKDRTIKRTDEEGKDVPDHAVLEMKANFTLPDVGDFLDEVLFIELQREEADKLVRQYNEEGRKAGPPPEKRFDNRGGGGFRGRGGGGGFQRYENRGPPGGNRGGFQNRGGGSGGGGNYRGGFNRSGGGGYSQNRWGNNNRDNNNSNNRGSYNRAPQQQPPPQQPPPPQPPPQQPPPPPSYSPARNPPGASTYNKNSNIPGSSANTSTPTVSSYSPPQPSYSQPPYNQGGYSQGYTAPPPPPPPPPAYNYGSYGGYNPAPYTPPPPPTAQTYPQPSYNQYQQYAQQWNQYYQNQGQWPPYYGNYDYGSYSGNTQGGTSTQ

SEQ ID NO: 11251 - protein, 607 aa, Homo sapiens
MSSGLRAADFPRWKRHISEQLRRRDRLQRQAFEEIILQYNKLLEKSDLHSVLAQKLQAEKHDVPNRHEISPGHDGTWNDNQLQEMAQLRIKHQEELTELHKKRGELAQLVIDLNNQMQRKDREMQMNEAKIAECLQTISDLETECLDLRTKLCDLERANQTLKDEYDALQITFTALEGKLRKTTEENQELVTRWMAEKAQEANRLNAENEKDSRRRQARLQKELAEAAKEPLPVEQDDDIEVIVDETSDHTEETSPVRAISRAATKRLSQPAGGLLDSITNIFGRRSVSSFPVPQDNVDTHPGSGKEVRVPATALCVFDAHDGEVNAVQFSPGSRLLATGGMDRRVKLWEVFGEKCEFKGSLSGSNAGITSIEFDSAGSYLLAASNDFASRIWTVDDYRLRHTLTGHSGKVLSAKFLLDNARIVSGSHDRTLKLWDLRSKVCIKTVFAGSSCNDIVCTEQCVMSGHFDKKIRFWDIRSESIVREMELLGKITALDLNPERTELLSCSRDDLLKVIDLRTNAIKQTFSAPGFKCGSDWTRVVFSPDGSYVAAGSAEGSLYIWSVLTGKVEKVLSKQHSSSINAVAWSPSGSHVVSVDKGCKAVLWAQY

SEQ ID NO: 11252 - protein, 624 aa, Homo sapiens
MSSGLRAADFPRWKRHISEQLRRRDRLQRQAFEEIILQYNKLLEKSDLHSVLAQKLQAEKHDVPNRHEISPGHDGTWNDNQLQEMAQLRIKHQEELTELHKKRGELAQLVIDLNNQMQRKDREMQMNEAKIAECLQTISDLETECLDLRTKLCDLERANQTLKDEYDALQITFTALEGKLRKTTEENQELVTRWMAEKAQEANRLNAENEKDSRRRQARLQKELAEAAKEPLPVEQDDDIEVIVDETSDHTEETSPVRAISRAATKRLSQPAGGLLDSITNIFGLSESPLLGHHSSSDAARRRSVSSFPVPQDNVDTHPGSGKEVRVPATALCVFDAHDGEVNAVQFSPGSRLLATGGMDRRVKLWEVFGEKCEFKGSLSGSNAGITSIEFDSAGSYLLAASNDFASRIWTVDDYRLRHTLTGHSGKVLSAKFLLDNARIVSGSHDRTLKLWDLRSKVCIKTVFAGSSCNDIVCTEQCVMSGHFDKKIRFWDIRSESIVREMELLGKITALDLNPERTELLSCSRDDLLKVIDLRTNAIKQTFSAPGFKCGSDWTRVVFSPDGSYVAAGSAEGSLYIWSVLTGKVEKVLSKQHSSSINAVAWSPSGSHVVSVDKGCKAVLWAQY

SEQ ID NO: 11253 - protein, 588 aa, Homo sapiens
MSSGLRAADFPRWKRHISEQLRRRDRLQRQAFEEIILQYNKLLEKSDLHSVLAQKLQAEKHDVPNRHEISPGHDGTWNDNQLQEMAQLRIKHQEELTELHKKRGELAQLVIDLNNQMQRKDREMQMNEAKIAECLQTISDLETECLDLRTKLCDLERANQTLKDEYDALQITFTALEGKLRKTTEENQELVTRWMAEKAQEANRLNAENEKDSRRRQARLQKELAEAAKEPLPVEQDDDIEVIVDETSDHTEETSPVRAISRAATRRSVSSFPVPQDNVDTHPGSGKEVRVPATALCVFDAHDGEVNAVQFSPGSRLLATGGMDRRVKLWEVFGEKCEFKGSLSGSNAGITSIEFDSAGSYLLAASNDFASRIWTVDDYRLRHTLTGHSGKVLSAKFLLDNARIVSGSHDRTLKLWDLRSKVCIKTVFAGSSCNDIVCTEQCVMSGHFDKKIRFWDIRSESIVREMELLGKITALDLNPERTELLSCSRDDLLKVIDLRTNAIKQTFSAPGFKCGSDWTRVVFSPDGSYVAAGSAEGSLYIWSVLTGKVEKVLSKQHSSSINAVAWSPSGSHVVSVDKGCKAVLWAQY

SEQ ID NO: 11254 - protein, 678 aa, Homo sapiens
MLMARDGTREDNHKLHKRWLRHQAFMAELAQNKEWLEKIEREGQQLMQEKPELAASVRKKLGEIRQCWAELESTTQAKARQLFEASKADQLVQSFAELDKKLLHMESQLQDVDPGGDLATVNSQLKKLQSMESQVEEWYREVGELQAQTAALPLEPASKELVGERQNAVGERLVRLLEPLQERRRLLLASKELHQVAHDLDDELAWVQERLPLAMQTERGNGLQAVQQHIKKNQGLRREIQAHGPRLEEVLERAGALASLRSPEAEAVRRGLEQLQSAWAGLREAAERRQQVLDAAFQVEQYYFDVAEVEAWLGEQELLMMSEDKGKDEQSTLQLLKKHLQLEQGVENYEESIAQLSRQCRALLEMGHPDSEQISRRQSQVDRLYVALKELGEERRVALEQQYWLYQLSRQVSELEHWIAEKEVVAGSPELGQDFEHVSVLQEKFSEFASETGMAGRERLAAVNQMVDELIECGHTAAATMAEWKDGLNEAWAELLELMGTRAQLLAASRELHKFFSDARELQGQIEEKRRRLPRLTTPPEPRPSASSMQRTLRAFEHDLQLLVSQVRQLQEGAAQLRTVYAGEHAEAIASREQEVLQGWKELLSACEDARLHVSSTADALRFHSQVRDLLSWMDGIASQIGAADKPRCPSSLLGLPASPWWPTPATPSPLTAPFSME

SEQ ID NO: 11255 - protein, 319 aa, Homo sapiens
MSQQNTSGDCLFDGVNELMKTLQFAVHIPTFVLGLLLNLLAIHGFSTFLKNRWPDYAATSIYMINLAVFDLLLVLSLPFKMVLSQVQSPFPSLCTLVECLYFVSMYGSVFTICFISMDRFLAIRYPLLVSHLRSPRKIFGICCTIWVLVWTGSIPIYSFHGKVEKYMCFHNMSDDTWSAKVFFPLEVFGFLLPMGIMGFCCSRSIHILLGRRDHTQDWVQQKACIYSIAASLAVFVVSFLPVHLGFFLQFLVRNSFIVECRAKQSISFFLQLSMCFSNVNCCLDVFCYYFVIKEFRMNIRAHRPSRVQLVLQDTTISRG

SEQ ID NO: 11256 - protein, 542 aa, Homo sapiens
MGQQVGRVGEAPGLQQPQPRGIRGSSAARPSGRRRDPAGRTTETGFNIFTQHEALHRPYGCDVEPQALNEAIRWSSKENLLGATESDPNLFVALYDFVASGDNTLSITKGEKLRVLGYNQNGEWSEVRSKNGQGWVPSNYITPVNSLEKHSWYHGPVSRSAAEYLLSSLINGSFLVRESESSPGQLSISLRYEGRVYHYRINTTADGKVYVTAESRFSTLAELVHHHSTVADGLVTTLHYPAPKCNKPTVYGVSPIHDKWEMERTDITMKHKLGGGQYGEVYVGVWKKYSLTVAVKTLKEDTMEVEEFLKEAAVMKEIKHPNLVQLLGVCTLEPPFYIVTEYMPYGNLLDYLRECNREEVTAVVLLYMATQISSAMEYLEKKNFIHRDLAARNCLVGENHVVKVADFGLSRLMTGDTYTAHAGAKFPIKWTAPESLAYNTFSIKSDVWAFGVLLWEIATYGMSPYPGIDLSQVYDLLEKGYRMEQPEGCPPKVYELMRACWKWSPADRPSFAETHQAFETMFHDSSISEVLLHCANQTCITL

SEQ ID NO: 11257 - protein, 867 aa, Homo sapiens
MAQQGQQGQMASGDSNLNFRMVAEIQNVEGQNLQEQVCPEPIFRFFRENKVEIASAITRPFPFLMGLRDRSFISEQMYEHFQEAFRNLVPVTRVMYCVLSELEKTFGWSHLEALFSRINLMAYPDLNEIYRSFQNVCYEHSPLQMNNVNDLEDRPRLLPYGKQENSNACHEMDDIAVPQEALSSSPRCEPGFSSESCEQLALPKAGGGDAEDAPSLLPGGGVSCKLAIQIDEGESEEMPKLLPYDTEVLESNGMIDAARTYSTAPGEKQGEEEGRNSPRKRNQDKEKYQESPEGRDKETFDLKTPQVTNEGEPEKGLCLLPGEGEEGSDDCSEMCDGEEPQEASSSLARCGSVSCLSAETFDLKTPQVTNEGEPEKELSLLPGEGEEGSDDCSEMCDGEERQEASSSLARRGSVSSELENHPMNEEGESEELASSLLYDNVPGAEQSAYENEKCSCVMCFSEEVPGSPEARTESDQACGTMDTVDIANNSTLGKPKRKRRKKRGHGWSRMRMRRQENSQQNDNSKADGQVVSSEKKANVNLKDLSKIRGRKRGKPGTRFTQSDRAAQKRVRSRASRKHKDETVDFKAPLLPVTCGGVKGILHKKKLQQGILVKCIQTEDGKWFTPTEFEIKGGHARSKNWRLSVRCGGWPLRWLMENGFLPDPPRIRYRKKKRILKSQNNSSVDPCMRNLDECEVCRDGGELFCCDTCSRVFHEDCHIPPVEAERTPWNCIFCRMKESPGSQQCCQESEVLERQMCPEEQLKCEFLLLKVYCCSESSFFAKIPYYYYIREACQGLKEPMWLDKIKKRLNEHGYPQVEGFVQDMRLIFQNHRASYKYKDFGQMGFRLEAEFEKNFKEVFAIQETNGNN

SEQ ID NO: 11258 - protein, 142 aa, Homo sapiens
MSFLTVPYKLPVSLSVGSCVIIKGTLIDSSINEPQLQVDFYTEMNEDSEIAFHLRVHLGRRVVMNSREFGIWMLEENLHYVPFEDGKPFDLRIYVCHNEYEVKVNGEYIYAFVHRIPPSYVKMIQVWRDVSLDSVLVNNGRR

SEQ ID NO: 11259 - protein, 248 aa, Homo sapiens
MPRIAGNHLMLEESRTCSSPELLDGVWPCQPLHFGLPASEMHFQTMLKSKLNVLTLKKEPLPAVIFHEPEAIELCTTTPLMKTRTHSGCKVTYLGKVSTTGMQFLSGCTEKPVIELWKKHTLAREDVFPANALLEIRPFQVWLHHLDHKGEATVHMDTFQVARIAYCTADHNVSPNIFAWVYREINDDLSYQMDCHAVECESKLEAKKLAHAMMEAFRKTFHSMKSDGRIHSNSSSEEVSQELESDDG

SEQ ID NO: 11260 - protein, 217 aa, Homo sapiens
MWQPATERLQHFQTMLKSKLNVLTLKKEPLPAVIFHEPEAIELCTTTPLMKTRTHSGCKVTYLGKVSTTGMQFLSGCTEKPVIELWKKHTLAREDVFPANALLEIRPFQVWLHHLDHKGEATVHMDTFQVARIAYCTADHNVSPNIFAWVYREINDDLSYQMDCHAVECESKLEAKKLAHAMMEAFRKTFHSMKSDGRIHSNSSSEEVSQELESDDG

SEQ ID NO: 11261 - protein, 1700 aa, Homo sapiens
MDGNSLLSVPSNLESSRMYDVLEPQQGRGCGSSGSGPGNSITACKKVLRSNSLLESTDYWLQNQRMPCQIGFVEDKSENCASVCFVNLDVNKDECSTEHLQQKLVNVSPDLPKLISSMNVQQPKENEIVVLSGLASGNLQADFEVSQCPWLPDICLVQCARGNRPNSTNCIIFEINKFLIGLELVQERQLHLETNILKLEDDTNCSLSSIEEDFLTASEHLEEESEVDESRNDYENINVSANVLESKQLKGATQVEWNCNKEKWLYALEDKYINKYPTPLIKTERSPENLTKNTALQSLDPSAKPSQWKREAVGNGRQATHYYHSEAFKGQMEKSQALYIPKDAYFSMMDKDVPSACAVAEQRSNLNPGDHEDTRNALPPRQDGEVTTGKYATNLAESVLQDAFIRLSQSQSTLPQESAVSVSVGSSLLPSCYSTKDTVVSRSWNELPKIVVVQSPDGSDAAPQPGISSWPEMEVSVETSSILSGENSSRQPQSALEVALACAATVIGTISSPQATERLKMEQVVSNFPPGSSGALQTQAPQGLKEPSINEYSFPSALCGMTQVASAVAVCGLGEREEVTCSVAPSGSLPPAAEASEAMPPLCGLASMELGKEAIAKGLLKEAALVLTRPNTYSSIGDFLDSMNRRIMETASKSQTLCSENVVRNELAHTLSNVILRHSIDEVHHKNMIIDPNDNRHSSEILDTLMESTNQLLLDVICFTFKKMSHIVRLGECPAVLSKETIRRRETEPSCQPSDPGASQAWTKATESSSSSPLSNSHNTSLVINNLVDGMYSKQDKGGVRPGLFKNPTLQSQLSRSHRVPDSSTATTSSKEIYLKGIAGEDTKSPHHSENECRASSEGQRSPTVSQSRSGSQEAEESIHPNTQEKYNCATSRINEVQVNLSLLGDDLLLPAQSTLQTKHPDIYCITDFAEELADTVVSMATEIAAICLDNSSGKQPWFCAWKRGSEFLMTPNVPCRSLKRKKESQGSGTAVRKHKPPRLSEIKRKTDEHPELKEKLMNRVVDESMNLEDVPDSVNLFANEVAAKIMNLTEFSMVDGMWQAQGYPRNRLLSGDRWSRLKASSCESIPEEDSEARAYVNSLGLMSTLSQPVSRASSVSKQSSCESITDEFSRFMVNQMENEGRGFELLLDYYAGKNASSILNSAMQQACRKSDHLSVRPSCPSKQSSTESITEEFYRYMLRDIERDSRESASSRRSSQDWTAGLLSPSLRSPVCHRQSSMPDSRSPCSRLTVNVPIKANSLDGFAQNCPQDFLSVQPVSSASSSGLCKSDSCLYRRGGTDHITNMLIHETWASSIEALMRKNKIIVDDAEEADTEPVSGGSPSQAEKCANRLAASRMCSGPTLLVQESLDCPRKDSVTECKQPPVSSLSKTASLTNHSPLDSKKETSSCQDPVPINHKRRSLCSREVPLIQIETDQREACAGEPEPFLSKSSLLEEAEGHSNDKNIPDVVRGGDTAVSACQIHSDSLDTRDVPEAEASTEARAPDEAPNPPSSSEESTGSWTQLANEEDNPDDTSSFLQLSERSMSNGNSSATSSLGIMDLDIYQESMPSSPMINELVEEKKILKGQSESTEAPASGPPTGTASPQRSLLVINFDLEPECPDAELRATLQWIAASELGIPTIYFKKSQENRIEKFLDVVQLVHRKSWKVGDIFHAVVQYCKMHEEQKDGRLSLFDWLLELG

SEQ ID NO: 11262 - protein, 718 aa, Homo sapiens
MMFRDQVGVLAGWFKGWNECEQTVALLSLLKRVSQTQARFLQLCLEHSLADCAELHVLEREANSPGIINQWQQESKDKVISLLLTHLPLLKPGNLDAKVEYMKLLPKILAHSIEHNQHIEESRQLLSYALIHPATSLEDRSALAMWLNHLEDRTSTSFGGQNRGRSDSVDYGQTHYYHQRQNSDDKLNGWQNSRDSGICINASNWQDKSMGCENGHVPLYSSSSVPTTINTIGTSTSTILSGQAHHSPLKRSVSLTPPMNVPNQPLGHGWMSHEDLRARGPQCLPSDHAPLSPQSSVASSGSGGSEHLEDQTTARNTFQEEGSGMKDVPAWLKSLRLHKYAALFSQMTYEEMMALTECQLEAQNVTKGARHKIVISIQKLKERQNLLKSLERDIIEGGSLRIPLQELHQMILTPIKAYSSPSTTPEARRREPQAPRQPSLMGPESQSPDCKDGAAATGATATPSAGASGGLQPHQLSSCDGELAVAPLPEGDLPGQFTRVMGKVCTQLLVSRPDEENISSYLQLIDKCLIHEAFTETQKKRLLSWKQQVQKLFRSFPRKTLLDISGYRQQRNRGFGQSNSLPTAGSVGGGMGRRNPRQYQIPSRNVPSARLGLLGTSGFVSSNQRNTTATPTIMKQGRQNLWFANPGGSNSMPSRTHSSVQRTRSLPVHTSPQNMLMFQQPEFQLPVTEPDINNRLESLCLSMTEHALGDGVDRTSTI

SEQ ID NO: 11263 - protein, 505 aa, Homo sapiens
MTTLAGAVPRMMRPGPGQNYPRSGFPLEVSTPLGQGRVNQLGGVFINGRPLPNHIRHKIVEMAHHGIRPCVISRQLRVSHGCVSKILCRYQETGSIRPGAIGGSKPKQVTTPDVEKKIEEYKRENPGMFSWEIRDKLLKDAVCDRNTVPSVSSISRILRSKFGKGEEEEADLERKEAEESEKKAKHSIDGILSERASAPQSDEGSDIDSEPDLPLKRKQRRSRTTFTAEQLEELERAFERTHYPDIYTREELAQRAKLTEARVQVWFSNRRARWRKQAGANQLMAFNHLIPGGFPPTAMPTLPTYQLSETSYQPTSIPQAVSDPSSTVHRPQPLPPSTVHQSTIPSNPDSSSAYCLPSTRHGFSSYTDSFVPPSGPSNPMNPTIGNGLSPQVMGLLTNHGGVPHQPQTDYALSPLTGGLEPTTTVSASCSQRLDHMKSLDSLPTSQSYCPPTYSTTGYSMDPVTGYQYGQYGQSAFHYLKPDIAWFQILLNTFDKSSGEEEDLEQ

SEQ ID NO: 11264 - protein, 484 aa, Homo sapiens
MTTLAGAVPRMMRPGPGQNYPRSGFPLEVSTPLGQGRVNQLGGVFINGRPLPNHIRHKIVEMAHHGIRPCVISRQLRVSHGCVSKILCRYQETGSIRPGAIGGSKPKQVTTPDVEKKIEEYKRENPGMFSWEIRDKLLKDAVCDRNTVPSVSSISRILRSKFGKGEEEEADLERKEAEESEKKAKHSIDGILSERASAPQSDEGSDIDSEPDLPLKRKQRRSRTTFTAEQLEELERAFERTHYPDIYTREELAQRAKLTEARVQVWFSNRRARWRKQAGANQLMAFNHLIPGGFPPTAMPTLPTYQLSETSYQPTSIPQAVSDPSSTVHRPQPLPPSTVHQSTIPSNPDSSSAYCLPSTRHGFSSYTDSFVPPSGPSNPMNPTIGNGLSPQVMGLLTNHGGVPHQPQTDYALSPLTGGLEPTTTVSASCSQRLDHMKSLDSLPTSQSYCPPTYSTTGYSMDPVTGYQYGQYGQSAFHYLKPDIA

SEQ ID NO: 11265 - protein, 270 aa, Homo sapiens
MDLQNDLGQTALHLAAILGETSTVEKLYAAGAGLCVAERRGHTALHLACRVGAHACARALLQPRPRRPREAPDTYLAQGPDRTPDTNHTPVALYPDSDLEKEEEESEEDWKLQLEAENYEGHTPLHVAVIHKDVEMVRLLRDAGADLDKPEPTCGRSPLHLAVEAQAADVLELLLRAGANPAARMYGGRTPLGSAMLRPNPILARLLRAHGAPEPEGEDEKSGPCSSSSDSDSGDEGDEYDDIVVHSSRSQTRLPPTPASKPLPDDPRPV

SEQ ID NO: 11266 - protein, 552 aa, Homo sapiens
MKLTSCLERALGDVFLLIGKECPFLLRDLLSSEELAQVFSQSVMNVLKVFVGSPCGLNLRNVLWHGFASPEEIPPKYCSMMILLTAGLGQLLKSYLQNTKLTLAHRSFISLTNLEDLIVFPDVTYEVLSVLEEVMMKSAFILKIMLPYWEVALVKFKSHRFADCAILLLTQLETGLRNVFATLNRCPKRLLTAESTALYTTFDQILAKHLNDGKINQLPLFLGEPAMEFLWDFLNHQEGPRIRDHLSHGEINLHEFSKETTNQLLAFSLVLLLRFVDDCLLSVFKEKSAVELLISLAEGYSSRCHPVFQLKKQVLSCEESIRVWALLPFPEELTRQAVRLEDNSETNACHSLITKMTDELYHHMPENRCVLKDLDRLPTETWPQLLRELCSTPVPTLFCPRIVLEVLVVLRSISEQCRRVSSQVTVASELRHRQWVERTLRSRQRQNYLRMWSSIRLLSPVLSLILLLIALELVNIHAVCGKNAHEYQQYLKFVKSILQYTENLVAYTSYEKNKWNETINLTHTALLKMWTFSEKKQMLIHLAKKSTSKVLL

SEQ ID NO: 11267 - protein, 1294 aa, Homo sapiens
MEKYHVLEMIGEGSFGRVYKGRRKYSAQVVALKFIPKLGRSEKELRNLQREIEIMRGLRHPNIVHMLDSFETDKEVVVVTDYAEGELFQILEDDGKLPEDQVQAIAAQLVSALYYLHSHRILHRDMKPQNILLAKGGGIKLCDFGFARAMSTNTMVLTSIKGTPLYMSPELVEERPYDHTADLWSVGCILYELAVGTPPFYATSIFQLVSLILKDPVRWPSTISPCFKNFLQGLLTKDPRQRLSWPDLLYHPFIAGHVTIITEPAGPDLGTPFTSRLPPELQVLKDEQAHRLAPKGNQSRILTQAYKRMAEEAMQKKHQNTGPALEQEDKTSKVAPGTAPLPRLGATPQESSLLAGILASELKSSWAKSGTGEVPSAPRENRTTPDCERAFPEERPEVLGQRSTDVVDLENEEPDSDNEWQHLLETTEPVPIQLKAPLTLLCNPDFCQRIQSQLHEAGGQILKGILEGASHILPAFRVLSSLLSSCSDSVALYSFCREAGLPGLLLSLLRHSQESNSLQQQSWYGTFLQDLMAVIQAYFACTFNLERSQTSDSLQVFQEAANLFLDLLGKLLAQPDDSEQTLRRDSLMCFTVLCEAMDGNSRAISKAFYSSLLTTQQVVLDGLLHGLTVPQLPVHTPQGAPQVSQPLREQSEDIPGAISSALAAICTAPVGLPDCWDAKEQVCWHLANQLTEDSSQLRPSLISGLQHPILCLHLLKVLYSCCLVSEGLCRLLGQEPLALESLFMLIQGKVKVVDWEESTEVTLYFLSLLVFRLQNLPCGMEKLGSDVATLFTHSHVVSLVSAAACLLGQLGQQGVTFDLQPMEWMAAATHALSAPAELLTEQGKASLIRDMSSSEMWTVLWHRFSMVLRLPEEASAQEGELSLSSPPSPEPDWTLISPQGMAALLSLAMATFTQEPQLCLSCLSQHGSILMSILKHLLCPSFLNQLRQAPHGSEFLPVVVLSVCQLLCFPFALDMDADLLIGVLADLRDSEVAAHLLQVCCYHLPLMQVELPISLLTRLALMDPTSLNQFVNTVSASPRTIVSFLSVALLSDQPLLTSDLLSLLAHTARVLSPSHLSFIQELLAGSDESYRPLRSLLGHPENSVRAHTYRLLGHLLQHSMALRGALQSQSGLLSLLLLGLGDKDPVVRCSASFAVGNAAYQAGPLGPALAAAVPSMTQLLGDPQAGIRRNVASALGNLGPEGLGEELLQCEVPQRLLEMACGDPQPNVKEAALIALRSLQQEPGIHQVLVSLGASEKLSLLSLGNQSLPHSSPRPASAKHCRKLIHLLRPAHSM

SEQ ID NO: 11268 - protein, 1651 aa, Homo sapiens
MSAGGRDEERRKLADIIHHWNANRLDLFEISQPTEDLEFHGVMRFYFQDKAAGNFATKCIRVSSTATTQDVIETLAEKFRPDMRMLSSPKYSLYEVHVSGERRLDIDEKPLVVQLNWNKDDREGRFVLKNENDAIPPKKAQSNGPEKQEKEGVIQNFKRTLSKKEKKEKKKREKEALRQASDKDDRPFQGEDVENSRLAAEVYKDMPETSFTRTISNPEVVMKRRRQQKLEKRMQEFRSSDGRPDSGGTLRIYADSLKPNIPYKTILLSTTDPADFAVAEALEKYGLEKENPKDYCIARVMLPPGAQHSDEKGAKEIILDDDECPLQIFREWPSDKGILVFQLKRRPPDHIPKKTKKHLEGKTPKGKERADGSGYGSTLPPEKLPYLVELSPGRRNHFAYYNYHTYEDGSDSRDKPKLYRLQLSVTEVGTEKLDDNSIQLFGPGIQPHHCDLTNMDGVVTVTPRSMDAETYVEGQRISETTMLQSGMKVQFGASHVFKFVDPSQDHALAKRSVDGGLMVKGPRHKPGIVQETTFDLGGDIHSGTALPTSKSTTRLDSDRVSSASSTAERGMVKPMIRVEQQPDYRRQESRTQDASGPELILPASIEFRESSEDSFLSAIINYTNSSTVHFKLSPTYVLYMACRYVLSNQYRPDISPTERTHKVIAVVNKMVSMMEGVIQKQKNIAGALAFWMANASELLNFIKQDRDLSRITLDAQDVLAHLVQMAFKYLVHCLQSELNNYMPAFLDDPEENSLQRPKIDDVLHTLTGAMSLLRRCRVNAALTIQLFSQLFHFINMWLFNRLVTDPDSGLCSHYWGAIIRQQLGHIEAWAEKQGLELAADCHLSRIVQATTLLTMDKYAPDDIPNINSTCFKLNSLQLQALLQNYHCAPDEPFIPTDLIENVVTVAENTADELARSDGREVQLEEDPDLQLPFLLPEDGYSCDVVRNIPNGLQEFLDPLCQRGFCRLIPHTRSPGTWTIYFEGADYESHLLRENTELAQPLRKEPEIITVTLKKQNGMGLSIVAAKGAGQDKLGIYVKSVVKGGAADVDGRLAAGDQLLSVDGRSLVGLSQERAAELMTRTSSVVTLEVAKQGAIYHGLATLLNQPSPMMQRISDRRGSGKPRPKSEGFELYNNSTQNGSPESPQLPWAEYSEPKKLPGDDRLMKNRADHRSSPNVANQPPSPGGKSAYASGTTAKITSVSTGNLCTEEQTPPPRPEAYPIPTQTYTREYFTFPASKSQDRMAPPQNQWPNYEEKPHMHTDSNHSSIAIQRVTRSQEELREDKAYQLERHRIEAAMDRKSDSDMWINQSSSLDSSTSSQEHLNHSSKSVTPASTLTKSGPGRWKTPAAIPATPVAVSQPIRTDLPPPPPPPPVHYAGDFDGMSMDLPLPPPPSANQIGLPSAQVAAAERRKREEHQRWYEKEKARLEEERERKRREQERKLGQMRTQSLNPAPFSPLTAQQMKPEKPSTLQRPQETVIRELQPQQQPRTIERRDLQYITVSKEELSSGDSLSPDPWKRDAKEKLEKQQQMHIVDMLSKEIQELQSKPDRSAEESDRLRKLMLEWQFQKRLQESKQKDEDDEEEEDDDVDTMLIMQRLEAERRARDEERRRQQQLEEMRKREAEDRARQEEERRRQEEERTKRDAEEKVMVL

SEQ ID NO: 11269 - protein, 1743 aa, Homo sapiens
MSAGGRDEERRKLADIIHHWNANRLDLFEISQPTEDLEFHGVMRFYFQDKAAGNFATKCIRVSSTATTQDVIETLAEKFRPDMRMLSSPKYSLYEVHVSGERRLDIDEKPLVVQLNWNKDDREGRFVLKNENDAIPPKAQSNGPEKQEKEGVIQNFKRTLSKKEKKEKKKREKEALRQASDKDDRPFQGEDVENSRLAAEVYKDMPETSFTRTISNPEVVMKRRRQQKLEKRMQEFRSSDGRPDSGGTLRIYADSLKPNIPYKTILLSTTDPADFAVAEALEKYGLEKENPKDYCIARVMLPPGAQHSDEKGAKEIILDDDECPLQIFREWPSDKGILVFQLKRRPPDHIPKKTKKHLEGKTPKGKERADGSGYGSTLPPEKLPYLVELSPDGSDSRDKPKLYRLQLSVTEVGTEKLDDNSIQLFGPGIQPHHCDLTNMDGVVTVTPRSMDAETYVEGQRISETTMLQSGMKVQFGASHVFKFVDPSQDHALAKRSVDGGLMVKGPRHKPGIVQETTFDLGGDIHSGTALPTSKSTTRLDSDRVSSASSTAERGMVKPMIRVEQQPDYRRQESRTQDASGPELILPASIEFRESSEDSFLSAIINYTNSSTVHFKLSPTYVLYMACRYVLSNQYRPDISPTERTHKVIAVVNKMVSMMEGVIQKQKNIAGALAFWMANASELLNFIKQDRDLSRITLDAQDVLAHLVQMAFKYLVHCLQSELNNYMPAFLDDPEENSLQRPKIDDVLHTLTGAMSLLRRCRVNAALTIQLFSQLFHFINMWLFNRLVTDPDSGLCSHYWGAIIRQQLGHIEAWAEKQGLELAADCHLSRIVQATTLLTMDKYAPDDIPNINSTCFKLNSLQLQALLQNYHCAPDEPFIPTDLIENVVTVAENTADELARSDGREVQLEEDPDLQLPFLLPEDGYSCDVVRNIPNGLQEFLDPLCQRGFCRLIPHTRSPGTWTIYFEGADYESHLLRENTELAQPLRKEPEIITVTLKKQNGMGLSIVAAKGAGQDKLGIYVKSVVKGGAADDGRLAAGDQLLSVDGRSLVGLSQERAAELMTRTSSVVTLEVAKQGAIYHGLATLLNQPSPMMQRISDRRGSGKPRPKSEGFELYNNSTQNGSPESPQLPWAEYSEPKKLPGDDRLMKNRADHRSSPNVANQPPSPGGKSAYASGTTAKITSVSTGNLCTEEQTPPPRPEAYPIPTQTYTREYFTFPASKSQDRMAPPQNQWPNYEEKPHMHTDSNHSSIAIQRVTRSQEELREDKAYQLERHRIEAAMDRKSDSDMWINQSSSLDSSTSSQEHLNHSSKSVTPASTLTKSGPGRWKTPAAIPATPVAVSQPIRTDLPPPPPPPPVHYAGDFDGMSMDLPLPPPPSANQIGLPSAQVAAAERRKREEHQRWYEKEKARLEEERERKRREQERKLGQMRTQSLNPAPFSPLTAQQMKPEKPSTLQRPQETVIRELQPQQQPRTIERRDLQYITVSKEELSSGDSLSPDPWKRDAKEKLEKQQQMHIVDMLSKEIQELQSKPDRSAEESDRLRKLMLEWQFQKRLQESKQKDEDDEEEEDDDVDTMLIMQRLEAERRARLQDEERRRQQQLEEMRKREAEDRARQEEERRRQEEERTKRDAEEKRRQEEGYYSRLEAERRRQHDEAARRLLEPEAPGPNSYPGSTGAAVGAHDACRDAKEKRSKSQDADSPGSSGAPENLTFKERQRLFSQGQDVSNKVKASRKLTELENELNTK

SEQ ID NO: 11270 - protein, 319 aa, Homo sapiens
MVGEMETKEKPKPTPDYLMQLMNDKKLMSSLPNFCGIFNHLERLLDEEISRVRKDMYNDTLNGSTEKRSAELPDAVGPIVQLQEKLYVPVKEYPDFNFVGRILGPRGLTAKQLEAETGCKIMVRGKGSMRDKKKEEQNRGKPNWEHLNEDLHVLITVEDAQNRAEIKLKRAVEEVKKLLVPAAEGEDSLKKMQLMELAILNGTYRDANIKSPALAFSLAATAQAAPRIITGPAPVLPPAALRTPTPAGPTIMPLIRQIQTAVMPNGTPHPTAAIVPPGPEAGLIYTPYEYPYTLAPATSILEYPIEPSGVLGKFFSPWG

SEQ ID NO: 11271 - protein, 732 aa, Homo sapiens
MVRSGNKAAVVLCMDVGFTMSNSIPGIESPFEQAKKVITMFVQRQVFAENKDEIALVLFGTDGTDNPLSGGDQYQNITVHRHLMLPDFDLLEDIESKIQPGSQQADFLDALIVSMDVIQHETIGKKFEKRHIEIFTDLSSRFSKSQLDIIIHSLKKCDISLQFFLPFSLGKEDGSGDRGDGPFRLGGHGPSFPLKGITEQQKEGLEIVKMVMISLEGEDGLDEIYSFSESLRKLCVFKKIERHSIHWPCRLTIGSNLSIRIAAYKSILQERVKKTWTVVDAKTLKKEDIQKETVYCLNDDDETEVLKEDIIQGFRYGSDIVPFSKVDEEQMKYKSEGKCFSVLGFCKSSQVQRRFFMGNQVLKVFAARDDEAAAVALSSLIHALDDLDMVAIVRYAYDKRANPQVGVAFPHIKHNYECLVYVQLPFMEDLRQYMFSSLKNSKKYAPTEAQLNAVDALIDSMSLAKKDEKTDTLEDLFPTTKIPNPRFQRLFQCLLHRALHPREPLPPIQQHIWNMLNPPAEVTTKSQIPLSKIKTLFPLIEAKKKDQVTAQEIFQDNHEDGPTAKKLKTEQGGAHFSVSSLAEGSVTSVGSVNPAENFRVLVKQKKASFEEASNQLINHIEQFLDTNETPYFMKSIDCIRAFREEAIKFSEEQRFNNFLKALQEKVEIKQLNHFWEIVVQDGITLITKEEASGSSVTAEEAKKFLAPKDKPSGDTAAVFEEGGDVDDLLDMI

SEQ ID NO: 11272 - protein, 578 aa, Homo sapiens
MLENYRNLVSLDLDLQCEIISYIEVPTYETDISSTQLQSIYKREKLYECKKCQKKFSSGYQLILHHRFHVIERPYECKECGKNFRSGYQLTLHQRFHTGEKPYECTECGKNFRSGYQLTVHQRFHTGEKTYECRQCGKAFIYASHIVQHERIHTGGKPYECQECGRAFSQGGHLRIHQRVHTGEKPYKCKECGKTFSRRSNLVEHGQFHTDEKPYICEKCGKAFRRGHQLTVHQRVHTGKKPYECKECGKGYTTASYFLLHQRIHKGGKPYECKECKKTFTLYRNLTRHQNIHTGEKLFECKQCGKTYTTGSKLFQHQKTHTGEKPYECKECGKAFSLYGYLKQHQKIHTGMKHFECKECKKTFTLYRNLTRHQNIHTGKKLFECQECGKAYSTGSNLIQHRKTHTGEKPYKCKECGKTFSLHGYLNQHQKIHTGMKPYECKVCRKTFTFYRNLTLHQSIHTDEKPFECKECGKTFRRSSHLTAHQSIHADKKPYECKECGKAFKMYGYLTQHQKIHTGGKPYECKECGKAFSRASNLVQHERIHTGEKPYVCKQCGKTFRYGSALKAHQRIHRSIKV

SEQ ID NO: 11273 - protein, 1608 aa, Homo sapiens
MREAAAALVPPPAFAVTPAAAMEEPPPPPPPPPPPPEPETESEPECCLAARQEGTLGDSACKSPESDLEDFSDETNTENLYGTSPPSTPRQMKRMSTKHQRNNVGRPASRSNLKEKMNAPNQPPHKDTGKTVENVEEYSYKQEKKIRAALRTTERDRKKNVQCSFMLDSVGGSLPKKSIPDVDLNKPYLSLGCSNAKLPVSVPMPIARPARQTSRTDCPADRLKFFETLRLLLKLTSVSKKKDREQRGQENTSGFWLNRSNELIWLELQAWHAGRTINDQDFFLYTARQAIPDIINEILTFKVDYGSFAFVRDRAGFNGTSVEGQCKATPGTKIVGYSTHHEHLQRQRVSFEQVKRIMELLEYIEALYPSLQALQKDYEKYAAKDFQDRVQALCLWLNITKDLNQKLRIMGTVLGIKNLSDIGWPVFEIPSPRPSKGNEPEYEGDDTEGELKELESSTDESEEEQISDPRVPEIRQPIDNSFDIQSRDCISKKLERLESEDDSLGWGAPDWSTEAGFSRHCLTSIYRPFVDKALKQMGLRKLILRLHKLMDGSLQRARIALVKNDRPVEFSEFPDPMWGSDYVQLSRTPPSSEEKCSAVSWEELKAMDLPSFEPAFLVLCRVLLNVIHECLKLRLEQRPAGEPSLLSIKQLVRECKEVLKGGLLMKQYYQFMLQEVLEDLEKPDCNIDAFEEDLHKMLMVYFDYMRSWIQMLQQLPQASHSLKNLLEEEWNFTKEITHYIRGGEAQAGKLFCDIAGMLLKSTGSFLEFGLQESCAEFWTSADDSSASDEIRRSVIEISRALKELFHEARERASKALGFAKMLRKDLEIAAEFRLSAPVRDLLDVLKSKQYVKVQIPGLENLQMFVPDTLAEEKSIILQLLNAAAGKDCSKDSDDVLIDAYLLLTKHGDRARDSEDSWGTWEAQPVKVVPQVETVDTLRSMQVDNLLLVVMQSAHLTIQRKAFQQSIEGLMTLCQEQTSSQPVIAKALQQLKNDALELCNRISNAIDRVDHMFTSEFDAEVDESESVTLQQYYREAMIQGYNFGFEYHKEVVRLMSGEFRQKIGDKYISFARKWMNYVLTKCESGRGTRPRWATQGFDFLQAIEPAFISALPEDDFLSLQALMNECIGHVIGKPHSPVTGLYLAIHRNSPRPMKVPRCHSDPPNPHLIIPTPEGFSTRSMPSDARSHGSPAAAAAAAAAAVAASRPSPSGGDSVLPKSISSAHDTRGSSVPENDRLASIAAELQFRSLSRHSSPTEERDEPAYPRGDSSGSTRRSWELRTLISQSKDTASKLGPIEAIQKSVRLFEEKRYREMRRKNIIGQVCDTPKSYDNVMHVGLRKVTFKWQRGNKIGEGQYGKVYTCISVDTGELMAMKEIRFQPNDHKTIKETADELKIFEGIKHPNLVRYFGVELHREEMYIFMEYCDEGTLEEVSRLGLQEHVIRLYSKQITIAINVLHEHGIVHRDIKGANIFLTSSGLIKLGDFGCSVKLKNNAQTMPGEVNSTLGTAAYMAPEVITRAKGEGHGRAADIWSLGCVVIEMVTGKRPWHEYEHNFQIMYKVGMGHKPPIPERLSPEGKDFLSHCLESDPKMRWTASQLLDHSFVKVCTDEE

SEQ ID NO: 11274 - protein, 527 aa, Homo sapiens
MRKEHCEYNEPVKSYGNSSSHFVITPFKCNHCGKGFNQTLDLIRHLRIHTGEKPYECSNCRKAFSHKEKLIKHYKIHSREQSYKCNECGKAFIKMSNLIRHQRIHTGEKPYACKECEKSFSQKSNLIDHEKIHTGEKPYECNECGKAFSQKQSLIAHQKVHTGEKPYACNECGKAFPRIASLALHMRSHTGEKPYKCDKCGKAFSQFSMLIIHVRIHTGEKPYECNECGKAFSQSSALTVHMRSHTGEKPYECKECRKAFSHKKNFITHQKIHTREKPYECNECGKAFIQMSNLVRHQRIHTGEKPYICKECGKAFSQKSNLIAHEKIHSGEKPYECNECGKAFSQKQNFITHQKVHTGEKPYDCNECGKAFSQIASLTLHLRSHTGEKPYECDKCGKAFSQCSLLNLHMRSHTGEKPYVCNECGKAFSQRTSLIVHMRGHTGEKPYECNKCGKAFSQSSSLTIHIRGHTGEKPFDCSKCGKAFSQISSLTLHMRKHTGEKPYHCIECGKAFSQKSHLVRHQRIHTH

SEQ ID NO: 11275 - protein, 419 aa, Homo sapiens
MAQESVMFSDVSVDFSQEEWECLNDDQRDLYRDVMLENYSNLVSMAGHSISKPNVISYLEQGKEPWLADRELTRGQWPVLESRCETKKLFLKKEIYEIESTQWEIMEKLTRRDFQCSSFRDDWECNRQFKKELGSQGGHFNQLVFTHEDLPTLSHHPSFTLQQIINSKKKFCASKEYRKTFRHGSQFATHEIIHTIEKPYECKECGKSFRHPSRLTHHQKIHTGKKPFECKECGKTFICGSDLTRHHRIHTGEKPYECKECGKAFSSGSNFTRHQRIHTGEKPYECKECGKAFSSGSNFTQHQRIHTGEKPYECKECGNAFSQSSQLIKHQRIHTGEKPYECKECEKAFRSGSDLTRHQRIHTGEKPYECKICGKAYSQSSQLISHHRIHTSEKPYEYRECGKNFNYDPQLIQHQNLYW

SEQ ID NO: 11276 - protein, 451 aa, Homo sapiens
MATDDKTSPTLDSANDLPRSPTSPSHLTHFKPLTPDQDEPPFKSAYSSFVNLFRFNKERAEGGQGEQQPLSGSWTSPQLPSRTQSVRSPTPYKKQLNEELQRRSSALGDLRACTYCRKIALSYAHSTDSNSIGEDLNALSDSACSVSVLDPSEPRTPVGSRKASRNIFLEDDLAWQSLIHPDSSNTPLSTRLVSVQEDAGKSPARNRSASITNLSLDRSGSPMVPSYETSVSPQANRTYVRTETTEDERKILLDSVQLKDLWKKICHHSSGMEFQDHRYWLRTHPNCIVGKELVNWLIRNGHIATRAQAIAIGQAMVDGRWLDCVSHHDQLFRDEYALYRPLQSTEFSETPSPDSDSVNSVEGHSEPSWFKDIKFDDSDTEQIAEEGDDNLANSASPSKRTSVSSFQSTVDSDSAASISLNVELDNVNFHIKKPSKYPHVPPHPADQKGRR

SEQ ID NO: 11277 - protein, 565 aa, Homo sapiens
MVAPKSHTDDWAPGPFSSKPQRSQLQIFSSVLQTSLLFLLMGLRASGKDSAPTVVSGILGGSVTLPLNISVDTEIENVIWIGPKNALAFARPKENVTIMVKSYLGRLDITKWSYSLCISNLTLNDAGSYKAQINQRNFEVTTEEEFTLFVYEQLQEPQVTMKSVKVSENFSCNITLMCSVKGAEKSVLYSWTPREPHASESNGGSILTVSRTPCDPDLPYICTAQNPVSQRSSLPVHVGQFCTDPGASRGGTTGETVVGVLGEPVTLPLALPACRDTEKVVWLFNTSIISKEREEAATADPLIKSRDPYKNRVWVSSQDCSLKISQLKIEDAGPYHAYVCSEASSVTSMTHVTLLIYRPERNTKLWIGLFLMVCLLCVGIFSWCIWKRKGRCSVPAFCSSQAEAPADTPEPTAGHTLYSVLSQGYEKLDTPLRPARQQPTPTSDSSSDSNLTTEEDEDRPEVHKPISGRYEVFDQVTQEGAGHDPAPEGQADYDPVTPYVTEVESVVGENTMYAQVFNLQGKTPVSQKEESSATIYCSIRKPQVVPPPQQNDLEIPESPTYENFT

SEQ ID NO: 11278 - protein, 626 aa, Homo sapiens
MIFLTALPLFWIMISASRGGHWGAWMPSSISAFEGTCVSIPCRFDFPDELRPAVVHGVWYFNSPYPKNYPPVVFKSRTQVVHESFQGRSRLLGDLGLRNCTLLLSNVSPELGGKYYFRGDLGGYNQYTFSEHSVLDIVNTPNIVVPPEVVAGTEVEVSCMVPDNCPELRPELSWLGHEGLGEPAVLGRLREDEGTWVQVSLLHFVPTREANGHRLGCQASFPNTTLQFEGYASMDVKYPPVIVEMNSSVEAIEGSHVSLLCGADSNPPPLLTWMRDGTVLREAVAESLLLELEEVTPAEDGVYACLAENAYGQDNRTVGLSVMYAPWKPTVNGTMVAVEGETVSILCSTQSNPDPILTIFKEKQILSTVIYESELQLELPAVSPEDDGEYWCVAENQYGQRATAFNLSVEFAPVLLLESHCAAARDTVQCLCVVKSNPEPSVAFELPSRNVTVNESEREFVYSERSGLVLTSILTLRGQAQAPPRVICTARNLYGAKSLELPFQGAHRLMWAKIGPVGAVVAFAILIAIVCYITQTRRKKNVTESPSFSAGDNPPVLFSSDFRISGAPEKYESERRLGSERRLLGLRGEPPELDLSYSHSDLGKRPTKDSYTLTEELAEYAEIRVK

SEQ ID NO: 11279 - protein, 1009 aa, Homo sapiens
MGRGAGREYSPAATTAENGGGKKKQKEKELDELKKEVAMDDHKLSLDELGRKYQVDLSKGLTNQRAQDVLARDGPNALTPPPTTPEWVKFCRQLFGGFSILLWIGAILCFLAYGIQAAMEDEPSNDNLYLGVVLAAVVIVTGCFSYYQEAKSSKIMDSFKNMVPQQALVIREGEKMQINAEEVVVGDLVEVKGGDRVPADLRIISSHGCKVDNSSLTGESEPQTRSPEFTHENPLETRNICFFSTNCVEGTARGIVIATGDRTVMGRIATLASGLEVGRTPIAMEIEHFIQLITGVAVFLGVSFFVLSLILGYSWLEAVIFLIGIIVANVPEGLLATVTVCLTLTAKRMARKNCLVKNLEAVETLGSTSTICSDKTGTLTQNRMTVAHMWFDNQIHEADTTEDQSGATFDKRSPTWTALSRIAGLCNRAVFKAGQENISVSKRDTAGDASESALLKCIELSCGSVRKMRDRNPKVAEIPFNSTNKYQLSIHEREDSPQSHVLVMKGAPERILDRCSTILVQGKEIPLDKEMQDAFQNAYMELGGLGERVLGFCQLNLPSGKFPRGFKFDTDELNFPTEKLCFVGLMSMIDPPRAAVPDAVGKCRSAGIKVIMVTGDHPITAKAIAKGVGIISEGNETVEDIAARLNIPMSQVNPREAKACVVHGSDLKDMTSEQLDEILKNHTEIVFARTSPQQKLIIVEGCQRQGAIVAVTGDGVNDSPALKKADIGIAMGISGSDVSKQAADMILLDDNFASIVTGVEEGRLIFDNLKKSIAYTLTSNIPEITPFLLFIIANIPLPLGTVTILCIDLGTDMVPAISLAYEAAESDIMKRQPRNSQTDKLVNERLISMAYGQIGMIQALGGFFTYFVILAENGFLPSRLLGIRLDWDDRTMNDLEDSYGQEWTYEQRKVVEFTCHTAFFASIVVVQWADLIICKTRRNSVFQQGMKNKILIFGLLEETALAAFLSYCPGMGVALRMYPLNLLIFIYDEVRKLILRRYPGGWVEKETYY

SEQ ID NO: 11280 - protein, 311 aa, Homo sapiens
MLLWTAVLLFVPCVGKTVWLYLQAWPNPVFEGDALTLRCQGWKNTPLSQVKFYRDGKFLHFSKENQTLSMGAATVQSRGQYSCSGQVMYIPQTFTQTSETAMVQVQAPVSRPVLTLHHGPADPAVGDMVQLLCEAQRGSPPILYSFYLDEKIVGNHSAPCGGTTSLLFPVKSEQDAGNYSCEAENSVSRERSEPKKLSLKGSQVLFTPASNWLVPWLPASLLGLMVIAAALLVYVRSWRKAGPLPSQIPPTAPGGEQCPLYANVHHQKGKDEGVVYSVVHRTSKRSEARSAEFTVGRKFYHLCGGEMPAAQ

SEQ ID NO: 11281 - protein, 452 aa, Homo sapiens
MANNYKKIVLLKGLEVINDYHFRIVKSLLSNDLKLNPKMKEEYDKIQIADLMEEKFPGDAGLGKLIEFFKEIPTLGDLAETLKREKLKVKGIIPSKKTKQKEVYPATPACTPSNRLTAKGAEETLGPQKRKKPSEEETGTKRSKMSKEQTRPSCSAGASTSTAMGRSPPPQTSSSAPPNTSSTESLKPLANRHATASKNIFREDPIIAMVLNATKVFKYESSENEQRRMFHATVATQTQFFHVKVLNINLKRKFIKKRIIIISNYSKRNSLLEVNEASSVSEAGPDQTFEVPKDIIRRAKKIPKINILHKQTSGYIVYGLFMLHTKIVNRKTTIYEIQDKTGSMAVVGKGECHNIPCEKGDKLRLFCFRLRKRENMSKLMSEMHSFIQIQKNTNQRSHDSRSMALPQEQSQHPKPSEASTTLPESHLKTPQMPPTTPSSSSFTKVTKDKDIK

SEQ ID NO: 11282 - protein, 461 aa, Homo sapiens
MANNYKKIVLLKGLEVINDYHFRIVKSLLSNDLKLNPKMKEEYDKIQIADLMEEKFPGDAGLGKLIEFFKEIPTLGDLAETLKREKLKVANKIESIPVKGIIPSKKTKQKEVYPATPACTPSNRLTAKGAEETLGPQKRKKPSEEETGTKRSKMSKEQTRPSCSAGASTSTAMGRSPPPQTSSSAPPNTSSTESLKPLANRHATASKNIFREDPIIAMVLNATKVFKYESSENEQRRMFHATVATQTQFFHVKVLNINLKRKFIKKRIIIISNYSKRNSLLEVNEASSVSEAGPDQTFEVPKDIIRRAKKIPKINILHKQTSGYIVYGLFMLHTKIVNRKTTIYEIQDKTGSMAVVGKGECHNIPCEKGDKLRLFCFRLRKRENMSKLMSEMHSFIQIQKNTNQRSHDSRSMALPQEQSQHPKPSEASTTLPESHLKTPQMPPTTPSSSSFTKVTKDKDIK

SEQ ID NO: 11283 - protein, 422 aa, Homo sapiens
MYPNPLIYCTCWDPWNLGPRKLIKTPQLPRKNSTGSSKLTPLVPAPKNHNYLQPTKPVVSPKMKIHSARQEETNKSFYEVINVSPGYQLVRNREQISVTLGDEMFDRKKRWESEIPDKGRFSRTNIISDLEEQISELTAIIEQMNRDHQSAQKLLSSEMDLRCAEMKQNFENKNRELKEAHEAELSELENNYKAALKAEKLAAQEKLEEMGKEYKYLKNMFRTYQDSIYDEMEEKWSKQKAKWKKDEKFERENILLQQKKKMTKKFEMESGEEDKKINESCSAVFENFIQEKEELLKQHQSDTLQLEELRKTKEVMQEELHAQALILESLNTNLYYTQLELQKEKAIVGNLEKMLQTKFAETEEKYKHTIQILTEENIHLKQKIISKNEEICEGCSGRLASITVSKDDSDTVQDGSKKGQES

SEQ ID NO: 11284 - protein, 535 aa, Homo sapiens
MEAPTVETPPDPSPPSAPAPALVPLRAPDVARLREEQEKVVTNCQERIQHWKKVDNDYNALRERLSTLPDKLSYNIMVPFGPFAFMPGKLVHTNEVTVLLGDNWFAKCSAKQAVGLVEHRKEHVRKTIDDLKKVMKNFESRVEFTEDLQKMSDAAGDIVDIREEIKCDFEFKAKHRIAHKPHSKPKTSDIFEADIANDVKSKDLLADKELWARLEELERQEELLGELDSKPDTVIANGEDTTSSEEEKEDRNTNVNAMHQVTDSHTPCHKDVASSEPFSGQVNSQLNCSVNGSSSYHSDDDDDDDDDDDDDNIDDDDGDNDHEALGVGDNSIPTIYFSHTVEPKRVRINTGKNTTLKFSEKKEEAKRKRKNSTGSGHSAQELPTIRTPADIYRAFVDVVNGEYVPRKSILKSRSRENSVCSDTSESSAAEFDDRRGVLRSISCEEATCSDTSESILEEEPQENQKKLLPLSVTPEAFSGTVIEKEFVSPSLTPPPAIAHPALPTIPERKEVLLEASEETGKRVSKFKAARLQQKD

SEQ ID NO: 11285 - protein, 774 aa, Homo sapiens
MPGPPESLDMGPLTFRDVAIEFSLEEWQCLDTAQQDLYRKVMLENYRNLVFLGIAVSKPDLVTCLEQGKDPWNMKGHSTVVKPPVICSHFAEDFCPGPGIKDSFQKVILREYVKCGHKDLQLRKGCKSMNECNVHKEGYNELNQYLTTTQSKIFQCDKYVKVFHKLLNSNRHNTKHTGKKPFKCKKCGKSFCMLLHLCQHKRIHIRENSYRCEECGKAFIWFSTLTRHRRVHTGEKSYKYECGKSFNQDSNLTTHKRIHTGQKPYKCEECGTSFYQFSYLTRHKLIHTREKPYKCEQYGKTFNQSSTLTGHKIIHNGEKPYKCEECGKAFSIFSTPTKHKIIHTEEKSHRCEEYCKAYKESSHLTTHKRIHTGEKPYKCEECGKAFSIFSTLTKHKIIHTEEKSHRCEECGKAYKESSHLTTHKRIHTGEKPYKCEECGKTFSVFSILTKHKIIHTEEKPYKCEECGKAFKRSSTLTKHRIIHTEEKPYKCEECGKAFNQSSTLSIHKIIHTGEKPYKCEECGKAFKRSSTLTIHKMIHTGEKPYKCEECGKAFNRSSHLTTHKRIHTGHKPYKCKECGKSFSVFSTLTKHKIIHTDKKPYKCEECGKAFNRSSILSIHKKIHTGEKPYKCEECGKAFKRSSHLAGHKQIHSVQKPYKCEECGKAFSIFSTLTKHKIIHTEEKPYKCEKCGKTFYRFSNLNTHKIIHTGEKPCKCEECGKAFNHSSNLIKHKLIHTGDKPYKCEACGKAFRRSSHLSRHKIIHIGIHTEETVQK

SEQ ID NO: 11286 - protein, 760 aa, Homo sapiens
MKEAALICLAPSVPPILTVKSWDTMQLRAARSRCTNLLAASYIENQQHLQHLELRDLRGLGELRNLTIVKSGLRFVAPDAFHFTPRLSRLNLSFNALESLSWKTVQGLSLQELVLSGNPLHCSCALRWLQRWEEEGLGGVPEQKLQCHGQGPLAHMPNASCGVPTLKVQVPNASVDVGDDVLLRCQVEGRGLEQAGWILTELEQSATVMKSGGLPSLGLTLANVTSDLNRKNVTCWAENDVGRAEVSVQVNVSFPASVQLHTAVEMHHWCIPFSVDGQPAPSLRWLFNGSVLNETSFIFTEFLEPAANETVRHGCLRLNQPTHVNNGNYTLLAANPFGQASASIMAAFMDNPFEFNPEDPIPDTNSTSGDPVEKKDETPFGVSVAVGLAVFACLFLSTLLLVLNKCGRRNKFGINRPAVLAPEDGLAMSLHFMTLGGSSLSPTEGKGSGLQGHIIENPQYFSDACVHHIKRRDIVLKWELGEGAFGKVFLAECHNLLPEQDKMLVAVKALKEASESARQDFQREAELLTMLQHQHIVRFFGVCTEGRPLLMVFEYMRHGDLNRFLRSHGPDAKLLAGGEDVAPGPLGLGQLLAVASQVAAGMVYLAGLHFVHRDLATRNCLVGQGLVVKIGDFGMSRDIYSTDYYRVGGRTMLPIRWMPPESILYRKFTTESDVWSFGVVLWEIFTYGKQPWYQLSNTEAIDCITQGRELERPRACPPEVYAIMRGCWQREPQQRHSIKDVHARLQALAQAPPVYLDVLG

SEQ ID NO: 11287 - protein, 399 aa, Homo sapiens
MEFPLAQICPQGSHEAPIPTFSTFQITDMTRRSCQNLGYTAASPQAPEAASNTGNAERAEEVPGEGSLFLQAETRAWFQKTQAHWLLQHGAAPAWFHGFITRRVRPPLSVTHREAERLLEPKPQGCYLVRFSESAVTFVLTYRSRTCCRHFLLAQLRDGRHVVLGEDSAHARLQDLLLHYTAHPLSPYGETLTEPLARQTPEPAGLSLRTEESNFGSKSQDPNPQYSPIIKQGQAPVPMQKEGAGEKEPSQLLRPKPPIPAKPQLPPEVYTIPVPRHRPAPRPKPSNPIYNEPDEPIAFYAMGRGSPGEAPSNIYVEVEDEGLPATLGHPVLRKSWSRPVPGGQNTGGSQLHSENSVIGQGPPLPHQPPPAWRHTLPHNLSRQVLQDRGQAWLPLGPPQ

SEQ ID NO: 11288 - protein, 346 aa, Homo sapiens
MVLWESPRQCSSWTLCEGFCWLLLLPVMLLIVARPVKLAAFPTSLSDCQTPTGWNCSGYDDRENDLFLCDTNTCKFDGECLRIGDTVTCVCQFKCNNDYVPVCGSNGESYQNECYLRQAACKQQSEILVVSEGSCATDAGSGSGDGVHEGSGETSQKETSTCDICQFGAECDEDAEDVWCVCNIDCSQTNFNPLCASDGKSYDNACQIKEASCQKQEKIEVMSLGRCQDNTTTTTKSEDGHYARTDYAENANKLEESAREHHIPCPEHYNGFCMHGKCEHSINMQEPSCRCDAGYTGQHCEKKDYSVLYVVPGPVRFQYVLIAAVIGTIQIAVICVVVLCITRAKL

SEQ ID NO: 11289 - protein, 1107 aa, Homo sapiens
MAKMEVKTSLLDNMIGVGDMVLLEPLNEETFINNLKKRFDHSEIYTYIGSVVISVNPYRSLPIYSPEKVEEYRNRNFYELSPHIFALSDEAYRSLRDQDKDQCILITGESGAGKTEASKLVMSYVAAVCGKGAEVNQVKEQLLQSNPVLEAFGNAKTVRNDNSSRFGKYMDIEFDFKGDPLGGVISNYLLEKSRVVKQPRGERNFHVFYQLLSGASEELLNKLKLERDFSRYNYLSLDSAKVNGVDDAANFRTVRNAMQIVGFMDHEAESVLAVVAAVLKLGNIEFKPESRVNGLDESKIKDKNELKEICELTGIDQSVLERAFSFRTVEAKQEKVSTTLNVAQAYYARDALAKNLYSRLFSWLVNRINESIKAQTKVRKKVMGVLDIYGFEIFEDNSFEQFIINYCNEKLQQIFIELTLKEEQEEYIREDIEWTHIDYFNNAIICDLIENNTNGILAMLDEECLRPGTVTDETFLEKLNQVCATHQHFESRMSKCSRFLNDTSLPHSCFRIQHYAGKVLYQVEGFVDKNNDLLYRDLSQAMWKASHALIKSLFPEGNPAKINLKRPPTAGSQFKASVATLMKNLQTKNPNYIRCIKPNDKKAAHIFNEALVCHQIRYLGLLENVRVRRAGYAFRQAYEPCLERYKMLCKQTWPHWKGPARSGVEVLFNELEIPVEEYSFGRSKIFIRNPRTLFKLEDLRKQRLEDLATLIQKIYRGWKCRTHFLLMKKSQIVIAAWYRRYAQQKRYQQTKSSALVIQSYIRGWKARKILRELKHQKRCKEAVTTIAAYWHGTQARRELKRLKEEARRKHAVAVIWAYWLGLKVRREYRKFFRANAGKKIYEFTLQRIVQKYFLEMKNKMPSLSPIDKNWPSRPYLFLDSTHKELKRIFHLWRCKKYRDQFTDQQKLIYEEKLEASELFKDKKALYPSSVGQPFQGAYLEINKNPKYKKLKDAIEEKIIIAEVVNKINRANGKSTSRIFLLTNNNLLLADQKSGQIKSEVPLVDVTKVSMSSQNDGFFAVHLKEGSEAASKGDFLFSSDHLIEMATKLYRTTLSQTKQKLNIEISDEFLVQFRQDKVCVKFIQGNQKNGSVPTCKRKNNRLLEVAVP

SEQ ID NO: 11290 - protein, 712 aa, Homo sapiens
MSQWYELQQLDSKFLEQVHQLYDDSFPMEIRQYLAQWLEKQDWEHAANDVSFATIRFHDLLSQLDDQYSRFSLENNFLLQHNIRKSKRNLQDNFQEDPIQMSMIIYSCLKEERKILENAQRFNQAQSGNIQSTVMLDKQKELDSKVRNVKDKVMCIEHEIKSLEDLQDEYDFKCKTLQNREHETNGVAKSDQKQEQLLLKKMYLMLDNKRKEVVHKIIELLNVTELTQNALINDELVEWKRRQQSACIGGPPNACLDQLQNWFTIVAESLQQVRQQLKKLEELEQKYTYEHDPITKNKQVLWDRTFSLFQQLIQSSFVVERQPCMPTHPQRPLVLKTGVQFTVKLRLLVKLQELNYNLKVKVLFDKDVNERNTVKGFRKFNILGTHTKVMNMEESTNGSLAAEFRHLQLKEQKNAGTRTNEGPLIVTEELHSLSFETQLCQPGLVIDLETTSLPVVVISNVSQLPSGWASILWYNMLVAEPRNLSFFLTPPCARWAQLSEVLSWQFSSVTKRGLNVDQLNMLGEKLLGPNASPDGLIPWTRFCKENINDKNFPFWLWIESILELIKKHLLPLWNDGCIMGFISKERERALLKDQQPGTFLLRFSESSREGAITFTWVERSQNGGEPDFHAVEPYTKKELSAVTFPDIIRNYKVMAAENIPENPLKYLYPNIDKDHAFGKYYSRPKEAPEPMELDGPKGTGYIKTELISVSEV

SEQ ID NO: 11291 - protein, 714 aa, Homo sapiens
MWMSQWYELQQLDSKFLEQVHQLYDDSFPMEIRQYLAQWLEKQDWEHAANDVSFATIRFHDLLSQLDDQYSRFSLENNFLLQHNIRKSKRNLQDNFQEDPIQMSMIIYSCLKEERKILENAQRFNQAQSGNIQSTVMLDKQKELDSKVRNVKDKVMCIEHEIKSLEDLQDEYDFKCKTLQNREHETNGVAKSDQKQEQLLLKKMYLMLDNKRKEVVHKIIELLNVTELTQNALINDELVEWKRRQQSACIGGPPNACLDQLQNWFTIVAESLQQVRQQLKKLEELEQKYTYEHDPITKNKQVLWDRTFSLFQQLIQSSFVVERQPCMPTHPQRPLVLKTGVQFTVKLRLLVKLQELNYNLKVKVLFDKDVNERNTVKGFRKFNILGTHTKVMNMEESTNGSLAAEFRHLQLKEQKNAGTRTNEGPLIVTEELHSLSFETQLCQPGLVIDLETTSLPVVVISNVSQLPSGWASILWYNMLVAEPRNLSFFLTPPCARWAQLSEVLSWQFSSVTKRGLNVDQLNMLGEKLLGPNASPDGLIPWTRFCKENINDKNFPFWLWIESILELIKKHLLPLWNDGCIMGFISKERERALLKDQQPGTFLLRFSESSREGAITFTWVERSQNGGEPDFHAVEPYTKKELSAVTFPDIIRNYKVMAAENIPENPLKYLYPNIDKDHAFGKYYSRPKEAPEPMELDGPKGTGYIKTELISVSEV

SEQ ID NO: 11292 - protein, 751 aa, Homo sapiens
MLPLGSEPALNELLLRKEEEWRALQAHRTQLQEAALQDTRSQLEEAQGKLRCLQEDFVYNLQVLEERDLELERYDAAFAQAREWEEARRAEVSELKIEAAKLRQALAREARKVEELQQQQQLAFQEHRLELERVHSDKNGEIDHHREQYENLKWTLERKLEELDGELALQRQELLLEFESKMRKREHEFRLQADNMSNTALSRELKVKLLHKELEALKEAGAKAAESLQRAEATNAELERKLQSRAGELQDLEAMSRARVKDLEDKLHSVQLTRKKEEETFKRKHEELDRLAREKDAVLVAVKGAHVEQLQELQTRVLELQAHCETLEAQLRRAEWRQADTAKEKDAAIDQLREDASTVKSAWDAQIAQLSKEMVSRDLQIQTLQEEEVKLKAQVARSQQDIERYKQQLSLAVERERSLERDQVQLGLDWQRRCDDIERDQIQKSEALIQGLSMAKSQVAAKLQETEQALQEQEVVLKAVTLERDQAVQALRMHGLPRPGAQMLLRQHEEEISKDFPSSEIQRLREQNTSLRNAIAQMRKEMEALSHQIPPPIQTAAESTDANQPDPEAGGDAATPDYVLALEAEIRTLKHKFKTLEKHLEDVLDPLKMSSPHAESQPSVRTSTETTGGSAQAGQAGGSVQAGQAGGSVQAGPVSSGLALRKLGDRVQLLNLLVTRLRQKVLREPLEPAALQRELPREVDQVHLEVLELRKQVAELGKHLRIAQHGGAEPSGRKQPPASDAVALGREVGAR

SEQ ID NO: 11293 - protein, 352 aa, Homo sapiens
MEAEDQGELFLHLRSVARAPQTLSMHRLQRKLKEAARKIISLRLEKEQLIEMGNRLRAELGRPERWLLHHALPPAPEARKPGEEPRRPLDRSPPLGQVQPHFTSQDAKSAEDEAPSRHLGKHQPRSAQVGSRLDALQGPKTQHSIHTVTCKSPRQKEDRSPKPPQAPQHPEEHGRQSHSSSSFASGTLQDMWRLLDLGSSPSGVTSQGDSTPEMGSHYVTQAGLELLGSSSPAALASQSAEMTGVGPTPSLAWSGALHPNMNQEASLVRSTWAPGMRGGMNGGSSSVCKNMQRGPHWSPSQQPCSGIRTVLLSRKERTLLSCFSLPAPVVLVPLLLSGQAVTERAGHAGDIL

SEQ ID NO: 11294 - protein, 916 aa, Homo sapiens
MLPLGSEPALNELLLRKEEEWRALQAHRTQLQEAALQDTRSQLEEAQGKLRCLQEDFVYNLQVLEERDLELERYDAAFAQAREWEEARRAEVSELKIEAAKLRQALAREARKVEELQQQQQLAFQEHRLELERVHSDKNGEIDHHREQYENLKWTLERKLEELDGELALQRQELLLEFESKMRKREHEFRLQADNMSNTALSRELKVKLLHKELEALKEAGAKAAESLQRAEATNAELERKLQSRAGELQDLEAMSRARVKDLEDKLHSVQLTRKKEEETFKRKHEELDRLAREKDAVLVAVKGAHVEQLQELQTRVLELQAHCETLEAQLRRAEWRQADTAKEKDAAIDQLREDASTVKSAWDAQIAQLSKEMVSRDLQIQTLQEEEVKLKAQVARSQQDIERYKQQLSLAVERERSLERDQVQLGLDWQRRCDDIERDQIQKSEALIQGLSMAKSQVAAKLQETEQALQEQEVVLKAVTLERDQAVQALRMHGLPRPGAQMLLRQHEEEISKDFPSSEIQRLREQNTSLRNAIAQMRKEMEALSHQIPPPIQTAAESTDANQPDPEAGGDAATPDYVLALEAEIRTLKHKFKTLEKHLEDVLDPLKMSSPHAESQPSVRTSTETTGGSAQAGQAGGSVQAGQAGGSVQAGPVSSGLALRKLGDRVQLLNLLVTRLRQKVLREPLEPAALQRELPREVDQVHLEVLELRKQVAELGKHLRIAQHGGAEPSGRKQPPASDAVALGREQDAKSAEDEAPSRHLGKHQPRSAQVGSRLDALQGPKTQHSIHTVTCKSPRQKEDRSPKPPQAPQHPEEHGRQSHSSSSFASGTLQDMWRLLDLGSSPSGVTSQGDSTPELPAPPAADRRPVKMQAGIATPGMKTAAQAKAKTTGASRSHPAKAKGCQRPPKIRNYNIMD

SEQ ID NO: 11295 - protein, 361 aa, Homo sapiens
MSTAREQPIFSTRAHVFQIDPATKRNWIPAGKHALTVSYFYDATRNVYRIISIGGAKAIINSTVTPNMTFTKTSQKFGQWADSRANTVYGLGFASEQHLTQFAEKFQEVKEAARLAREKSQDGGELTSPALGLASHQVPPSPLVSANGPGEEKLFRSQSADAPGPTERERLKKMLSEGSVGEVQWEAEFFALQDSNNKLAGALREANAAAAQWRQQLEAQRAEAERLRQRVAELEAQAASEVTPTGEKEGLGQGQSLEQLEALVQTKDQEIQTLKSQTGGPREALEAAEREETQQKVQDLETRNAELEHQLRAMERSLEEARAERERARAEVGRAAQLLDVSLFELSELREGLARLAEAAP

SEQ ID NO: 11296 - protein, 527 aa, Homo sapiens
MRDSSAPSSASSSVTDLYCTPHSSRSDLVLPGTAGDFSLSASLSACTLLYEGAVEPMQIDVDPQEDPQNAPDVNYVVENPSLDLEQYAASYSGLMRIERLQFIADHCPTLRVEALKMALSFVQRTFNVDMYEEIHRKLSEATRELQNAPDAIPESGVEPPALDTAWVEATRKKALLKLEKLDTDLKNYKGNSIKESIRRGHDDLGDHYLDCGDLSNALKCYSRARDYCTSAKHVINMCLNVIKVSVYLQNWSHVLSYVSKAESTPEIAEQRGERDSQTQAILTKLKCAAGLAELAARKYKQAAKCLLLASFDHCDFPELLSPSNVAIYGGLCALATFDRQELQRNVISSSSFKLFLELEPQVRDIIFKFYESKYASCLKMLDEMKDNLLLDMYLAPHVRTLYTQIRNRALIQYFSPYVSADMHRMAAAFNTTVAALEDELTQLILEGLISARVDSHSKILYARDVDQRSTTFEKSLLMGKEFQRRAKAMMLRAAVLRNQIHVKSPPREGSQGELTPANSQSRMSTNM

SEQ ID NO: 11297 - protein, 658 aa, Homo sapiens
MPVRKQDTQRALHLLEEYRSKLSQTEDRQLRSSIERVINIFQSNLFQALIDIQEFYEVTLLDNPKCIDRSKPSEPIQPVNTWEISSLPSSTVTSETLPSSLSPSVEKYRYQDEDTPPQEHISPQITNEVIGPELVHVSEKNLSEIENVHGFVSHSHISPIKPTEAVLPSPPTVPVIPVLPVPAENTVILPTIPQANPPPVLVNTDSLETPTYVNGTDADYEYEEITLERGNSGLGFSIAGGTDNPHIGDDSSIFITKIITGGAAAQDGRLRVNDCILRVNEVDVRDVTHSKAVEALKEAGSIVRLYVKRRKPVSEKIMEIKLIKGPKGLGFSIAGGVGNQHIPGDNSIYVTKIIEGGAAHKDGKLQIGDKLLAVNNVCLEEVTHEEAVTALKNTSDFVYLKVAKPTSMYMNDGYAPPDITNSSSQPVDNHVSPSSFLGQTPASPARYSPVSKAVLGDDEITREPRKVVLHRGSTGLGFNIVGGEDGEGIFISFILAGGPADLSGELRKGDRIISVNSVDLRAASHEQAAAALKNAGQAVTIVAQYRPEEYSRFEAKIHDLREQMMNSSISSGSGSLRTSQKRSLYVRALFDYDKTKDSGLPSQGLNFKFGDILHVINASDDEWWQARQVTPDGESDEVGVIPSKRRYACFLPLECEAT

SEQ ID NO: 11298 - protein, 871 aa, Homo sapiens
MPVRKQDTQRALHLLEEYRSKLSQTEDRQLRSSIERVINIFQSNLFQALIDIQEFYEVTLLDNPKCIDRSKPSEPIQPVNTWEISSLPSSTVTSETLPSSLSPSVEKYRYQDEDTPPQEHISPQITNEVIGPELVHVSEKNLSEIENVHGFVSHSHISPIKANPPPVLVNTDSLETPTYVNGTDADYEYEEITLERGNSGLGFSIAGGTDNPHIGDDSSIFITKIITGGAAAQDGRLRVNDCILRVNEVDVRDVTHSKAVEALKEAGSIVRLYVKRRKPVSEKIMEIKLIKGPKGLGFSIAGGVGNQHIPGDNSIYVTKIIEGGAAHKDGKLQIGDKLLAVNNVCLEEVTHEEAVTALKNTSDFVYLKVAKPTSMYMNDGYAPPDITNSSSQPVDNHVSPSSFLGQTPASPARYSPVSKAVLGDDEITREPRKVVLHRGSTGLGFNIVGGEDGEGIFISFILAGGPADLSGELRKGDRIISVNSVDLRAASHEQAAAALKNAGQAVTIVAQYRPEEYSRFEAKIHDLREQMMNSSISSGSGSLRTSQKRSLYVRALFDYDKTKDSGLPSQGLNFKFGDILHVINASDDEWWQARQVTPDGESDEVGVIPSKRRVEKKERARLKTVKFNSKTRDKGEIPDDMGSKGLKHVTSNASDSESSYRGQEEYVLSYEPVNQQEVNYTRPVIILGPMKDRINDDLISEFPDKFGSCVPHTTRPKRDYEVDGRDYHFVTSREQMEKDIQEHKFIEAGQYNNHLYGTSVQSVREVAEKGKHCILDVSGNAIKRLQIAQLYPISIFIKPKSMENIMEMNKRLTEEQARKTFERAMKLEQEFTEHFTAIVQGDTLEDIYNQVKQIIEEQSGSYIWVPAKEKL

SEQ ID NO: 11299 - protein, 2964 aa, Homo sapiens
MDPRNTAMLGLGSDSEGFSRKSPSAISTGTLVSKREVELEKNTKEEEDLRKRNRERNIEAGKDDGLTDAQQQFSVKETNFSEGNLKLKIGLQAKRTKKPPKNLENYVCRPAIKTTIKHPRKALKSGKMTDEKNEHCPSKRDPSKLYKKADDVAAIECQSEEVIRLHSQGENNPLSKKLSPVHSEMADYINATPSTLLGSRDPDLKDRALLNGGTSVTEKLAQLIATCPPSKSSKTKPKKLGTGTTAGLVSKDLIRKAGVGSVAGIIHKDLIKKPTISTAVGLVTKDPGKKPVFNAAVGLVNKDSVKKLGTGTTAVFINKNLGKKPGTITTVGLLSKDSGKKLGIGIVPGLVHKESGKKLGLGTVVGLVNKDLGKKLGSTVGLVAKDCAKKIVASSAMGLVNKDIGKKLMSCPLAGLISKDAINLKAEALLPTQEPLKASCSTNINNQESQELSESLKDSATSKTFEKNVVRQNKESILEKFSVRKEIINLEKEMFNEGTCIQQDSFSSSEKGSYETSKHEKQPPVYCTSPDFKMGGASDVSTAKSPFSAVGESNLPSPSPTVSVNPLTRSPPETSSQLAPNPLLLSSTTELIEEISESVGKNQFTSESTHLNVGHRSVGHSISIECKGIDKEVNDSKTTHIDIPRISSSLGKKPSLTSESSIHTITPSVVNFTSLFSNKPFLKLGAVSASDKHCQVAESLSTSLQSKPLKKRKGRKPRWTKVVARSTCRSPKGLELERSELFKNVSCSSLSNSNSEPAKFMKNIGPPSFVDHDFLKRRLPKLSKSTAPSLALLADSEKPSHKSFATHKLSSSMCVSSDLLSDIYKPKRGRPKSKEMPQLEGPPKRTLKIPASKVFSLQSKEEQEPPILQPEIEIPSFKQGLSVSPFPKKRGRPKRQMRSPVKMKPPVLSVAPFVATESPSKLESESDNHRSSSDFFESEDQLQDPDDLDDSHRPSVCSMSDLEMEPDKKITKRNNGQLMKTIIRKINKMKTLKRKKLLNQILSSSVESSNKGKVQSKLHNTVSSLAATFGSKLGQQINVSKKGTIYIGKRRGRKPKTVLNGILSGSPTSLAVLEQTAQQAAGSALGQILPPLLPSSASSSEILPSPICSQSSGTSGGQSPVSSDAGFVEPSSVPYLHLHSRQGSMIQTLAMKKASKGRRRLSPPTLLPNSPSHLSELTSLKEATPSPISESHSDETIPSDSGIGTDNNSTSDRAEKFCGQKKRRHSFEHVSLIPPETSTVLSSLKEKHKHKCKRRNHDYLSYDKMKRQKRKRKKKYPQLRNRQDPDFIAELEELISRLSEIRITHRSHHFIPRDLLPTIFRINFNSFYTHPSFPLDPLHYIRKPDLKKKRGRPPKMREAMAEMPFMHSLSFPLSSTGFYPSYGMPYSPSPLTAAPIGLGYYGRYPPTLYPPPPSPSFTTPLPPPSYMHAGHLLLNPAKYHKKKHKLLRQEAFLTTSRTPLLSMSTYPSVPPEMAYGWMVEHKHRHRHKHREHRSSEQPQVSMDTGSSRSVLESLKRYRFGKDAVGERYKHKEKHRCHMSCPHLSPSKSLINREEQWVHREPSESSPLALGLQTPLQIDCSESSPSLSLGGFTPNSEPASSDEHTNLFTSAIGSCRVSNPNSSGRKKLTDSPGLFSAQDTSLNRLHRKESLPSNERAVQTLAGSQPTSDKPSQRPSESTNCSPTRKRSSSESTSSTVNGVPSRSPRLVASGDDSVDSLLQRMVQNEDQEPMEKSIDAVIATASAPPSSSPGRSHSKDRTLGKPDSLLVPAVTSDSCNNSISLLSEKLTSSCSPHHIKRSVVEAMQRQARKMCNYDKILATKKNLDHVNKILKAKKLQRQARTGNNFVKRRPGRPRKCPLQAVVSMQAFQAAQFVNPELNRDEEGAALHLSPDTVTDVIEAVVQSVNLNPEHKKGLKRKGWLLEEQTRKKQKPLPEEEEQENNKSFNEAPVEIPSPSETPAKPSEPESTLQPVLSLIPREKKPPRPPKKKYQKAGLYSDVYKTTDPKSRLIQLKKEKLEYTPGEHEYGLFPAPIHVGKYLRQKRIDFQLPYDILWQWKHNQLYKKPDVPLYKKIRSNVYVDVKPLSGYEATTCNCKKPDDDTRKGCVDDCLNRMIFAECSPNTCPCGEQCCNQRIQRHEWVQCLERFRAEEKGWGIRTKEPLKAGQFIIEYLGEVVSEQEFRNRMIEQYHNHSDHYCLNLDSGMVIDSYRMGNEARFINHSCDPNCEMQKWSVNGVYRIGLYALKDMPAGTELTYDYNFHSFNVEKQQLCKCGFEKCRGIIGGKSQRVNGLTSSKNSQPMATHKKSGRSKEKRKSKHKLKKRRGHLSEEPSENINTPTRLTPQLQMKPMSNRERNFVLKHHVFLVRNWEKIRQKQEEVKHTSDNIHSASLYTRWNGICRDDGNIKSDVFMTQFSALQTARSVRTRRLAAAEENIEVARAARLAQIFKEICDGIISYKDSSRQALAAPLLNLPPKKKNADYYEKISDPLDLITIEKQILTGYYKTVEAFDADMLKVFRNAEKYYGRKSPVGRDVCRLRKAYYNARHEASAQIDEIVGETASEADSSETSVSEKENGHEKDDDVIRCICGLYKDEGLMIQCDKCMVWQHCDCMGVNSDVEHYLCEQCDPRPVDREVPMIPRPHYAQPGCVYFICLLRDDLLLRQGDCVYLMRDSRRTPDGHPVRQSYRLLSHINRDKLDIFRIEKLWKNEKEERFAFGHHYFRPHETHHSPSRRFYHNELFRVPLYEIIPLEAVVGTCCVLDLYTYCKGRPKGVKEQDVYICDYRLDKSAHLFYKIHRNRYPVCTKPYAFDHFPKKLTPKKDFSPHYVPDNYKRNGGRSSWKSERSKPPLKDLGQEDDALPLIEEVLASQEQAANEIPSLEEPEREGATANVSEGEKKTEESSQEPQSTCTPEERRHNQRERLNQILLNLLEKIPGKNAIDVTYLLEEGSGRKLRRRTLFIPENSFRK

SEQ ID NO: 11300 - protein, 1367 aa, Homo sapiens
MTLQGRADLSGNQGNAAGRLATVHEPVVTQWAVHPPAPAHPSLLDKMEKAPPQPQHEGLKSKEHLPQQPAEGKTASRRVPRLRAVVESQAFKNILVDEMDMMHARAATLIQANWRGYWLRQKLISQMMAAKAIQEAWRRFNKRHILHSSKSLVKKTRAEEGDIPYHAPQQVRFQHPEENRLLSPPIMVNKETQFPSCDNLVLCRPQSSPLLQPPAAQGTPEPCVQGPHAARVRGLAFLPHQTVTIRFPCPVSLDAKCQPCLLTRTIRSTCLVHIEGDSVKTKRVSARTNKARAPETPLSRRYDQAVTRPSRAQTQGPVKAETPKAPFQICPGPMITKTLLQTYPVVSVTLPQTYPASTMTTTPPKTSPVPKVTIIKTPAQMYPGPTVTKTAPHTCPMPTMTKIQVHPTASRTGTPRQTCPATITAKNRPQVSLLASIMKSLPQVCPGPAMAKTPPQMHPVTTPAKNPLQTCLSATMSKTSSQRSPVGVTKPSPQTRLPAMITKTPAQLRSVATILKTLCLASPTVANVKAPPQVAVAAGTPNTSGSIHENPPKAKATVNVKQAAKVVKASSPSYLAEGKIRCLAQPHPGTGVPRAAAELPLEAEKIKTGTQKQAKTDMAFKTSVAVEMAGAPSWTKVAEEGDKPPHVYVPVDMAVTLPRGQLAAPLTNASSQRHPPCLSQRPLAAPLTKASSQGHLPTELTKTPSLAHLDTCLSKMHSQTHLATGAVKVQSQAPLATCLTKTQSRGQPITDITTCLIPAHQAADLSSNTHSQVLLTGSKVSNHACQRLGGLSAPPWAKPEDRQTQPQPHGHVPGKTTQGGPCPAACEVQGMLVPPMAPTGHSTCNVESWGDNGATRAQPSMPGQAVPCQEDTVGSLLASLCAEVAGVLASQEDLRTLLAKALSQGEVWAALNQALSKEVLGATVTKALPQSMLSMALVKALSWSELRLTLSRALSRGELRAELTKVMQGKLAEVLSKALTEEEWVALSQALCQGELGALLSQSWCRVALRTGTILPKAASKSTGSGVTKTPALVKVACRRSPSAAWGPSLGPVRPQTSKGPADAGVVGGQSWNRAWEPARGAASWDTWRNKAVVPPRRSGEPMVSMQAAEEIRILAVITIQAGVRGYLARRRIRLWHRGAMVIQATWRGYRVRRNLAHLCRATTTIQSAWRGYSTRRDQARHWQMLHPVTWVELGSRAGVMSDRSWFQDGRARTVSDHRCFQSCQAHACSVCHSLSSRIGSPPSVVMLVGSSPRTCHTCGRTQPTRVVQGMGQGTEGPGAVSWASAYQLAALSPRQPHRQDKAATAIQSAWRGFKIRQQMRQQQMAAKIVQATWRGHHTRSCLKNTEALLGPADPSASSRHMHWPGI

SEQ ID NO: 11301 - protein, 543 aa, Homo sapiens
MEGPAGYLRRASVAQLTQELGTAFFQQQQLPAAMADTFLEHLCLLDIDSEPVAARSTSIIATIGPASRSVERLKEMIKAGMNIARLNFSHGSHEYHAESIANVREAVESFAGSPLSYRPVAIALDTKGPEIRTGILQGGPESEVELVKGSQVLVTVDPAFRTRGNANTVWVDYPNIVRVVPVGGRIYIDDGLISLVVQKIGPEGLVTQVENGGVLGSRKGVNLPGAQVDLPGLSEQDVRDLRFGVEHGVDIVFASFVRKASDVAAVRAALGPEGHGIKIISKIENHEGVKRFDEILEVSDGIMVARGDLGIEIPAEKVFLAQKMMIGRCNLAGKPVVCATQMLESMITKPRPTRAETSDVANAVLDGADCIMLSGETAKGNFPVEAVKMQHAIAREAEAAVYHRQLFEELRRAAPLSRDPTEVTAIGAVEAAFKCCAAAIIVLTTTGRSAQLLSRYRPRAAVIAVTRSAQAARQVHLCRGVFPLLYREPPEAIWADDVDRRVQFGIESGKLRGFLRVGDLVIVVTGWRPGSGYTNIMRVLSIS

SEQ ID NO: 11302 - protein, 207 aa, Homo sapiens
MSSDRQRSDDESPSTSSGSSDADQRDPAAPEPEEQEERKPSATQQKKNTKLSSKTTAKLSTSAKRIQKELAEITLDPPPNCSAGPKGDNIYEWRSTILGPPGSVYEGGVFFLDITFSSDYPFKPPKVTFRTRIYHCNINSQGVICLDILKDNWSPALTISKVLLSICSLLTDCNPADPLVGSIATQYLTNRAEHDRIARQWTKRYAT

SEQ ID NO: 11303 - protein, 673 aa, Homo sapiens
MTTEVGSVSEVKKDSSQLGTDATKEKPKEVAENQQNQSSDPEEEKGSQPPPAAESQSSLRRQKREKETSESRGISRFIPPWLKKQKSYTLVVAKDGGDKKEPTQAVVEEQVLDKEEPLPEEQRQAKGDAEEMAQKKQEIKVEVKEEKPSVSKEEKPSVSKVEMQPTELVSKEREEKVKETQEDKLEGGAAKRETKEVQTNELKAEKASQKVTKKTKTVQCKVTLLDGTEYSCDLEKHAKGQVLFDKVCEHLNLLEKDYFGLLFQESPEQKNWLDPAKEIKRQLRNLPWLFTFNVKFYPPDPSQLTEDITRYFLCLQLRQDIASGRLPCSFVTHALLGSYTLQAELGDYDPEEHGSIDLSEFQFAPTQTKELEEKVAELHKTHRGLSPAQADSQFLENAKRLSMYGVDLHHAKDSEGVDIKLGVCANGLLIYKDRLRINRFAWPKILKISYKRSNFYIKVRPAELEQFESTIGFKLPNHRAAKRLWKVCVEHHTFYRLVSPEQPPKAKFLTLGSKFRYSGRTQAQTRQASTLIDRPAPHFERTSSKRVSRSLDGAPIGVMDQSLMKDFPGAAGEISAYGPGLVSIAVVQDGDGRREVRSPTKAPHLQLIEGKTVKGGISETRIEKRIVITGDGDIDHDQALAQAIREAREQHPDMSVTRVVVHKETELAEEGED

SEQ ID NO: 11304 - protein, 475 aa, Homo sapiens
MGEAPSPAPALWDWDYLDRCFARHRVCISFGLWICASSCWIAAHALLLYLRCAQKPRQDQSALCAACCLLTSLCDTVGALLARQLTIQVFTGAYLAAIDLVNFMFILFPVCGSKFKSNSDREARERKRRRQLRASVFALALPLSLGPCWALWVAVPKASATIRGPQRRLLASLLQENTEILGYLLGSVAAFGSWASRIPPLSRIAPPPTLGITTQHEIWRGQMSKPSQSPSRSPSGHWRAAAQRQVLGTEMCRGKTFPSIHLWTRLLSALAGLLYASAIVAHDQHPEYLLRATPWFLTSLGRAALDLAIIFLSCVMKSKMRQALGFAKEARESPDTQALLTCAEKEEENQENLDWVPLTTLSHCKSLRTMTAISRYMELTIEPVQQAGCSATRLPGDGQTSAGDASLQDPPSYPPVQVIRARVSSGSSSEVSSINSDLEWDPEDVNLEGSKENVELLGSQVHQDSVRTAHLSDDD

SEQ ID NO: 11305 - protein, 972 aa, Homo sapiens
MWRLRRAAVACEVCQSLVKHSSGIKGSLPLQKLHLVSRSIYHSHHPTLKLQRPQLRTSFQQFSSLTNLPLRKLKFSPIKYGYQPRRNFWPARLATRLLKLRYLILGSAVGGGYTAKKTFDQWKDMIPDLSEYKWIVPDIVWEIDEYIDFEKIRKALPSSEDLVKLAPDFDKIVESLSLLKDFFTSGSPEETAFRATDRGSESDKHFRKVSDKEKIDQLQEELLHTQLKYQRILERLEKENKELRKLVLQKDDKGIHHRKLKKSLIDMYSEVLDVLSDYDASYNTQDHLPRVVVVGDQSAGKTSVLEMIAQARIFPRGSGEMMTRSPVKVTLSEGPHHVALFKDSSREFDLTKEEDLAALRHEIELRMRKNVKEGCTVSPETISLNVKGPGLQRMVLVDLPGVINTVTSGMAPDTKETIFSISKAYMQNPNAIILCIQDGSVDAERSIVTDLVSQMDPHGRRTIFVLTKVDLAEKNVASPSRIQQIIEGKLFPMKALGYFAVVTGKGNSSESIEAIREYEEEFFQNSKLLKTSMLKAHQVTTRNLSLAVSDCFWKMVRESVEQQADSFKATRFNLETEWKNNYPRLRELDRNELFEKAKNEILDEVISLSQVTPKHWEEILQQSLWERVSTHVIENIYLPAAQTMNSGTFNTTVDIKLKQWTDKQLPNKAVEVAWETLQEEFSRFMTEPKGKEHDDIFDKLKEAVKEESIKRHKWNDFAEDSLRVIQHNALEDRSISDKQQWDAAIYFMEEALQARLKDTENAIENMVGPDWKKRWLYWKNRTQEQCVHNETKNELEKMLKCNEEHPAYLASDEITTVRKNLESRGVEVDPSLIKDTWHQVYRRHFLKTALNHCNLCRRGFYYYQRHFVDSELECNDVVLFWRIQRMLAITANTLRQQLTNTEVRRLEKNVKEVLEDFAEDGEKKIKLLTGKRVQLAEDLKMFFFPSSDSTLHTRPPHGAAPSIDTSFTLSGL

SEQ ID NO: 11306 - protein, 978 aa, Homo sapiens
MWRLRRAAVACEVCQSLVKHSSGIKGSLPLQKLHLVSRSIYHSHHPTLKLQRPQLRTSFQQFSSLTNLPLRKLKFSPIKYGYQPRRNFWPARLATRLLKLRYLILGSAVGGGYTAKKTFDQWKDMIPDLSEYKWIVPDIVWEIDEYIDFEKIRKALPSSEDLVKLAPDFDKIVESLSLLKDFFTSGHKLVSEVIGASDLLLLLGSPEETAFRATDRGSESDKHFRKVSDKEKIDQLQEELLHTQLKYQRILERLEKENKELRKLVLQKDDKGIHHRKLKKSLIDMYSEVLDVLSDYDASYNTQDHLPRVVVVGDQSAGKTSVLEMIAQARIFPRGSGEMMTRSPVKVTLSEGPHHVALFKDSSREFDLTKEEDLAALRHEIELRMRKNVKEGCTVSPETISLNVKGPGLQRMVLVDLPGVINTVTSGMAPDTKETIFSISKAYMQNPNAIILCIQDGSVDAERSIVTDLVSQMDPHGRRTIFVLTKVDLAEKNVASPSRIQQIIEGKLFPMKALGYFAVVTGKGNSSESIEAIREYEEEFFQNSKLLKTSMLKAHQVTTRNLSLAVSDCFWKMVRESVEQQADSFKATRFNLETEWKNNYPRLRELDRNELFEKAKNEILDEVISLSQVTPKHWEEILQQSLWERVSTHVIENIYLPAAQTMNSGTFNTTVDIKLKQWTDKQLPNKAVEVAWETLQEEFSRFMTEPKGKEHDDIFDKLKEAVKEESIKRHKWNDFAEDSLRVIQHNALEDRSISDKQQWDAAIYFMEEALQARLKDTENAIENMVGPDWKKRWLYWKNRTQEQCVHNETKNELEKMLKCNEEHPAYLASDEITTVRKNLESRGVEVDPSLIKDTWHQVYRRHFLKTALNHCNLCRRGFYYYQRHFVDSELECNDVVLFWRIQRMLAITANTLRQQLTNTEVRRLEKNVKEVLEDFAEDGEKKIKLLTGKRVQLAEDLKKVREIQEKLDAFIEALHQEK

SEQ ID NO: 11307 - protein, 1177 aa, Homo sapiens
MGHFEKGQHALLNEGEENEMEIFGYRTQGCRKSLCLAGSIFSFGILPLVFYWRPAWHVWAHCVPCSLQEADTVLLRTTDEFQIYSWKKVIWIYLSALNSAFGLTPDHPLMTDEEYIINRAIRKPDLKVRCIKVQKIRYVWNYLEGQFQKIGSLEDWLSSAKIHQKFGSGLTREEQEIRRLICGPNTIDVEVTPIWKLLIKEVLNPFYIFQLFSVCLWFSEDYKEYAFAIIIMSIISISLTVYDLREQSVKLHHLVESHNSITVSVCGRKAGVQELESRVLVPGDLLILTGNKVLMPCDAVLIEGSCVVDEGMLTGESIPVTKTPLPKMDSSVPWKTQSEADYKRHVLFCGTEVIQAKAACSGTVRAVVLQTGFNTAKGDLVRSILYPKPVNFQLYRDAIRFLLCLEPPEEVVRKALDVITIAVPPALPAALTTGIIYAQRRLKKRGIFCISPQRINVCGQLNLVCFDKTGTLTRDGLDLWGVVSCDRNGFQEVHSFASGQALPWGPLCAAMASCHSLILLDGTIQGDPLDLKMFEATTWEMAFSGDDFHIKGVPAHAMVVKPCRTASQVPVEGIAILHQFPFSSALQRMTVIVQEMGGDRLAFMKGAPERVASFCQPETVPTSFVSELQIYTTQGFRVIALAYKKLENDHHATTLTRETVESDLIFLGLLILENRLKEETKPVLEELISARIRTVMITGDNLQTAITVARKSGMVSESQKVILIEANETTGSSSASISWTLVEEKKHIMYGNQDNYINIRDEVSDKGREGSYHFALTGKSFHVISQHFSSLLPKILINGTIFARMSPGQKSSLVEEFQKLDYFVGMCGDGANDCGALKMAHVGISLSEQEASVASPFTSKTPNIECVPHLIKEGRAALVTSFCMFKYMALYSMIQYVGVLLLYWETNSLSNYQFLFQDLAITTLIGVTMNLNGAYPKLVPFRPAGRLISPPLLLSVIFNILLSLAMHIAGFILVQRQPWYSVEIHSACTVQNESISELTMSPTAPEKMESNSTFTSFENTTVWFLGTINCITVALVFSKGKPFRQPTYTNYIFVLVLIIQLGVCLFILFADIPELYRRLDLLCTPVLWRASIVIMLSLNFIVSLVAEEAVIENRALWMMIKRCFGYQSKSQYRIWQRDLANDPSWPPLNQTSHSDMPECGRGVSYSNPVFESNEEQL

SEQ ID NO: 11308 - protein, 717 aa, Homo sapiens
MAAKRGTKTSMKNMEKELLCPVCQEMYKQPLVLPCTHNVCQACAREVLGQQGYIGHGGDPSSEPTSPASTPSTRSPRLSRRTLPKPDRLDRLLKSGFGTYPGRKRGALHPQVIMFPCPACQGDVELGERGLAGLFRNLTLERVVERYRQSVSVGGAILCQLCKPPPLEATKGCTECRATFCNECFKLFHPWGTQKAQHEPTLPTLSFRPKGLMCPDHKEEVTHYCKTCQRLVCQLCRVRRTHSGHKITPVLSAYQALKDKLTKSLTYILGNQDTVQTQICELEEKRASLLQAIEECQQERLARLSAQIQEHRSLLDGSGLVGYAQEVLKETDQPCFVQAAKQLHNRIARATEALQTFRPAASSSFRHCQLDVGREMKLLTELNFLRVPEAPVIDTQRTFAYDQIFLCWRLPPHSPPAWHYTVEFRRTDVPAQPGPTRWQRREEVRGTSALLENPDTGSVYVLRVRGCNKAGYGEYSEDVHLHTPPAPVLHFFLDSRWGASRERLAISKDQRAVRSVPGLPLLLAADRLLTGCHLSVDVVLGDVAVTQGRSYWACAVDPASYLVKVGVGLESKLQESFQGAPDVISPRYDPDSGHDSGAEDATVEASPPFAFLTIGMGKILLGSGASSNAGLTGRDGPTAGCTVPLPPRLGICLDYERGRVSFLDAVSFRGLLECPLDCSGPVCPAFCFIGGGAVQLQEPVGTKPERKVTIGGFAKLD

SEQ ID NO: 11309 - protein, 491 aa, Homo sapiens
MKMAAPTANKAASLGCNNKPAFPELDFRSGARVEELNKLIQEFTKHDQREYDDQRALEIHTAKDFIFSMLGMVQKLDQKLPVANEYLLLSGGVREGVVDLDLDELNVYARGTDYDMDFTLLVPALKLHDRNQPVTLDMRHSALCHSWLSLRLFDEGTISKWKDCCTIVDHINGATNYFFSPTKVADWFYDSISIVLSEIQKKPQRGMPKVEKVEKNGTIISIILGVGSSRMLYDIVPVVSFKGWPAVAQSWLMENHFWDGKITEEEVISGFYLVPACSYKGKKDNEWRLSFARSEVQLKKCISSSLMQAYQACKAIIIKLLSRPKAISPYHLRSMMLWACDRLPANYLAQEDYAAHFLLGLIDDLQHCLVNKMCPNYFIPQCNMLEHLSEETVMLHARKLSSVRSDPAEHLRTAIEHVKAANRLTLELQRRGSTTSIPSPQSDGGDPNQPDDRLAKKLQQLVTENPGKSISVFINPDDVTRPHFRIDDKFF

SEQ ID NO: 11310 - protein, 482 aa, Homo sapiens
MAEVSIDQSKLPGVKEVCRDFAVLEDHTLAHSLQEQEIEHHLASNVQRNRLVQHDLQVAKQLQEEDLKAQAQLQKRYKDLEQQDCEIAQEIQEKLAIEAERRRIQEKKDEDIARLLQEKELQEEKKRKKHFPEFPATRAYADSYYYEDGDQPGSRRARELGSGFSRPCRLQRDGKTVKHKKEKPEHPLENLEEPEQHCSSKRSLSSSSSGKGRDNPHINNEQHERKRSTQERPRRPLLPTISGEVFLSTECDDWETKINHQTRNWEKQSRHQDRLSPKSSQKAGLHCKEVVYGRDHGQGEHRKRRHRPRTPPFSESEEQLHLHDAGMKPRVMKEAVSTPSRMAHRDQEWYDAEIARKLQEEELLATQVDMRAAQVAQDEEIARLLMAEEKKAYKKAKEREKSSLDKRKQDPEWKPKTAKAANSKSKESDEPHHSKNERPARPPPPIMTDGEDADYTHFTNQQSSTRHFSKSESSHKGFHYKH

SEQ ID NO: 11311 - protein, 306 aa, Homo sapiens
MAEVSIDQSKLPGVKEVCRDFAVLEDHTLAHSLQEQEIEHHLASNVQRNRLVQHDLQVAKQLQEEDLKAQAQLQKRYKDLEQQDCEIAQEIQEKLAIEAERRRIQEKKDEDIARLLQEKELQEEKKRKKHFPEFPATRAYADSYYYEDGGMKPRVMKEAVSTPSRMAHRDQEWYDAEIARKLQEEELLATQVDMRAAQVAQDEEIARLLMAEEKKAYKKAKEREKSSLDKRKQDPEWKPKTAKAANSKSKESDEPHHSKNERPARPPPPIMTDGEDADYTHFTNQQSSTRHFSKSESSHKGFHYKH

SEQ ID NO: 11312 - protein, 555 aa, Homo sapiens
MNFETSRCATLQYCPDPYIQRFVETPAHFSWKESYYRSTMSQSTQTNEFLSPEVFQHIWDFLEQPICSVQPIDLNFVDEPSEDGATNKIEISMDCIRMQDSDLSDPMWPQYTNLGLLNSMDQQIQNGSSSTSPYNTDHAQNSVTAPSPYAQPSSTFDALSPSPAIPSNTDYPGPHSFDVSFQQSSTAKSATWTYSTELKKLYCQIAKTCPIQIKVMTPPPQGAVIRAMPVYKKAEHVTEVVKRCPNHELSREFNEGQIAPPSHLIRVEGNSHAQYVEDPITGRQSVLVPYEPPQVGTEFTTVLYNFMCNSSCVGGMNRRPILIIVTLETRDGQVLGRRCFEARICACPGRDRKADEDSIRKQQVSDSTKNGDGTKRPFRQNTHGIQMTSIKKRRSPDDELLYLPVRGRETYEMLLKIKESLELMQYLPQHTIETYRQQQQQQHQHLLQKQTSIQSPSSYGNSSPPLNKMNSMNKLPSVSQLINPQQRNALTPTTIPDGMGANIPMMGTHMPMAGDMNGLSPTQALPPPLSMPSTSHCTPPPPYPTDCSIVRIWQV

SEQ ID NO: 11313 - protein, 416 aa, Homo sapiens
MLYLENNAQTQFSEPQYTNLGLLNSMDQQIQNGSSSTSPYNTDHAQNSVTAPSPYAQPSSTFDALSPSPAIPSNTDYPGPHSFDVSFQQSSTAKSATWTYSTELKKLYCQIAKTCPIQIKVMTPPPQGAVIRAMPVYKKAEHVTEVVKRCPNHELSREFNEGQIAPPSHLIRVEGNSHAQYVEDPITGRQSVLVPYEPPQVGTEFTTVLYNFMCNSSCVGGMNRRPILIIVTLETRDGQVLGRRCFEARICACPGRDRKADEDSIRKQQVSDSTKNGDGTKRPFRQNTHGIQMTSIKKRRSPDDELLYLPVRGRETYEMLLKIKESLELMQYLPQHTIETYRQQQQQQHQHLLQKQTSIQSPSSYGNSSPPLNKMNSMNKLPSVSQLINPQQRNALTPTTIPDGMGANRSGKSENP

SEQ ID NO: 11314 - protein, 461 aa, Homo sapiens
MLYLENNAQTQFSEPQYTNLGLLNSMDQQIQNGSSSTSPYNTDHAQNSVTAPSPYAQPSSTFDALSPSPAIPSNTDYPGPHSFDVSFQQSSTAKSATWTYSTELKKLYCQIAKTCPIQIKVMTPPPQGAVIRAMPVYKKAEHVTEVVKRCPNHELSREFNEGQIAPPSHLIRVEGNSHAQYVEDPITGRQSVLVPYEPPQVGTEFTTVLYNFMCNSSCVGGMNRRPILIIVTLETRDGQVLGRRCFEARICACPGRDRKADEDSIRKQQVSDSTKNGDGTKRPFRQNTHGIQMTSIKKRRSPDDELLYLPVRGRETYEMLLKIKESLELMQYLPQHTIETYRQQQQQQHQHLLQKQTSIQSPSSYGNSSPPLNKMNSMNKLPSVSQLINPQQRNALTPTTIPDGMGANIPMMGTHMPMAGDMNGLSPTQALPPPLSMPSTSHCTPPPPYPTDCSIVRIWQV

SEQ ID NO: 11315 - protein, 507 aa, Homo sapiens
MKAGATSMWASCCGLLNEVMGTGAVRGQQSAFAGATGPFRFTPNPEFSTYPPAATEGPNIVCKACGLSFSVFRKKHVCCDCKKDFCSVCSVLQENLRRCSTCHLLQETAFQRPQLMRLKVKDLRQYLILRNIPIDTCREKEDLVDLVLCHHGLGSEDDMDTSSLNSSRSQTSSFFTRSFFSNYTAPSATMSSFQGELMDGDQTSRSGVPAQVQSEITSANTEDDDDDDDEDDDDEEENAEDRNPGLSKERVRASLSDLSSLDDVEGMSVRQLKEILARNFVNYSGCCEKWELVEKVNRLYKENEENQKSYGERLQLQDEEDDSLCRICMDAVIDCVLLECGHMVTCTKCGKRMRMSSCKGRLRNGPESSAVTIQKDQRKVSAHSSPKRVVEQLLPWKDLQNGIALWSVVPRSKWKIKALIFVKSLPSQSPPRIYILILGLTQFLQEFFFYLPKLDTHRHLGYELLTAFLGDLLAVPQVNMTDVSTAFEEGQALISDLIAVCREEIVM

SEQ ID NO: 11316 - protein, 615 aa, Homo sapiens
MSITFRSDFSNEERFTGFDAHYMAVDVDECKEREDEELSCDHYCHNYIGGYYCSCRFGYILHTDNRTCRVECSDNLFTQRTGVITSPDFPNPYPKSSECLYTIELEEGFMVNLQFEDIFDIEDHPEVPCPYDYIKIKVGPKVLGPFCGEKAPEPISTQSHSVLILFHSDNSGENRGWRLSYRAAGNECPELQPPVHGKIEPSQAKYFFKDQVLVSCDTGYKVLKDNVEMDTFQIECLKDGTWSNKIPTCKIVDCRAPGELEHGLITFSTRNNLTTYKSEIKYSCQEPYYKMLNNNTGIYTCSAQGVWMNKVLGRSLPTCLPECGQPSRSLPSLVKRIIGGRNAEPGLFPWQALIVVEDTSRVPNDKWFGSGALLSASWILTAAHVLRSQRRDTTVIPVSKEHVTVYLGLHDVRDKSGAVNSSAARVVLHPDFNIQNYNHDIALVQLQEPVPLGPHVMPVCLPRLEPEGPAPHMLGLVAGWGISNPNVTVDEIISSGTRTLSDVLQYVKLPVVPHAECKTSYESRSGNYSVTENMFCAGYYEGGKDTCLGDSGGAFVIFDDLSQRWVVQGLVSWGGPEECGSKQVYGVYTKVSNYVDWVWEQMGLPQSVVEPQVER

SEQ ID NO: 11317 - protein, 533 aa, Homo sapiens
MSSCVSSQPSSNRAAPQDELGGRGSSSSESQKPCEALRGLSSLSIHLGMESFIVVTECEPGCAVDLGLARDRPLEADGQEVPLDTSGSQARPHLSGRKLSLQERSQGGLAAGGSLDMNGRCICPSLPYSPVSSPQSSPRLPRRPTVESHHVSITGMQDCVQLNQYTLKDEIGKGSYGVVKLAYNENDNTYYAMKVLSKKKLIRQAGFPRRPPPRGTRPAPGGCIQPRGPIEQVYQEIAILKKLDHPNVVKLVEVLDDPNEDHLYMVFELVNQGPVMEVPTLKPLSEDQARFYFQDLIKGIEYLHYQKIIHRDIKPSNLLVGEDGHIKIADFGVSNEFKGSDALLSNTVGTPAFMAPESLSETRKIFSGKALDVWAMGVTLYCFVFGQCPFMDERIMCLHSKIKSQALEFPDQPDIAEDLKDLITRMLDKNPESRIVVPEIKLHPWVTRHGAEPLPSEDENCTLVEVTEEEVENSVKHIPSLATVILVKTMIRKRSFGNPFEGSRREERSLSAPGNLLTKKPTRECESLSELKT

SEQ ID NO: 11318 - protein, 556 aa, Homo sapiens
MSSCVSSQPSSNRAAPQDELGGRGSSSSESQKPCEALRGLSSLSIHLGMESFIVVTECEPGCAVDLGLARDRPLEADGQEVPLDTSGSQARPHLSGRKLSLQERSQGGLAAGGSLDMNGRCICPSLPYSPVSSPQSSPRLPRRPTVESHHVSITGMQDCVQLNQYTLKDEIGKGSYGVVKLAYNENDNTYYAMKVLSKKKLIRQAGFPRRPPPRGTRPAPGGCIQPRGPIEQVYQEIAILKKLDHPNVVKLVEVLDDPNEDHLYMVFELVNQGPVMEVPTLKPLSEDQARFYFQDLIKGIEYLHYQKIIHRDIKPSNLLVGEDGHIKIADFGVSNEFKGSDALLSNTVGTPAFMAPESLSETRKIFSGKALDVWAMGVTLYCFVFGQCPFMDERIMCLHSKIKSQALEFPDQPDIAEDLKDLITRMLDKNPESRIVVPEIKLHPWVTRHGAEPLPSEDENCTLVEVTEEEVENSVKHIPSLATVILVKTMIRKRSFGNPFEGSRREERSLSAPGNLLTKKPTRECESLSELKGTKKKKGLDSMTSTVAAGWLDRRV

SEQ ID NO: 11319 - protein, 719 aa, Homo sapiens
MVQKYQSPVRVYKYPFELIMAAYERRFPTCPLIPMFVGSDTVNEFKSEDGAIHVIERRCKLDVDAPRLLKKIAGVDYVYFVQKNSLNSRERTLHIEAYNETFSNRVIINEHCCYTVHPENEDWTCFEQSASLDIKSFFGFESTVEKIAMKQYTSNIKKGKEIIEYYLRQLEEEGITFVPRWSPPSITTSSETSSSSSKKQAASMAVVIPEAALKEGLSGDALSSPSAPEPVVGTPDDKLDADYIKRYLGDLTPLQESCLIRLRQWLQETHKGKIPKDEHILRFLRARDFNIDKAREIMCQSLTWRKQHQVDYILETWTPPQVLQDYYAGGWHHHDKDGRPLYVLRLGQMDTKGLVRALGEEALLRYVLSINEEGLRRCEENTKVFGRPISSWTCLVDLEGLNMRHLWRPGVKALLRIIEVVEANYPETLGRLLILRAPRVFPVLWTLVSPFIDDNTRRKFLIYAGNDYQGPGGLLDYIDKEIIPDFLSGECMCEVPEGGLVPKSLYRTAEELENEDLKLWTETIYQSASVFKGAPHEILIQIVDASSVITWDFDVCKGDIVFNIYHSKRSPQPPKKDSLGAHSITSPGGNNVQLIDKVWQLGRDYSMVESPLICKEGESVQGSHVTRWPGFYILQWKFHSMPACAASSLPRVDDVLASLQVSSHKCKVMYYTEVIGSEDFRGSMTSLESSHSGFSQLSAATTSSSQSHSSSMISRWRFC

SEQ ID NO: 11320 - protein, 207 aa, Homo sapiens
MSTQSTHPLKPEAPRLPPGIPESPSCQRRHTLPASEFRCLTPEDAVSAFEIEREAFISVLGVCPLYLDEIRHFLTLCPELSLGWFEEGCLVAFIIGSLWDKERLMQESLTLHRSGGHIAHLHVLAVHRAFRQQGRGPILLWRYLHHLGSQPAVRRAALMCEDALVPFYERFSFHAVGPCAITVGSLTFMELHCSLRGHPFLRRNSGC

SEQ ID NO: 11321 - protein, 384 aa, Homo sapiens
MDPAGGPRGVLPRPCRVLVLLNPRGGKGKALQLFRSHVQPLLAEAEISFTLMLTERRNHARELVRSEELGRWDALVVMSGDGLMHEVVNGLMERPDWETAIQKPLCSLPAGSGNALAASLNHYAGYEQVTNEDLLTNCTLLLCRRLLSPMNLLSLHTASGLRLFSVLSLAWGFIADVDLESEKYRRLGEMRFTLGTFLRLAALRTYRGRLAYLPVGRVGSKTPASPVVVQQGPVDAHLVPLEEPVPSHWTVVPDEDFVLVLALLHSHLGSEMFAAPMGRCAAGVMHLFYVRAGVSRAMLLRLFLAMEKGRHMEYECPYLVYVPVVAFRLEPKDGKGVFAVDGELMVSEAVQGQVHPNYFWMVSGCVEPPPSWKPQQMPPPEEPL

SEQ ID NO: 11322 - protein, 499 aa, Homo sapiens
MIWRNNWKSTTGRLNVKLQSDKLQHGCGPDYSSAWLPANESLWQATTVPSNHRNNHIRRHSIASDSGDTGIGTSCSDSVEDHSTSSGTLSFKPSQSLITLPTAHVMPSNSSASISKLRESLTPDGSKWSTSLMQTLGNHSRGEQDSSLDMKDFRPLRKWSSLSKLTAPDNCGQGGTVCREESRNGLEKIGKAKALTSQLRTIGPSCLHDSMEMLRLEDKEINKKRSSTLDCKYKFESCSKEDFRASSSTLRRQPVDMTYSALPESKPIMTSSEAFEPPKYLMLGQQAVGGVPIQPSVRTQMWLTEQLRTNPLEGRNTEDSYSLAPWQQQQIEDFRQGSETPMQVLTGSSRQSYSPGYQDFSKWESMLKIKEGLLRQKEIVIDRQKQQITHLHERIRDNELRAQHAMLGHYVNCEDSYVASLQPQYENTSLQTPFSEESVSHSQQGEFEQKLASTEKEVLQLNEFLKQRLSLFSEEKKKLEEKVGFSNKVELGQQHFLSI

SEQ ID NO: 11323 - protein, 959 aa, Homo sapiens
MSSDEKGISPAHKTSTPTHRSASSSTSSQRDSRQSIHILERTASSSTEPSVSRQLLEPEPVPLSKEADSWEIIEGLKIGQTNVQKPDKHEGFMLKKRKWPLKGWHKRFFVLDNGMLKYSKAPLDIQKGKVHGSIDVGLSVMSIKKKARRIDLDTEEHIYHLKVKSQDWFDAWVSKLRHHRLYRQNEIVRSPRDASFHIFPSTSTAESSPAANVSVMDGKMQPNSFPWQSPLPCSNSLPATCTTGQSKVAAWLQDSEEMDRCAEDLAHCQSNLVELSKLLQNLEILQRTQSAPNFTDMQANCVDISKKDKRVTRRWRTKSVSKDTKIQLQEGPPAKGQFSTTRRRQRLAAAVATTVPFSATMSPVRLHSSNPNLCADIEFQTPPSHLTDPLESSTDYTKLQEEFCLIAQKVHSLLKSAFNSIAIEKEKLKQMVSEQDHSKGHSTQMARLRQSLSQALNQNAELRSRLNRIHSESIICDQVVSVNIIPSPDEAGEQIHVSLPLSQQVANESRLSMSESVSEFFDAQEVLLSASSSENEASDDESYISDVSDNISEDNTSVADNISRQILNGELTGGAFRNGRRACLPAPCPDTSNINLWNILRNNIGKDLSKVSMPVELNEPLNTLQHLCEEMEYSELLDKASETDDPYERMVLVAAFAVSGYCSTYFRAGSKPFNPVLGETYECIREDKGFRFFSEQVSHHPPISACHCESKNFVFWQDIRWKNKFWGKSMEILPVGTLNVMLPKYGDYYVWNKVTTCIHNILSGRRWIEHYGEVTIRNTKSSVCICKLTFVKVNYWNSNMNEVQGVVIDQEGKAVYRLFGKWHEGLYCGVAPSAKCIWRPGSMPTNYELYYGFTRFAIELNELDPVLKDLLPPTDARFRPDQRFLEEGNLEAAASEKQRVEELQRSRRRYMEENNLEHIPKFFKKVIDANQREAWVSNDTYWELRKDPGFSKVDSPVLW

SEQ ID NO: 11324 - protein, 1639 aa, Homo sapiens
PFVPTLKSDDDTSNFDEPEKNSWVSSSPCQLSPSGFSGEELPFVGFSYSKALGILGRSESVVSGLDSPAKTSSMEKKLLIKSKELQDSQDKCHKMEQEMTRLHRRVSEVEAVLSQKEVELKASETQRSLLEQDLATYITECSSLKRSLEQARMEVSQEDDKALQLLHDIREQSRKLQEIKEQEYQAQVEEMRLMMNQLEEDLVSARRRSDLYESELRESRLAAEEFKRKATECQHKLLKAKDQGKPEVGEYAKLEKINAEQQLKIQELQEKLEKAVKASTEATELLQNIRQAKERAERELEKLQNREDSSEGIRKKLVEAEELEEKHREAQVSAQHLEVHLKQKEQHYEEKIKVLDNQIKKDLADKETLENMMQRHEEEAHEKGKILSEQKAMINAMDSKIRSLEQRIVELSEANKLAANSSLFTQRNMKAQEEMISELRQQKFYLETQAGKLEAQNRKLEEQLEKISHQDHSDKNRLLELETRLREVSLEHEEQKLELKRQLTELQLSLQERESQLTALQAARAALESQLRQAKTELEETTAEAEEEIQALTAHRDEIQRKFDALRNSCTVITDLEEQLNQLTEDNAELNNQNFYLSKQLDEASGANDEIVQLRSEVDHLRREITEREMQLTSQKQTMEALKTTCTMLEEQVMDLEALNDELLEKERQWEAWRSVLGDEKSQFECRVRELQRMLDTEKQSRARADQRITESRQVVELAVKEHKAEILALQQALKEQKLKAESLSDKLNDLEKKHAMLEMNARSLQQKLETERELKQRLLEEQAKLQQQMDLQKNHIFRLTQGLQEALDRADLLKTERSDLEYQLENIQVLYSHEKVKMEGTISQQTKLIDFLQAKMDQPAKKKKVPLQYNELKLALEKEKARCAELEEALQKTRIELRSAREEAAHRKATDHPHPSTPATARQQIAMSAIVRSPEHQPSAMSLLAPPSSRRKESSTPEEFSRRLKERMHHNIPHRFNVGLNMRATKCAVCLDTVHFGRQASKCLECQVMCHPKCSTCLPATCGLPAEYATHFTEAFCRDKMNSPGLQTKEPSSSLHLEGWMKVPRNNKRGQQGWDRKYIVLEGSKVLIYDNEAREAGQRPVEEFELCLPDGDVSIHGAVGASELANTAKADVPYILKMESHPHTTCWPGRTLYLLAPSFPDKQRWVTALESVVAGGRVSREKAEADAKLLGNSLLKLEGDDRLDMNCTLPFSDQVVLVGTEEGLYALNVLKNSLTHVPGIGAVFQIYIIKDLEKLLMIAGEERALCLVDVKKVKQSLAQSHLPAQPDISPNIFEAVKGCHLFGAGKIENGLCICAAMPSKVVILRYNENLSKYCIRKEIETSEPCSCIHFTNYSILIGTNKFYEIDMKQYTLEEFLDKNDHSLAPAVFAASSNSFPVSIVQVNSAGQREEYLLCFHEFGVFVDSYGRRSRTDDLKWSRLPLAFAYREPYLFVTHFNSLEVIEIQARSSAGTPARAYLDIPNPRYLGPAISSGAIYLASSYQDKLRVICCKGNLVKESGTEHHRGPSTSRSSPNKRGPPTYNEHITKRVASSPAPPEGPSHPREPSTPHRYREGRTELRRDKSPGRPLEREKSPGRMLSTRRERSPGRLFEDSSRGRLPAGAVRTPLSQVNKVWDQSSV

SEQ ID NO: 11325 - protein, 2069 aa, Homo sapiens
MLKFKYGARNPLDAGAAEPIASRASRLNLFFQGKPPFMTQQQMSPLSREGILDALFVLFEECSQPALMKIKHVSNFVRKYSDTIAELQELQPSAKDFEVRSLVGCGHFAEVQVVREKATGDIYAMKVMKKKALLAQEQVSFFEEERNILSRSTSPWIPQLQYAFQDKNHLYLVMEYQPGGDLLSLLNRYEDQLDENLIQFYLAELILAVHSVHLMGYVHRDIKPENILVDRTGHIKLVDFGSAAKMNSNKMVNAKLPIGTPDYMAPEVLTVMNGDGKGTYGLDCDWWSVGVIAYEMIYGRSPFAEGTSARTFNNIMNFQRFLKFPDDPKVSSDFLDLIQSLLCGQKERLKFEGLCCHPFFSKIDWNNIRNSPPPFVPTLKSDDDTSNFDEPEKNSWVSSSPCQLSPSGFSGEELPFVGFSYSKALGILGRSESVVSGLDSPAKTSSMEKKLLIKSKELQDSQDKCHKMEQEMTRLHRRVSEVEAVLSQKEVELKASETQRSLLEQDLATYITECSSLKRSLEQARMEVSQEDDKALQLLHDIREQSRKLQEIKEQEYQAQVEEMRLMMNQLEEDLVSARRRSDLYESELRESRLAAEEFKRKATECQHKLLKAKDQGKPEVGEYAKLEKINAEQQLKIQELQEKLEKAVKASTEATELLQNIRQAKERAERELEKLQNREDSSEGIRKKLVEAEERRHSLENKVKRLETMERRENRLKDDIQTKSQQIQQMADKILELEEKHREAQVSAQHLEVHLKQKEQHYEEKIKVLDNQIKKDLADKETLENMMQRHEEEAHEKGKILSEQKAMINAMDSKIRSLEQRIVELSEANKLAANSSLFTQRNMKAQEEMISELRQQKFYLETQAGKLEAQNRKLEEQLEKISHQDHSDKNRLLELETRLREVSLEHEEQKLELKRQLTELQLSLQERESQLTALQAARAALESQLRQAKTELEETTAEAEEEIQALTAHRDEIQRKFDALRNSCTVITDLEEQLNQLTEDNAELNNQNFYLSKQLDEASGANDEIVQLRSEVDHLRREITEREMQLTSQKQTMEALKTTCTMLEEQVMDLEALNDELLEKERQWEAWRSVLGDEKSQFECRVRELQRMLDTEKQSRARADQRITESRQVVELAVKEHKAEILALQQALKEQKLKAESLSDKLNDLEKKHAMLEMNARSLQQKLETERELKQRLLEEQAKLQQQMDLQKNHIFRLTQGLQEALDRADLLKTERSDLEYQLENIQVLYSHEKVKMEGTISQQTKLIDFLQAKMDQPAKKKKGLFSRRKEDPALPTQVPLQYNELKLALEKEKARCAELEEALQKTRIELRSAREEAAHRKATDHPHPSTPATARQQIAMSAIVRSPEHQPSAMSLLAPPSSRRKESSTPEEFSRRLKERMHHNIPHRFNVGLNMRATKCAVCLDTVHFGRQASKCLECQVMCHPKCSTCLPATCGLPAEYATHFTEAFCRDKMNSPGLQTKEPSSSLHLEGWMKVPRNNKRGQQGWDRKYIVLEGSKVLIYDNEAREAGQRPVEEFELCLPDGDVSIHGAVGASELANTAKADVPYILKMESHPHTTCWPGRTLYLLAPSFPDKQRWVTALESVVAGGRVSREKAEADAKLLGNSLLKLEGDDRLDMNCTLPFSDQVVLVGTEEGLYALNVLKNSLTHVPGIGAVFQIYIIKDLEKLLMIAGEERALCLVDVKKVKQSLAQSHLPAQPDISPNIFEAVKGCHLFGAGKIENGLCICAAMPSKVVILRYNENLSKYCIRKEIETSEPCSCIHFTNYSILIGTNKFYEIDMKQYTLEEFLDKNDHSLAPAVFAASSNSFPVSIVQVNSAGQREEYLLCFHEFGVFVDSYGRRSRTDDLKWSRLPLAFAYREPYLFVTHFNSLEVIEIQARSSAGTPARAYLDIPNPRYLGPAISSGAIYLASSYQDKLRVICCKGNLVKESGTEHHRGPSTSRSSPNKRGPPTYNEHITKRVASSPAPPEGPSHPREPSTPHRYREGRTELRRDKSPGRPLEREKSPGRMLSTRRERSPGRLFEDSSRGRLPAGAVRTPLSQVNKVWDQSSV

SEQ ID NO: 11326 - protein, 898 aa, Homo sapiens
MRKGVLKDPEIADLFYKDDPEELFIGLHEIGHGSFGAVYFATNAHTSEVVAIKKMSYSGKQTHEKWQDILKEVKFLRQLKHPNTIEYKGCYLKEHTAWLVMEYCLGSASDLLEVHKKPLQEVEIAAITHGALHGLAYLHSHALIHRDIKAGNILLTEPGQVKLADFGSASMASPANSFVGTPYWMAPEVILAMDEGQYDGKVDIWSLGITCIELAERKPPLFNMNAMSALYHIAQNDSPTLQSNEWTDSFRRFVDYCLQKIPQERPTSAELLRHDFVRRDRPLRVLIDLIQRTKDAVRELDNLQYRKMKKILFQETRNGPLNESQEDEEDSEHGTSLNREMDSLGSNHSIPSMSVSTGSQSSSVNSMQEVMDESSSELVMMHDDESTINSSSSVVHKKDHVFIRDEAGHGDPRPEPRPTQSVQSQALHYRNRERFATIKSASLVTRQIHEHEQENELREQMSGYKRMRRQHQKQLIALENKLKAEMDEHRLKLQKEVETHANNSSIELEKLAKKQVAIIEKEAKVAAADEKKFQQQILAQQKKDLTTFLESQKKQYKICKEKIKEEMNEDHSTPKKEKQERISKHKENLQHTQAEEEAHLLTQQRLYYDKNCRFFKRKIMIKRHEVEQQNIREELNKKRTQKEMEHAMLIRHDESTRELEYRQLHTLQKLRMDLIRLQHQTELENQLEYNKRRERELHRKHVMELRQQPKNLKAMEMQIKKQFQDTCKVQTKQYKALKNHQLEVTPKNEHKTILKTLKDEQTRKLAILAEQYEQSINEMMASQALRLDEAQEAECQALRLQLQQEMELLNAYQSKIKMQTEAQHERELQKLEQRVSLRRAHLEQKIEEELAALQKERSERIKNLLERQEREIETFDMESLRMGFGNLVTLDFPKEDYR

SEQ ID NO: 11327 - protein, 1512 aa, Homo sapiens
MMIPSQISYPASQGAYYIPGQGRSTYVVPTQQYPVQPGAPGFYPGASPTEFGTYAGAYYPAQGVQQFPTGVAPTPVLMNQPPQIAPKRERKTIRIRDPNQGGKDITEEIMSGARTASTPTPPQTGGGLEPQANGETPQVAVIVRPDDRSQGAIIADRPGLPGPEHSPSESQPSSPSPTPSPSPVLEPGSEPNLAVLSIPGDTMTTIQMSVEESTPISRETGEPYRLSPEPTPLAEPILEVEVTLSKPVPESEFSSSPLQAPTPLASHTVEIHEPNGMVPSEDLEPEVESSPELAPPPACPSESPVPIAPTAQPEELLNGAPSPPAVDLSPVSEPEEQAKEVTASMAPPTIPSATPATAPSATSPAQEEEMEEEEEEEEGEAGEAGEAESEKGGEELLPPESTPIPANLSQNLEAAAATQVAVSVPKRRRKIKELNKKEAVGDLLDAFKEANPAVPEVENQPPAGSNPGPESEGSGVPPRPEEADETWDSKEDKIHNAENIQPGEQKYEYKSDQWKPLNLEEKKRYDREFLLGFQFIFASMQKPEGLPHISDVVLDKANKTPLRPLDPTRLQGINCGPDFTPSFANLGRTTLSTRGPPRGGPGGELPRGPAGLGPRRSQQGPRKEPRKIIATVLMTEDIKLNKAEKAWKPSSKRTAADKDRGEEDADGSKTQDLFRRVRSILNKLTPQMFQQLMKQVTQLAIDTEERLKGVIDLIFEKAISEPNFSVAYANMCRCLMALKVPTTEKPTVTVNFRKLLLNRCQKEFEKDKDDDEVFEKKQKEMDEAATAEERGRLKEELEEARDIARRRSLGNIKFIGELFKLKMLTEAIMHDCVVKLLKNHDEESLECLCRLLTTIGKDLDFEKAKPRMDQYFNQMEKIIKEKKTSSRIRFMLQDVLDLRGSNWVPRRGDQGPKTIDQIHKEAEMEEHREHIKVQQLMAKGSDKRRGGPPGPPISRGLPLVDDGGWNTVPISKGSRPIDTSRLTKITKPGSIDSNNQLFAPGGRLSWGKGSSGGSGAKPSDAASEAARPATSTLNRFSALQQAVPTESTDNRRVVQRSSLSRERGEKAGDRGDRLERSERGGDRGDRLDRARTPATKRSFSKEVEERSRERPSQPEGLRKAASLTEDRDRGRDAVKREAALPPVSPLKAALSEEELEKKSKAIIEEYLHLNDMKEAVQCVQELASPSLLFIFVRHGVESTLERSAIAREHMGQLLHQLLCAGHLSTAQYYQGLYEILELAEDMEIDIPHVWLYLAELVTPILQEGGVPMGELFREITKPLRPLGKAASLLLEILGLLCKSMGPKKVGTLWREAGLSWKEFLPEGQDIGAFVAEQKVEYTLGEESEAPGQRALPSEELNRQLEKLLKEGSSNQRVFDWIEANLSEQQIVSNTLVRALMTAVCYSAIIFETPLRVDVAVLKARAKLLQKYLCDEQKELQALYALQALVVTLEQPPNLLRMFFDALYDEDVVKEDAFYSWESSKDPAEQQGKGVALKSVTAFFKWLREAEEESDHN

SEQ ID NO: 11328 - protein, 1020 aa, Homo sapiens
MRRFLRPGHDPVRERLKRDLFQFNKTVEHGFPHQPSALGYSPSLRILAIGTRSGAIKLYGAPGVEFMGLHQENNAVTQIHLLPGQCQLVTLLDDNSLHLWSLKVKGGASELQEDESFTLRGPPGAAPSATQITVVLPHSSCELLYLGTESGNVFVVQLPAFRALEDRTISSDAVLQRLPEEARHRRVFEMVEALQEHPRDPNQILIGYSRGLVVIWDLQGSRVLYHFLSSQQLENIWWQRDGRLLVSCHSDGSYCQWPVSSEAQQPEPLRSLVPYGPFPCKAITRILWLTTRQGLPFTIFQGGMPRASYGDRHCISVIHDGQQTAFDFTSRVIGFTVLTEADPAATFDDPYALVVLAEEELVVIDLQTAGWPPVQLPYLASLHCSAITCSHHVSNIPLKLWERIIAAGSRQNAHFSTMEWPIDGGTSLTPAPPQRDLLLTGHEDGTVRFWDASGVCLRLLYKLSTVRVFLTDTDPNENFSAQGEDEWPPLRKVGSFDPYSDDPRLGIQKIFLCKYSGYLAVAGTAGQVLVLELNDEAAEQAVEQVEADLLQDQEGYRWKGHERLAARSGPVRFEPGFQPFVLVQCQPPAVVTSLALHSEWRLVAFGTSHGFGLFDHQQRRQVFVKCTLHPSDQLALEGPLSRVKSLKKSLRQSFRRMRRSRVSSRKRHPAGPPGEAQEGSAKAERPGLQNMELAPVQRKIEARSAEDSFTGFVRTLYFADTYLKDSSRHCPSLWAGTNGGTIYAFSLRVPPAERRMDEPVRAEQAKEIQLMHRAPVVGILVLDGHSVPLPEPLEVAHDLSKSPDMQGSHQLLVVSEEQFKVFTLPKVSAKLKLKLTALEGSRVRRVSVAHFGSRRAEDYGEHHLAVLTNLGDIQVVSLPLLKPQVRYSCIRREDVSGIASCVFTKYGQGFYLISPSEFERFSLSTKWLVEPRCLVDSAETKNHRPGNGAGPKKAPSRARNSGTQSDGEEKQPGLVMERALLSDERVLKEIQSTLEGDRGSGNWRSHRAAVGCSLSNGGAE

SEQ ID NO: 11329 - protein, 485 aa, Homo sapiens
MAAELYAPASAAAADLANSNAGAAVGRKAGPRSPPSAPAPAPPPPAPAPPTLGNNHQESPGWRCCRPTLRERNALMFNNELMADVHFVVGPPGATRTVPAHKYVLAVGSSVFYAMFYGDLAEVKSEIHIPDVEPAAFLILLKYMYSDEIDLEADTVLATLYAAKKYIVPALAKACVNFLETSLEAKNACVLLSQSRLFEEPELTQRCWEVIDAQAEMALRSEGFCEIDRQTLEIIVTREALNTKEAVVFEAVLNWAEAECKRQGLPITPRNKRHVLGRALYLVRIPTMTLEEFANGAAQSDILTLEETHSIFLWYTATNKPRLDFPLTKRKGLAPQRCHRFQSSAYRSNQWRYRGRCDSIQFAVDRRVFIAGLGLYGSSSGKAEYSVKIELKRLGVVLAQNLTKFMSDGSSNTFPVWFEHPVQVEQDTFYTASAVLDGSELSYFGQEGMTEVQCGKVAFQFQCSSDSTNGTGVQGGQIPELIFYA

SEQ ID NO: 11330 - protein, 222 aa, Homo sapiens
MERIEGASVGRCAASPYLRPLTLHYRQNGAQKSWDFMKTHDSVTVLLFNSSRRSLVLVKQFRPAVYAGEVERRFPGSLAAVDQDGPRELQPALPGSAGVTVELCAGLVDQPGLSLEEVACKEAWEECGYHLAPSDLRRVATYWSGVGLTGSRQTMFYTEVTDAQRSGPGGGLVEEGELIEVVHLPLEGAQAFADDPDIPKTLGVIFGVSWFLSQVAPNLDLQ

SEQ ID NO: 11331 - protein, 460 aa, Homo sapiens
MTSRRWFHPNITGVEAENLLLTRGVDGSFLARPSKSNPGDFTLSVRRNGAVTHIKIQNTGDYYDLYGGEKFATLAELVQYYMEHHGQLKEKNGDVIELKYPLNCADPTSERWFHGHLSGKEAEKLLTEKGKHGSFLVRESQSHPGDFVLSVRTGDDKGESNDGKSKVTHVMIRCQELKYDVGGGERFDSLTDLVEHYKKNPMVETLGTVLQLKQPLNTTRINAAEIESRVRELSKLAETTDKVKQGFWEEFETLQQQECKLLYSRKEGQRQENKNKNRYKNILPFDHTRVVLHDGDPNEPVSDYINANIIMPEFETKCNNSKPKKSYIATQGCLQNTVNDFWRMVFQENSRVIVMTTKEVERGKSKCVKYWPDEYALKEYGVMRVRNVKESAAHDYTLRELKLSKVGQGNTERTVWQYHFRTWPDHGVPSDPGGVLDFLEEVHHKQESIMDAGPVVVHCR

SEQ ID NO: 11332 - protein, 463 aa, Homo sapiens
MLWIGVTARNIYKQVTKKAPLCLDTDQPPYPRQPLLRFYLVSGGVPFIICGVTAATNIRNYGTEDEDTAYCWMAWEPSLGAFYGPAAIITLVTCVYFLGTYVQLRRHPGRRYELRTQPEEQRRLATPEGGRGIRPGTPPAHDAPGASVLQNEHSFQAQLRAAAFTLFLFTATWAFGALAVSQGHFLDMVFSCLYGAFCVTLGLFVLIHHCAKREDVWQCWWACCPPRKDAHPALDANGAALGRAACLHSPGLGQPRGFAHPPGPCKMTNLQAAQGHASCLSPATPCCAKMHCEPLTADEAHVHLQEEGAFGHDPHLHGCLQGRTKPPYFSRHPAEEPEYAYHIPSSLDGSPRSSRTDSPPSSLDGPAGTHTLACCTQGDPFPMVTQPEGSDGSPALYSCPTQPGREAALGPGHLEMLRRTQSLPFGGPSQNGLPKGKLLEGLPFGTDGTGNIRTGPWKNETTV

SEQ ID NO: 11333 - protein, 560 aa, Homo sapiens
MDLKTVLSLPRYPGEFLHPVVYACTAVMLLCLLASFVTYIVHQSAIRISRKGRHTLLNFCFHAALTFTVFAGGINRTKYPILCQAVGIVLHYSTLSTMLWIGVTARNIYKQVTKKAPLCLDTDQPPYPRQPLLRFYLVSGGVPFIICGVTAATNIRNYGTEDEDTAYCWMAWEPSLGAFYGPAAIITLVTCVYFLGTYVQLRRHPGRRYELRTQPEEQRRLATPEGGRGIRPGTPPAHDAPGASVLQNEHSFQAQLRAAAFTLFLFTATWAFGALAVSQGHFLDMVFSCLYGAFCVTLGLFVLIHHCAKREDVWQCWWACCPPRKDAHPALDANGAALGRAACLHSPGLGQPRGFAHPPGPCKMTNLQAAQGHASCLSPATPCCAKMHCEPLTADEAHVHLQEEGAFGHDPHLHGCLQGRTKPPYFSRHPAEEPEYAYHIPSSLDGSPRSSRTDSPPSSLDGPAGTHTLACCTQGDPFPMVTQPEGSDGSPALYSCPTQPGREAALGPGHLEMLRRTQSLPFGGPSQNGLPKGKLLEGLPFGTDGTGNIRTGPWKNETTV

SEQ ID NO: 11334 - protein, 1240 aa, Homo sapiens
MSVKEGAQRKWAALKEKLGPQDSDPTEANLESADPELCIRLLQMPSVVNYSGLRKRLEGSDGGWMVQFLEQSGLDLLLEALARLSGRGVARISDALLQLTCVSCVRAVMNSRQGIEYILSNQGYVRQLSQALDTSNVMVKKQVFELLAALCIYSPEGHVLTLDALDHYKTVCSQQYRFSIVMNELSGSDNVPYVVTLLSVINAVILGPEDLRARTQLRNEFIGLQLLDVLARLRDLEDADLLIQLEAFEEAKAEDEEELLRVSGGVDMSSHQEVFASLFHKVSCSPVSAQLLSVLQGLLHLEPTLRSSQLLWEALESLVNRAVLLASDAQECTLEEVVERLLSVKGRPRPSPLVKAHKSVQANLDQSQRGSSPQNTTTPKPSVEGQQPAAAAACEPVDHAQSESILKVSQPRALEQQASTPPPPPPPPLLPGSSAEPPPPPPPPPLPSVGAKALPTAPPPPPLPGLGAMAPPAPPLPPPLPGSCEFLPPPPPPLPGLGCPPPPPPLLPGMGWGPPPPPPPLLPCTCSPPVAGGMEEVIVAQVDHGLGSAWVPSHRRVNPPTLRMKKLNWQKLPSNVAREHNSMWASLSSPDAEAVEPDFSSIERLFSFPAAKPKEPTMVAPRARKEPKEITFLDAKKSLNLNIFLKQFKCSNEEVAAMIRAGDTTKFDVEVLKQLLKLLPEKHEIENLRAFTEERAKLASADHFYLLLLAIPCYQLRIECMLLCEGAAAVLDMVRPKAQLVLAACESLLTSRQLPIFCQLILRIGNFLNYGSHTGDADGFKISTLLKLTETKSQQNRVTLLHHVLEEAEKSHPDLLQLPRDLEQPSQAAGINLEIIRSEASSNLKKLLETERKVSASVAEVQEQYTERLQASISAFRALDELFEAIEQKQRELADYLCEDAQQLSLEDTFSTMKAFRDLFLRALKENKDRKEQAAKAERRKQQLAEEEARRPRGEDGKPVRKGPGKQEEVCVIDALLADIRKGFQLRKTARGRGDTDGGSKAASMDPPRATEPVATSNPAGDPVGSTRCPASEPGLDATTASESRGWDLVDAVTPGPQPTLEQLEEGGPRPLERRSSWYVDASDVLTTEDPQCPQPLEGAWPVTLGDAQALKPLKFSSNQPPAAGSSRQDAKDPTSLLGVLQAEADSTSEGLEDAVHSRGARPPAAGPGGDEDEDEEDTAPESALDTSLDKSFSEDAVTDSSGSGTLPRARGRASKGTGKRRKKRPSRSQEGLRPRPKAK

SEQ ID NO: 11335 - protein, 949 aa, Homo sapiens
SEHVLCMVLYLIELGLENSAEEESDEEASVGGPERCHDSWFPGSNLVSNMRHFINYVRVRVPETAPEVKRDSPASTSSDNLGSLQNSGTAQVFSLVAERRKKFQEIINRSSSEANQVVRPKTSSKWSAPGSAPQLTTAILEIKESILSLLIKLHHKLSGKQNSYYPPWLDDIEILIQPEIPKYSHGDGITAVERILLKAASQSRMNKRIIEEICRKVTPPVPPKKVTAAEKKTLDKEERRQKARERQQKLLAEFASRQKSFMETAMDVDSPENDIPMEITTAEPQVSEAVYDCVICGQSGPSSEDRPTGLVVLLQASSVLGQCRDNVEPKKLPISEEEQIYPWDTCAAVHDVRLSLLQRYFKDSSCLLAVSIGWEGGVYVQTCGHTLHIDCHKSYMESLRNDQVLQGFSVDKGEFTCPLCRQFANSVLPCYPGSNVENNPWQRPSNKSIQDLIKEVEELQGRPGAFPVSISSETNLSKEMESVMKDIKNTTQKKYRDYSKTPGSPDNDFLFMYSVARTNLELELIHRGGNLCSGGASTAGKRSCLNQLFHVLALHMRLYSIDSEYNPWRKLTQLEEMNPQLGYEEQQPEVPILYHDVTSLLLIQILMMPQPLRKDHFTCIVKVLFTLLYTQALAALSVKCSEEDRSAWKHAGALKKSTCDAEKSYEVLLSFVISELFKGKLYHEEGTQECAMVNPIAWSPESMEKCLQDFCLPFLRITSLLQHHLFGEDLPSCQEEEEFSVLASCLGLLPTFYQTEHPFISASCLDWPVPAFDIITQWCFEIKSFTERHAEQGKALLIQESKWKLPHLLQLPENYNTIFQYYHRKTCSVCTKVPKDPAVCLVCGTFVCLKGLCCKQQSYCECVLHSQNCGAGTGIFLLINASVIIIIRGHRFCLWGSVYLDAHGEEDRDLRRGKPLYICKERYKVLEQQWISHTFDHINKRWGPHYNGL

SEQ ID NO: 11336 - protein, 1249 aa, Homo sapiens
MSVKEGAQRKWAALKEKLGPQDSDPTEANLESADPELCIRLLQMPSVVNYSGLRKRLEGSDGGWMVQFLEQSGLDLLLEALARLSGRGVARISDALLQLTCVSCVRAVMNSRQGIEYILSNQGYVRQLSQALDTSNVMVKKQVFELLAALCIYSPEGHVLTLDALDHYKTVCSQQYRFSIVMNELSGSDNVPYVVTLLSVINAVILGPEDLRARTQLRNEFIGLQLLDVLARLRDLEDADLLIQLEAFEEAKAEDEEELLRVSGGVDMSSHQEVFASLFHKVSCSPVSAQLLSVLQGLLHLEPTLRSSQLLWEALESLVNRAVLLASDAQECTLEEVVERLLSVKGRPRPSPLVKAHKSVQANLDQSQRGSSPQNTTTPKPSVEGQQPAAAAACEPVDHAQSESILKVSQPRALEQQASTPPPPPPPPLLPGSSAEPPPPPPPPPLPSVGAKALPTAPPPPPLPGLGAMAPPAPPLPPPLPGSCEFLPPPPPPLPGLGCPPPPPPLLPGMGWGPPPPPPPLLPCTCSPPVAGGMEEVIVAQVDHGLGSAWVPSHRRVNPPTLRMKKLNWQKLPSNVAREHNSMWASLSSPDAEAVEPDFSSIERLFSFPAAKPKEPTMVAPRARKEPKEITFLDAKKSLNLNIFLKQFKCSNEEVAAMIRAGDTTKFDVEVLKQLLKLLPEKHEIENLRAFTEERAKLASADHFYLLLLAIPCYQLRIECMLLCEGAAAVLDMVRPKAQLVLAACESLLTSRQLPIFCQLILRIGNFLNYGSHTGDADGFKISTLLKLTETKSQQNRVTLLHHVLEEAEKSHPDLLQLPRDLEQPSQAAGINLEIIRSEASSNLKKLLETERKVSASVAEVQEQYTERLQASISAFRALDELFEAIEQKQRELADYLCEDAQQLSLEDTFSTMKAFRDLFLRALKENKDRKEQAAKAERRKQQLAEEEARRPRGEDGKPVRKGPGKQEEVCVIDALLADIRKGFQLRKTARGRGDTDGGSKAASMDPPRATEPVATSNPAGDPVGSTRCPASEPGLDATTASESRGWDLVDAVTPGPQPTLEQLEEGGPRPLERRSSWYVDASDVLTTEDPQCPQPLEGAWPVTLGDAQALKPLKFSSNQPPAAGSSRQDAKDPTSLLGVLQAEADSTSEGLEDAVHSRGARPPAAGPGGDEDEDEEDTAPESALDTSLDKSFSEDAVTDSSGSGTLPRARGRASKGTGKRRKKRPSRSQEEVPPDSDDNKTKKLCVIQ

SEQ ID NO: 11337 - protein, 867 aa, Homo sapiens
MLSPNDKMLGKLDPFYQPSVSKQKTSAEIISEARNALRTVRTQRPFTPQEAQRKLFGPASSRTSENRPPSSFSLHASSFESSDSRPISGTRLSPLELKPKVPASPTREEDSCFSFPKPPVDPAKIRRVSNARARLFRAASQRALLPDRSLPPSDSKKTVESKETVMMGDSMVKINGIYLTKSNAICHLKSHPLQLTDDGGFSEIKEQEMFKGTTSLPSHLKNGGDQGKRHARASSCPSSSDLSRLQTKAVPKADLQEEDAEIEVDEVFWNTRIVPILRELEKEENIETVCAACTQLHHALEEGNMLGNKFKGRSILLKTLCKLVDVGSDSLSLKLAKIILALKVSRKNLLNVCKLIFKISRNEKNDSLIQNDSILESLLEVLRSEDLQTNMEAFLYCMGSIKFISGNLGFLNEMISKGAVEILINLIKQINENIKKCGTFLPNSGHLLVQVTATLRNLVDSSLVRSKFLNISALPQLCTAMEQYKGDKDVCTNIARIFSKLTSYRDCCTALASYSRCYALFLNLINKYQKKQDLVVRVVFILGNLTAKNNQAREQFSKEKGSIQTLLSLFQTFHQLDLHSQKPVGQRGEQHRAQRPPSEAEDVLIKLTRVLANIAIHPGVGPVLAANPGIVGLLLTTLEYKSLDDCEELVINATATINNLSYYQVKNSIIQDKKLYIAELLLKLLVSNNMDGILEAVRVFGNLSQDHDVCDFIVQNNVHRFMMALLDAQHQDICFSACGVLLNLTVDKDKRVILKEGGGIKKLVDCLRDLGPTDWQLACLVCKTLWNFSENITNASSCFGNEDTNTLLLLLSSFLDEELALDGSFDPDLKNYHKLHWETEFKPVAQQLLNRIQRHHTFLEPLPIPSF

SEQ ID NO: 11338 - protein, 518 aa, Homo sapiens
MVMKEIPREESAEEKPLLTMTSQLVNEQQESRPLLSPSIDDFLCETKSEAIARPVTSNTADIQTQLEKWDDVKFHGDRNTKGHPMAERKSSSSRTGSKELLWSSEHRSQPELSGGKSALNSESASELELVAPTQARLTKEHRWGSALLSRNHSLEEEFERAKAAVESDTEFWDKMQAEWEEMARRNWISENQEAQNQVTISASEKGYYFHTENPFKDWPGAFEEGLKRLKEGDLPVTILFMEAAILQDPGDAEAWQFLGITQAENENEQAAIVALQRCLELQPNNLKALMALAVSYTNTGHQQDACDALKNWIKQNPKYKYLVKSKKGSPGLTRRMSKSPVDSSVLEGVKELYLEAAHQNGDMIDPDLQTGLGVLFHLSGEFNRAIDAFNAALTVRPEDYSLWNRLGATLANGDRSEEAVEAYTRALEIQPGFIRSRYNLGISCINLGAYREAVSNFLTALSLQRKSRNQQQVPHPAISGNIWAALRIALSLMDQPELFQAANLGDLDVLLRAFNLDP

SEQ ID NO: 11339 - protein, 2172 aa, Homo sapiens
MWGLLIWTLLALHQIRAARAQDDVSPYFKTEPVRTQVHLEGNRLVLTCMAEGSWPLEFKWLHNNRELTKFSLEYRYMITSLDRTHAGFYRCIVRNRMGALLQRQTEVQVAYMGSFEEGEKHQSVSHGEAAVIRAPRIASFPQPQVTWFRDGRKIPPSSRIAITLENTLVILSTVAPDAGRYYVQAVNDKNGDNKTSQPITLTVENVGGPADPIAPTIIIPPKNTSVVAGTSEVTLECVANARPLIKLHIIWKKDGVLLSGGISDHNRRLTIPNPTGSDAGYYECEAVLRSSSVPSVVRGAYLSVLEPPQFVKEPERHITAEMEKVVDIPCQAKGVPPPSITWYKDAAVVEVEKLTRFRQRNDGGLQISGLVPDDTGMFQCFARNAAGEVQTSTYLAVTSIAPNITRGPLDSTVIDGMSVVLACETSGAPRPAITWQKGERILASGSVQLPRFTPLESGSLLISPTHISDAGTYTCLATNSRGVDEASADLVVWARTRITKPPQDQSVIKGTQASMVCGVTHDPRVTIRYIWEKDGATLGTESHPRIRLDRNGSLHISQTWSGDIGTYTCRVISAGGNDSRSAHLRVRQLPHAPEHPVATLSTVERRAINLTWTKPFDGNSPLIRYILEMSENNAPWTVLLASVDPKATSVTVKGLVPARSYQFRLCAVNDVGKGQFSKDTERVSLPEEPPTAPPQNVIASGRTNQSIMIQWQPPPESHQNGILKGYIIRYCLAGLPVGYQFKNITDADVNNLLLEDLIIWTNYEIEVAAYNSAGLGVYSSKVTEWTLQGVPTVPPGNVHAEATNSTTIRFTWNAPSPQFINGINQGYKLIAWEPEQEEEVTMVTARPNFQDSIHVGFVSGLKKFTEYFTSVLCFTTPGDGPRSTPQLVRTHEDVPGPVGHLSFSEILDTSLKVSWQEPGEKNGILTGYRISWEEYNRTNTRVTHYLPNVTLEYRVTGLTALTTYTIEVAAMTSKGQGQVSASTISSGVPPELPGPPTNLGISNIGPRSVTLQFRPGYDGKTSISRWLVEAQVGVVGEGEEWLLIHQLSNEPDARSMEVPDLNPFTCYSFRMRQVNIVGTSPPSQPSRKIQTLQAPPDMAPANVSLRTASETSLWLRWMPLPEMEYNGNPESVGYKIKYSRSDGHGKTLSHVVQDRVERDYTIEDLEEWTEYRVQVQAFNAIGSGPWSQTVVGRTRESVPSSGPTNVSALATTSSSMLVRWSEVPEADRNGLVLGYKVMYKEKDSDTQPRFWLVEGNSSRSAQLTGLGKYVLYEVQVLAFTRIGDGSPSHPPILERTLDDVPGPPMGILFPEVRTTSVRLIWQPPAAPNGIILAYQITHRLNTTTANTATVEVLAPSARQYTATGLKPESVYLFRITAQTRKGWGEAAEALVVTTEKRDRPQPPSRPMVQQEDVRARSVLLSWEPGSDGLSPVRYYTIQTRELPSGRWALHSASVSHNASSFIVDRLKPFTSYKFRVKATNDIGDSEFSEESESLTTLQAAPDEAPTILSVTPHTTTSVLIRWQPPAEDKINGILLGFRIRYRELLYEGLRGFTLRGINNPGATWAELTSMYSMRNLSRPSLTQYELDNLNKHRRYEIRMSVYNAVGEGPSSPPQEVFVGEAVPTAAPRNVVVHGATATQLDVTWEPPPLDSQNGDIQGYKIYFWEAQRGNLTERVKTLFLAENSVKLKNLTGYTAYMVSVAAFNAAGDGPRSTPTQGQTQQAAPSAPSSVKFSELTTTSVNVSWEAPQFPNGILEGYRLVYEPCSPVDGVSKIVTVDVKGNSPLWLKVKDLAEGVTYRFRIRAKTFTYGPEIEANVTTGPGEGAPGPPGVPIIVRYSSAIAIHWSSGDPGKGPITRYVIEARPSDEGLWDILIKDIPKEVSSYTFSMDILKPGVSYDFRVIAVNDYGFGTPSSPSQSVPAQKANPFYEEWWFLVVIALVGLIFILLLVFVLIIRGQSKKYAKKTDSGNSAKSGALGHSEMMSLDESSFPALELNNRRLSVKNSFCRKNGLYTRSPPRPSPGSLHYSDEDVTKYNDLIPAESSSLTEKPSEISDSQGSDSEYEVDSNHQKAHSFVNHYISDPTYYNSWRRQQKGISRAQAYSYTESDSGEPDHTTVTNSTSTQQGSLFRPKASRTPTPQNPPNPPSQQSTLYRPPSSLAPGSRAPIAGFSSFV

SEQ ID NO: 11340 - protein, 1738 aa, Homo sapiens
MKSRPTKQKLKQRGILKERVFGCDLGEHLLNSGFEVPQVLQSCTAFIERYGIVDGIYRLSGVASNIQRLRHEFDSEHVPDLTKEPYVQDIHSVGSLCKLYFRELPNPLLTYQLYEKFSDAVSAATDEERLIKIHDVIQQLPPPHYRTLEFLMRHLSLLADYCSITNMHAKNLAIVWAPNLLRSKQIESACFSGTAAFMEVRIQSVVVEFILNHVDVLFSGRISMAMQEGAASLSRPKSLLVSSPSTKLLTLEEAQARTQAQVNSPIVTENKYIEVGEGPAALQGKFHTIIEFPLERKRPQNKMKKSPVGSWRSFFNLGKSSSVSKRKLQRNESEPSEMKAMALKGGRAEGTLRSAKSEESLTSLHAVDGDSKLFRPRRPRSSSDALSASFNGEMLGNRCNSYDNLPHDNESEEEGGLLHIPALMSPHSAEDVDLSPPDIGVASLDFDPMSFQCSPPKAESECLESGASFLDSPGYSKDKPSANKKDAETGSSQCQTPGSTASSEPVSPLQEKLSPFFTLDLSPTEDKSSKPSSFTEKVVYAFSPKIGRKLSKSPSMSISEPISVTLPPRVSEVIGTVSNTTAQNASSSTWDKCVEERDATNRSPTQIVKMKTNETVAQEAYESEVQPLDQVAAEEVELPGKEDQSVSSSQSKAVASGQTQTGAVTHDPPQDSVPVSSVSLIPPPPPPKNVARMLALALAESAQQASTQSLKRPGTSQAGYTNYGDIAVATTEDNLSSSYSAVALDKAYFQTDRPAEQFHLQNNAPGNCDHPLPETTATGDPTHSNTTESGEQHHQVDLTGNQPHQAYLSGDPEKARITSVPLDSEKSDDHVSFPEDQSGKNSMPTVSFLDQDQSPPRFYSGDQPPSYLGASVDKLHHPLEFADKSPTPPNLPSDKIYPPSGSPEENTSTATMTYMTTTPATAQMSTKEASWDVAEQPTTADFAAATLQRTHRTNRPLPPPPSQRSAEQPPVVGQVQAATNIGLNNSHKVQGVVPVPERPPEPRAMDDPASAFISDSGAAAAQCPMATAVQPGLPEKVRDGARVPLLHLRAESVPAHPCGFPAPLPPTRMMESKMIAAIHSSSADATSSSNYHSFVTASSTSVDDALPLPLPVPQPKHASQKTVYSSFARPDVTTEPFGPDNCLHFNMTPNCQYRPQSVPPHHNKLEQHQVYGARSEPPASMGLRYNTYVAPGRNASGHHSKPCSRVEYVSSLSSSVRNTCYPEDIPPYPTIRRVQSLHAPPSSMIRSVPISRTEVPPDDEPAYCPRPLYQYKPYQSSQARSDYHVTQLQPYFENGRVHYRYSPYSSSSSSYYSPDGALCDVDAYGTVQLRPLHRLPNRDFAFYNPRLQGKSLYSYAGLAPRPRANVTGYFSPNDHNVVSMPPAADVKHTYTSWDLEDMEKYRMQSIRRESRARQKVKGPVMSQYDNMTPAVQDDLGGIYVIHLRSKSDPGKTGLLSVAEGKESRHAAKAISPEGEDRFYRRHPEAEMDRAHHHGGHGSTQPEKPSLPQKQSSLRSRKLPDMGCSLPEHRAHQEASHRQFCESKNGPPYPQGAGQLDYGSKGIPDTSEPVSYHNSGVKYAASGQESLRLNHKEVRLSKEMERPWVRQPSAPEKHSRDCYKEEEHLTQSIVPPPKPERSHSLKLHHTQNVERDPSVLYQYQPHGKRQSSVTVVSQYDNLEDYHSLPQHQRGVFGGGGMGTYVPPGFPHPQSRTYATALGQGAFLPAELSLQHPETQIHAE

SEQ ID NO: 11341 - protein, 391 aa, Homo sapiens
MNASSRNVFDTLIRVLTESMFKHLRKWVVTRFFGHSRQRARLVSKDGRCNIEFGNVEAQSRFIFFVDIWTTVLDLKWRYKMTIFITAFLGSWFFFGLLWYAVAYIHKDLPEFHPSANHTPCVENINGLTSAFLFSLETQVTIGYGFRCVTEQCATAIFLLIFQSILGVIINSFMCGAILAKISRPKKRAKTITFSKNAVISKRGGKLCLLIRVANLRKSLLIGSHIYGKLLKTTVTPEGETIILDQININFVVDAGNENLFFISPLTIYHVIDHNSPFFHMAAETLLQQDFELVVFLDGTVESTSATCQVRTSYVPEEVLWGYRFAPIVSKTKEGKYRVDFHNFSKTVEVETPHCAMCLYNEKDVRARMKRGYDNPNFILSEVNETDDTKM

SEQ ID NO: 11342 - protein, 485 aa, Homo sapiens
MSYFVDSAGSSPVPYSAPRPAVVRQGPSNTYEDPRMNCGFQSNYHQQRPCYPFWDEMATQEVPTGLEHCVSDMECADVPLLTPSSKEMMSQALKATFSGFTKEQQRLGIPKDPRQWTETHVRDWVMWAVNEFSLKGVDFQKFCMNGAALCALGKDCFLELAPDFVGDILWEHLEILQKEDVKPYQVNGVNPAYPESRYTSDYFISYGIEHAQCVPPSEFSEPSFITESYQTLHPISSEELLSLKYENDYPSVILRDPLQTDTLQNDYFAIKQEVVTPDNMCMGRTSRGKLGGQDSFESIESYDSCDRLTQSWSSQSSFNSLQRVPSYDSFDSEDYPAALPNHKPKGTFKDYVRDRADLNKDKPVIPAAALAGYTGSGPIQLWQFLLELLTDKSCQSFISWTGDGWEFKLSDPDEVARRWGKRKNKPKMNYEKLSRGLRYYYDKNIIHKTAGKRYVYRFVCDLQSLLGYTPEELHAMLDVKPDADE

SEQ ID NO: 11343 - protein, 333 aa, Homo sapiens
MVSKSRWKLLAMLALVLVVMVWYSISREDRYIELFYFPIPEKKEPCLQGEAESKASKLFGNYSRDQPIFLRLEDYFWVKTPSAYELPYGTKGSEDLLLRVLAITSSSIPKNIQSLRCRRCVVVGNGHRLRNSSLGDAINKYDVVIRLNNAPVAGYEGDVGSKTTMRLFYPESAHFDPKVENNPDTLLVLVAFKAMDFHWIETILSDKKRVRKGFWKQPPLIWDVNPKQIRILNPFFMEIAADKLLSLPMQQPRKIKQKPTTGLLAITLALHLCDLVHIAGFGYPDAYNKKQTIHYYEQITLKSMAGSGHNVSQEALAIKRMLEMGAIKNLTSF

SEQ ID NO: 11344 - protein, 429 aa, Homo sapiens
MAAMLKCVMSGSQVKVFGKAVQALSRISDEFWLDPSKKGLALRCVNSSRSAYGCVLFSPVFFQHYQWSALVKMSENELDTTLHLKCKLGMKSILPIFRCLNSLERNIEKCRIFTRSDKCKVVIQFFYRHGIKRTHNICFQESQPLQVIFDKNVCTNTLMIQPRLLADAIVLFTSSQEEVTLAVTPLNFCLKSSNEESMDLSNAVHSEMFVGSDEFDFFQIGMDTEITFCFKELKGILTFSEATHAPISIYFDFPGKPLALSIDDMLVEANFILATLADEQSRASSPQSLCLSQKRKRSDLIEKKAGKNVTGQALECISKKAAPRRLYPKETLTNISALENCGSPAMKRVDGDVSEVSESSVSNTEEVPGSLCLRKFSCMFFGAVSSDQQEHFNHPFDSLARASDSEEDMNNVCCRKEFNGSDAKYFCII

SEQ ID NO: 11345 - protein, 1642 aa, Homo sapiens
MSTAIREVGVWRQTRTLLLKNYLIKCRTKKSSVQEILFPLFFLFWLILISMMHPNKKYEEVPNIELNPMDKFTLSNLILGYTPVTNITSSIMQKVSTDHLPDVIITEEYTNEKEMLTSSLSKPSNFVGVVFKDSMSYELRFFPDMIPVSSIYMDSRAGCSKSCEAAQYWSSGFTVLQASIDAAIIQLKTNVSLWKELESTKAVIMGETAVVEIDTFPRGVILIYLVIAFSPFGYFLAIHIVAEKEKKIKEFLKIMGLHDTAFWLSWVLLYTSLIFLMSLLMAVIATASLLFPQSSSIVIFLLFFLYGLSSVFFALMLTPLFKKSKHVGIVEFFVTVAFGFIGLMIILIESFPKSLVWLFSPFCHCTFVIGIAQVMHLEDFNEGASFSNLTAGPYPLIITIIMLTLNSIFYVLLAVYLDQVIPGEFGLRRSSLYFLKPSYWSKSKRNYEELSEGNVNGNISFSEIIEPVSSEFVGKEAIRISGIQKTYRKKGENVEALRNLSFDIYEGQITALLGHSGTGKSTLMNILCGLCPPSDGFASIYGHRVSEIDEMFEARKMIGICPQLDIHFDVLTVEENLSILASIKGIPANNIIQEVQKVLLDLDMQTIKDNQAKKLSGGQKRKLSLGIAVLGNPKILLLDEPTAGMDPCSRHIVWNLLKYRKANRVTVFSTHFMDEADILADRKAVISQGMLKCVGSSMFLKSKWGIGYRLSMYIDKYCATESLSSLVKQHIPGATLLQQNDQQLVYSLPFKDMDKFSGLFSALDSHSNLGVISYGVSMTTLEDVFLKLEVEAEIDQADYSVFTQQPLEEEMDSKSFDEMEQSLLILSETKAALVSTMSLWKQQMYTIAKFHFFTLKRESKSVRSVLLLLLIFFTVQIFMFLVHHSFKNAVVPIKLVPDLYFLKPGDKPHKYKTSLLLQNSADSDISDLISFFTSQNIMVTMINDSDYVSVAPHSAALNVMHSEKDYVFAAVFNSTMVYSLPILVNIISNYYLYHLNVTETIQIWSTPFFQEITDIVFKIELYFQAALLGIIVTAMPPYFAMENAENHKIKAYTQLKLSGLLPSAYWIGQAVVDIPLFFIILILMLGSLLAFHYGLYFYTVKFLAVVFCLIGYVPSVILFTYIASFTFKKILNTKEFWSFIYSVAALACIAITEITFFMGYTIATILHYAFCIIIPIYPLLGCLISFIKISWKNVRKNVDTYNPWDRLSVAVISPYLQCVLWIFLLQYYEKKYGGRSIRKDPFFRNLSTKSKNRKLPEPPDNEDEDEDVKAERLKVKELMGCQCCEEKPSIMVSNLHKEYDDKKDFLLSRKVKKVATKYISFCVKKGEILGLLGPNGAGKSTIINILVGDIEPTSGQVFLGDYSSETSEDDDSLKCMGYCPQINPLWPDTTLQEHFEIYGAVKGMSASDMKEVISRITHALDLKEHLQKTVKKLPAGIKRKLCFALSMLGNPQITLLDEPSTGMDPKAKQHMWRAIRTAFKNRKRAAILTTHYMEEAEAVCDRVAIMVSGQLRCIGTVQHLKSKFGKGYFLEIKLKDWIENLEVDRLQREIQYIFPNASRQESFSSILAYKIPKEDVQSLSQSFFKLEEAKHAFAIEEYSFSQATLEQVFVELTKEQEEEDNSCGTLNSTLWWERTQEDRVVF

SEQ ID NO: 11346 - protein, 235 aa, Homo sapiens
MASSTSLPAPGSRPKKPLGKMADWFRQTLLKKPKKRPNSPESTSSDASQPTSQDSPLPPSLSSVTSPSLPPTHASDSGSSRWSKDYDVCVCHSEEDLVAAQDLVSYLEGSTASLRCFLQLRDATPGGAIVSELCQALSSSHCRVLLITPGFLQDPWCKYQMLQALTEAPGAEGCTIPLLSGLSRAAYPPELRFMYYVDGRGPDGGFRQVKEAVMRCKLLQEGEGERDSATVSDLL

SEQ ID NO: 11347 - protein, 221 aa, Homo sapiens
MASSTSLPAPGSRPKKPLGKMADWFRQTLLKKPKKRPNSPESTSSDASQPTSQDSPLPPSLSSVTSPSLPPTHASDSGSSRWSKDYDVCVCHSEEDLVAAQDLVSYLEGSTASLRCFLQLRDATPGGAIVSELCQALSSSHCRVLLITPGFLQDPWCKYQMLQALTEAPGAEGCTIPLLSGLSRAAYPPELRFMYYVDGRGPDGGFRQVKEAVMRYLQTLS

SEQ ID NO: 11348 - protein, 914 aa, Homo sapiens
MAENSVLTSTTGRTSLADSSIFDSKVTEISKENLLIGSTSYVEEEMPQIETRVILVQEAGKQEELIKALKTIKIMEVPVIKIKESCPGKSDEKLIKSVINMDIKVGFVKMESVEEFEGLDSPEFENVFVVTDFQDSVFNDLYKADCRVIGPPVVLNCSQKGEPLPFSCRPLYCTSMMNLVLCFTGFRKKEELVRLVTLVHHMGGVIRKDFNSKVTHLVANCTQGEKFRVAVSLGTPIMKPEWIYKAWERRNEQDFYAAVDDFRNEFKVPPFQDCILSFLGFSDEEKTNMEEMTEMQGGKYLPLGDERCTHLVVEENIVKDLPFEPSKKLYVVKQEWFWGSIQMDARAGETMYLYEKANTPELKKSVSMLSLNTPNSNRKRRRLKETLAQLSRETDVSPFPPRKRPSAEHSLSIGSLLDISNTPESSINYGDTPKSCTKSSKSSTPVPSKQSARWQVAKELYQTESNYVNILATIIQLFQVPLEEEGQRGGPILAPEEIKTIFGSIPDIFDVHTKIKDDLEDLIVNWDESKSIGDIFLKYSKDLVKTYPPFVNFFEMSKETIIKCEKQKPRFHAFLKINQAKPECGRQSLVELLIRPVQRLPSVALLLNDLKKHTADENPDKSTLEKAIGSLKEVMTHINEDKRKTEAQKQIFDVVYEVDGCPANLLSSHRSLVQRVETISLGEHPCDRGEQVTLFLFNDCLEIARKRHKVIGTFRSPHGQTRPPASLKHIHLMPLSQIKKVLDIRETEDCHNAFALLVRPPTEQANVLLSFQMTSDELPKENWLKMLCRHVANTICKADAENLIYTADPESFEVNTKDMDSTLSRASRAIKKTSKKVTRAFSFSKTPKRALRRALMTSHGSVEGRSPSSNDKHVMSRLSSTSSLAGIPSPSLVSLPSFFERRSHTLSRSTTHLI

SEQ ID NO: 11349 - protein, 1287 aa, Homo sapiens
MHPDLGPLCTLLYVTLTILCSSVSSDLAPYFTSEPLSAVQKLGGPVVLHCSAQPVTTRISWLHNGKTLDGNLEHVKIHQGTLTILSLNSSLLGYYQCLANNSIGAIVSGPATVSVAVLGDFGSSTKHVITAEEKSAGFIGCRVPESNPKAEVRYKIRGKWLEHSTENYLILPSGNLQILNVSLEDKGSYKCAAYNPVTHQLKVEPIGRKLLVSRPSSDDVHILHPTHSQALAVLSRSPVTLECVVSGVPAPQVYWLKDGQDIAPGSNWRRLYSHLATDSVDPADSGNYSCMAGNKSGDVKYVTYMVNVLEHASISKGLQDQIVSLGATVHFTCDVHGNPAPNCTWFHNAQPIHPSARHLTAGNGLKISGVTVEDVGMYQCVADNGIGFMHSTGRLEIENDGGFKPVIITAPVSAKVADGDFVTLSCNASGLPVPVIRWYDSHGLITSHPSQVLRSKSRKSQLSRPEGLNLEPVYFVLSQAGASSLHIQAVTQEHAGKYICEAANEHGTTQAEASLMVVPFETNTKAETVTLPDAAQNDDRSKRDGSETGLLSSFPVKVHPSAVESAPEKNASGISVPDAPIILSPPQTHTPDTYNLVWRAGKDGGLPINAYFVKYRKLDDGVGMLGSWHTVRVPGSENELHLAELEPSSLYEVLMVARSAAGEGQPAMLTFRTSKEKTASSKNTQASSPPVGIPKYPVVSEAANNNFGVVLTDSSRHSGVPEAPDRPTISTASETSVYVTWIPRANGGSPITAFKVEYKRMRTSNWLVAAEDIPPSKLSVEVRSLEPGSTYKFRVIAINHYGESFRSSASRPYQVVGFPNRFSSRPITGPHIAYTEAVSDTQIMLKWTYIPSSNNNTPIQGFYIYYRPTDSDNDSDYKRDVVEGSKQWHMIGHLQPETSYDIKMQCFNEGGESEFSNVMICETKVKRVPGASEYPVKDLSTPPNSLGSGGNVGPATSPARSSDMLYLIVGCVLGVMVLILMVFIAMCLWKNRQQNTIQKYDPPGYLYQGSDMNGQMVDYTTLSGASQINGNVHGGFLTNGGLSSGYSHLHHKVPNAVNGIVNGSLNGGLYSGHSNSLTRTHVDFEHPHHLVNGGGMYTAVPQIDPLECVNCRNCRNNNRCFTKTNSTFSSSPPPVVPVVAPYPQDGLEMKPLSHVKVPVCLTSAVPDCGQLPEESVKDNVEPVPTQRTCCQDIVNDVSSDGSEDPAEFSRGQEGMINLRIPDHLQLAKSCVWEGDSCAHSETEINIVSWNALILPPVPEGCAEKTMWSPPGIPLDSPTEVLQQPRET

SEQ ID NO: 11350 - protein, 633 aa, Homo sapiens
MAHLKRLVKLHIKRHYHKKFWKLGAVIFFFIIVLVLMQREVSVQYSKEESRMERNMKNKNKMLDLMLEAVNNIKDAMPKMQIGAPVRQNIDAGERPCLQGYYTAAELKPVLDRPPQDSNAPGASGKAFKTTNLSVEEQKEKERGEAKHCFNAFASDRISLHRDLGPDTRPPECIEQKFKRCPPLPTTSVIIVFHNEAWSTLLRTVHSVLYSSPAILLKEIILVDDASVDEYLHDKLDEYVKQFSIVKIVRQRERKGLITARLLGATVATAETLTFLDAHCECFYGWLEPLLARIAENYTAVVSPDIASIDLNTFEFNKPSPYGSNHNRGNFDWSLSFGWESLPDHEKQRRKDETYPIKTPTFAGGLFSISKEYFEYIGSYDEEMEIWGGENIEMSFRVWQCGGQLEIMPCSVVGHVFRSKSPHSFPKGTQVIARNQVRLAEVWMDEYKEIFYRRNTDAAKIVKQKAFGDLSKRFEIKHRLQCKNFTWYLNNIYPEVYVPDLNPVISGYIKSVGQPLCLDVGENNQGGKPLIMYTCHGLGGNQYFEYSAQHEIRHNIQKELCLHAAQGLVQLKACTYKGHKTVVTGEQIWEIQKDQLLYNPFLKMCLSANGEHPSLVSCNPSDPLQKWILSQND

SEQ ID NO: 11351 - protein, 1204 aa, Homo sapiens
MCGRAAEAAASSRTPGREMGQAVTRRLGAGARAAPRRAMDGRTPRPQDAPARRKPKAKAPLPPAETKYTDVSSAADSVESTAFIMEQKENMIDKDVELSVVLPGDIIKSTTVHGSKPMMDLLIFLCAQYHLNPSSYTIDLLSAEQNHIKFKPNTPIGMLEVEKVILKPKMLDKKKPTPIIPEKTVRVVINFKKTQKTIVRVSPHASLQELAPIICSKCEFDPLHTLLLKDYQSQEPLDLTKSLNDLGLRELYAMDVNRESCQISQNLDIMKEKENKGFFSFFQRSKKKRDQTASAPATPLVNKHRPTFTRSNTISKPYISNTLPSDAPKKRRAPLPPMPASQSVPQDLAHIQERPASCIVKSMSVDETDKSPCEAGRVRAGSLQLSSMSAGNSSLRRTKRKAPSPPSKIPPHQSDENSRVTALQPVDGVPPDSASEANSPEELSSPETFHPGLSSQEQCTAPKLMEETSVFECPGTPEAAITSLTSGISSDYSLEEIDEKEELSEVPKVEAENISPKSQDIPFVSTDIINTLKNDPDSALGNGSGEFSQNSMEEKQETKSTDGQEPHSVVYDTSNGKKVVDSIRNLKSLGPNQENVQNEIIVYPENTEDNMKNGVKKTEINVEGVAKNNNIDMEVERPSNSEAHETDTAISYKENHLAASSVPDQKLNQPSAEKTKDAAIQTTPSCNSFDGKHQDHNLSDSKVEECVQTSNNNISTQHSCLSSQDSVNTSREFRSQGTLIIHSEDPLTVKDPICAHGNDDLLPPVDRIDKNSTASYLKNYPLYRQDYNPKPKPSNEITREYIPKIGMTTYKIVPPKSLEISKDWQSETIEYKDDQDMHALGKKHTHENVKETAIQTEDSAISESPEEPLPNLKPKPNLRTEHQVPSSVSSPDDAMVSPLKPAPKMTRDTGTAPFAPNLEEINNILESKFKSRASNAQAKPSSFFLQMQKRVSGHYVTSAAAKSVHAAPNPAPKELTNKEAERDMLPSPEQTLSPLSKMPHSVPQPLVEKTDDDVIGQAPAEASPPPIAPKPVTIPASQVSTQNLKTLKTFGAPRPYSSSGPSPFALAVVKRSQSFSKERTESPSASALVQPPANTEEGKTHSVNKFVDIPQLGVSDKENNSAHNEQNSQIPTPTDGPSFTVMRQSSLTFQSSDPEQMRQSLLTAIRSGEAAAKLKRVTIPSNTISVNGRSRLSHSMSPDAQDGH

SEQ ID NO: 11352 - protein, 1357 aa, Homo sapiens
MADTDLFMECEEEELEPWQKISDVIEDSVVEDYNSVDKTTTAGNPLVQQGGQPLILTQNPAPGLGTMVTQPVLRPVQVMQNANHVTSSPVASQPIFITTQGFPVRNVRPVQNAMNQVGIVLNVQQGQTVRPITLVPAPGTQFVKPTVGVPQVFSQMTPVRPGSTMPVRPTTNTFTTVIPATLTIRSTVPQSQSQQTKSTPSTSTTPTATQPTSLGQLAVQSPGQSNQTTNPKLAPSFPSPPAVSIASFVTVKRPGVTGENSNEVAKLVNTLNTIPSLGQSPGPVVVSNNSSAHGSQRTSGPESSMKVTSSIPVFDLQDGGRKICPRCNAQFRVTEALRGHMCYCCPEMVEYQKKGKSLDSEPSVPSAAKPPSPEKTAPVASTPSSTPIPALSPPTKVPEPNENVGDAVQTKLIMLVDDFYYGRDGGKVAQLTNFPKVATSFRCPHCTKRLKNNIRFMNHMKHHVELDQQNGEVDGHTICQHCYRQFSTPFQLQCHLENVHSPYESTTKCKICEWAFESEPLFLQHMKDTHKPGEMPYVCQVCQYRSSLYSEVDVHFRMIHEDTRHLLCPYCLKVFKNGNAFQQHYMRHQKRNVYHCNKCRLQFLFAKDKIEHKLQHHKTFRKPKQLEGLKPGTKVTIRASRGQPRTVPVSSNDTPPSALQEAAPLTSSMDPLPVFLYPPVQRSIQKRAVRKMSVMGRQTCLECSFEIPDFPNHFPTYVHCSLCRYSTCCSRAYANHMINNHVPRKSPKYLALFKNSVSGIKLACTSCTFVTSVGDAMAKHLVFNPSHRSSSILPRGLTWIAHSRHGQTRDRVHDRNVKNMYPPPSFPTNKAATVKSAGATPAEPEELLTPLAPALPSPASTATPPPTPTHPQALALPPLATEGAECLNVDDQDEGSPVTQEPELASGGGGSGGVGKKEQLSVKKLRVVLFALCCNTEQAAEHFRNPQRRIRRWLRRFQASQGENLEGKYLSFEAEEKLAEWVLTQREQQLPVNEETLFQKATKIGRSLEGGFKISYEWAVRFMLRHHLTPHARRAVAHTLPKDVAENAGLFIDFVQRQIHNQDLPLSMIVAIDEISLFLDTEVLSSDDRKENALQTVGTGEPWCDVVLAILADGTVLPTLVFYRGQMDQPANMPDSILLEAKESGYSDDEIMELWSTRVWQKHTACQRSKGMLVMDCHRTHLSEEVLAMLSASSTLPAVVPAGCSSKIQPLDVCIKRTVKNFLHKKWKEQAREMADTACDSDVLLQLVLVWLGEVLGVIGDCPELVQRSFLVASVLPGPDGNINSPTRNADMQEELIASLEEQLKLSGEHSESSTPRPRSSPEETIEPESLHQLFEGESETESFYGFEEADLDLMEI

SEQ ID NO: 11353 - protein, 568 aa, Homo sapiens
MESSKKMDSPGALQTNPPLKLHTDRSAGTPVFVPEQGGYKEKFVKTVEDKYKCEKCHLVLCSPKQTECGHRFCESCMAALLSSSSPKCTACQESIVKDKVFKDNCCKREILALQIYCRNESRGCAEQLMLGHLLVHLKNDCHFEELPCVRPDCKEKVLRKDLRDHVEKACKYREATCSHCKSQVPMIALQKHEDTDCPCVVVSCPHKCSVQTLLRSELSAHLSECVNAPSTCSFKRYGCVFQGTNQQIKAHEASSAVQHVNLLKEWSNSLEKKVSLLQNESVEKNKSIQSLHNQICSFEIEIERQKEMLRNNESKILHLQRVIDSQAEKLKELDKEIRPFRQNWEEADSMKSSVESLQNRVTELESVDKSAGQVARNTGLLESQLSRHDQMLSVHDIRLADMDLRFQVLETASYNGVLIWKIRDYKRRKQEAVMGKTLSLYSQPFYTGYFGYKMCARVYLNGDGMGKGTHLSLFFVIMRGEYDALLPWPFKQKVTLMLMDQGSSRRHLGDAFKPDPNSSSFKKPTGEMNIASGCPVFVAQTVLENGTYIKDDTIFIKVIVDTSDLPDP

SEQ ID NO: 11354 - protein, 431 aa, Homo sapiens
MSSVCDMSFLQKSCITMVHFCGLLTLHREPVPLKSISVSVNIYEFVAGVSATLNYENEEKVPLEAFFVFPMDEDSAVYSFEALVDGKKIVAELQDKMKARTNYEKAISQGHQAFLLEGDSSSRDVFSCNVGNLQPGSKAAVTLKYVQELPLEADGALRFVLPAVLNPRYQFSGSSKDSCLNVKTPIVPVEDLPYTLSMVATIDSQHGIEKVQSNCPLSPTEYLGEDKTSAQVSLAAGHKFDRDVELLIYYNEVHTPSVVLEMGMPNMKPGHLMGDPSAMVSFYPNIPEDQPSNTCGEFIFLMDRSGSMQSPMSSQDTSQLRIQAAKETLILLLKSLPIGCYFNIYGFGSSYEACFPESVKYTQQTMEEALGRVKLMQADLGGTEILAPLQNIYRGPSIPGHPLQLFVFTDGEVTDTFSVIKEVRINRQKHR

SEQ ID NO: 11355 - protein, 596 aa, Homo sapiens
MAEDEPDAKSPKTGGRAPPGGAEAGEPTTLLQRLRGTISKAVQNKVEGILQDVQKFSDNDKLYLYLQLPSGPTTGDKSSEPSTLSNEEYMYAYRWIRNHLEEHTDTCLPKQSVYDAYRKYCESLACCRPLSTANFGKIIREIFPDIKARRLGGRGQSKYCYSGIRRKTLVSMPPLPGLDLKGSESPEMGPEVTPAPRDELVEAACALTCDWAERILKRSFSSIVEVARFLLQQHLISARSAHAHVLKAMGLAEEDEHAPRERSSKPKNGLENPEGGAHKKPERLAQPPKDLEARTGAGPLARGERKKSVVESSAPGANNLQVNALVARLPLLLPRAPRSLIPPIPVSPPILAPRLSSGALKVATLPLSSRAGAPPAAVPIINMILPTVPALPGPGPGPGRAPPGGLTQPRGTENREVGIGGDQGPHDKGVKRTAEVPVSEASGQAPPAKAAKQDIEDTASDAKRKRGRPRKKSGGSGERNSTPLKSAAAMESAQSSRLPWETWGSGGEGNSAGGAERPGPMGEAEKGAVLAQGQGDGTVSKGGRGPGSQHTKEAEDKIPLVPSKVSVIKGSRSQKEAFPLAKGEVDTAPQGNKDLK

SEQ ID NO: 11356 - protein, 786 aa, Homo sapiens
MVHFCGLLTLHREPVPLKSISVSVNIYEFVAGVSATLNYENEEKVPLEAFFVFPMDEDSAVYSFEALVDGKKIVAELQDKMKARTNYEKAISQGHQAFLLEGDSSSRDVFSCNVGNLQPGSKAAVTLKYVQELPLEADGALRFVLPAVLNPRYQFSGSSKDSCLNVKTPIVPVEDLPYTLSMVATIDSQHGIEKVQSNCPLSPTEYLGEDKTSAQVSLAAGHKFDRDVELLIYYNEVHTPSVVLEMGMPNMKPGHLMGDPSAMVSFYPNIPEDQPSNTCGEFIFLMDRSGSMQSPMSSQDTSQLRIQAAKETLILLLKSLPIGCYFNIYGFGSSYEACFPESVKYTQQTMEEALGRVKLMQADLGGTEILAPLQNIYRGPSIPGHPLQLFVFTDGEVTDTFSVIKEVRINRQKHRCFSFGIGEGTSTSLIKGIARASGGTSEFITGKDRMQSKALRTLKRSLQPVVEDVSLSWHLPPGLSAKMLSPEQTVIFRGQRLISYAQLTGRMPAAETTGEVCLKYTLQGKTFEDKVTFPLQPKPDVNLTIHRLAAKSLLQTKDMGLRETPASDKKDALNLSLESGVISSFTAFIAINKELNKPVQGPLAHRDVPRPILLGASAPLKIKCQSGFRKALHSDRPPSASQPRGELMCYKAKTFQMDDYSLCGLISHKDQHSPGFGENHLVQLIYHQNANGSWDLNEDLAKILGMSLEEIMAAQPAELVDSSGWATILAVIWLHSNGKDLKCEWELLERKAVAWMRAHAGSTMPSVVKAAITFLKSSVDPAIFAF

SEQ ID NO: 11357 - protein, 212 aa, Homo sapiens
MRMTMEEMKNEAETTSMVSMPLYAVMYPVFNELERVNLSAAQTLRAAFIKAEKENPGLTQDIIMKILEKKSVEVNFTESLLRMAADDVEEYMIERPEPEFQDLNEKARALKQILSKIPDEINDRVRFLQTIKDIASAIKELLDTVNNVFKKYQYQNRRALEHQKKEFVKYSKSFSDTLKTYFKDGKAINVFVSANRLIHQTNLILQTFKTVA

SEQ ID NO: 11358 - protein, 308 aa, Homo sapiens
MAAALGASGGAGAGDDDFDQFDKPGAERSWRRRAADEDWDSELEDDLLGEDLLSGKKNQSDLSDEELNDDLLQSDNEDEENFSSQGVTISLNATSGMVTSFELSDNTNDQSGEQESEYEQEQGEDELVYHKSDGSELYTQEYPEEGQYEGHEAELTEDQIEYVEEPEEEQLYTDEVLDIEINEPLDEFTDEEYLQAYGGQQGLQEQEDCVAEDELDEITDAQVAPATEEGGMETLELQKDIKEESDEEEEDDEESGRLRFKTERKEGTIIRLSDVTRERRNIPETLGNFFACLPSSFTLISTSSIVLL

SEQ ID NO: 11359 - protein, 908 aa, Homo sapiens
IRLSDVTRERRNIPETLELSAEAKAALLEFEERERQHKQGRYSSRRGGRRGGPLMCRGVGDQRRESTERGRMKDHRPALLPTQPPVVPQAPPPPPPPPQQQPIRSLFQPQPLQPLLPVQHPHHPSPPQGMHMPPQLETPRMMMTPPPVTPQQPKNIHINPHFKGTVVTPVQVPLLPVPSQPRPAVGPQRFPGPPEFPQHTPGPVPNSFSQPPRLPLQDQWRAPPPPQDRDPFFLGVSGEPRFPSHLFLEQRSPPPPPPPPTLLNSSHPVPTQSPLPFTQPGPAFNQQGQQPVFPRERPVRPALQPPGPVGILHFSQPGSATTRPFIPPRQPFLPGPGQPFLPTHTQPNLQGPLHPPLPPPHQPQPQQPQQQPPPQHQPPHQPPHQPPPQHQPPPQHPPQHPPQHQHHHHHHHLSVPPPPLMPMSQPQFRPHVQTAQPQASSSRMQCPQRQGLRHNTTSQNVSKRPMQQMQPTAPRNSNLRELPIAPSHVIEMSSSRCSATPSAQVKPIVSASPPSRAVAGSRSSQGKTEVKVKPASPVAQPKEEAKTETEFPDEDEETRLYRLKIEEQKRLREEILKQKELRRQQQAGARKKELLERLAQQQQQLYAPPPPAEQEEQALSPSPTNGNPLLPFPGAQVRQNVKNRLLVKNQDVSISNVQPKTSNFVPSSANMQYQGQQMKALKHLRQTRTVPQSQTQPLHKVLPIKPADVEEPAVPQTPRVASIQGRPQDTKPGVKRTVTHRTNSGGGDGPHISSKVRVIKLSGGQGGESDGFFHPEGQPQRLPQPPEVGPQPARKVTLTRGGLQQPPHLPAGPHAHSPVPPGIKSIQGIHPAKKAIMHGRGRGVAGPMGRGRLMPNKQNLRVVECKPQPCVVSVEGLSSSTTDAQLKSLLMSVGPIQVAAWGWHLCHG

SEQ ID NO: 11360 - protein, 771 aa, Homo sapiens
MEKVQLEFENQEMEKKLQEFRSTRNKEKEDRESSEYYWKSGKVGKLVNQSYMMSQNKGNVVKFSAGKVKLKLLKEQIQEPVKPTVNYKMANSSECEKPKINGKVCGQCENKAALLVCLECGEDYCSGCFAKVHQKGALKLHRTTLLQAKSQILFNVLDVAHQFIKDVNPDEPKEENNSTKETSKIQHKPKSVLLQRSSSEVEITTMKRAQRTKPRKSLLCEGSFDEEASAQSFQEVLSQWRTGNHDDNKKQNLHAAVKDSLEECEVQTNLKIWREPLNIELKEDILSYMEKLWLKKHRRTPQEQLFKMLPDTFPHPHETTGDAQCSQNENDEDSDGEETKVQHTALLLPVETLNIERPEPSLKIVELDDTYEEEFEEAENIVPYKVKLADADSQRSCAFHDCQKNSFPYENGIHQHHVFDKGKRDFLNLCLRNSSTYYKDNSKAETSNTDFDNIVDPDVYSSDIEKIEESTSFERNLKEKNIGLESNQKSDDSCVSLESKDTLLGRDLEKAPIEEKLSQDIKESLELSNLYKRPSFEESKTTKSSLLLQEIACRSKPITKQYQGLERFFIFDTNERLNLLPSHRLECNNSSTRITLAGQKSQRPSTANFPLSNSVKESSSCLSSSHPRSRSAAAQSSSRAASEISEIEYIDITDQNELSLDDTTDQHTLDNLEKELQVLRSLADTSEKLYSLTSEEFPDFSSQSLNISQISTDFLKTSHVRGPCGVEELSCSGRDTKIQSLLSLSESSTDEEEEDFLNKQHVITLPWSKST

SEQ ID NO: 11361 - protein, 800 aa, Homo sapiens
MNRKDFVVLPWGKPGNSVKLKYRNAQELRMEKVQLEFENQEMEKKLQEFRSTRNKEKEDRESSEYYWKSGKVGKLVNQSYMMSQNKGNVVKFSAGKVKLKLLKEQIQEPVKPTVNYKMANSSECEKPKINGKVCGQCENKAALLVCLECGEDYCSGCFAKVHQKGALKLHRTTLLQAKSQILFNVLDVAHQFIKDVNPDEPKEENNSTKETSKIQHKPKSVLLQRSSSEVEITTMKRAQRTKPRKSLLCEGSFDEEASAQSFQEVLSQWRTGNHDDNKKQNLHAAVKDSLEECEVQTNLKIWREPLNIELKEDILSYMEKLWLKKHRRTPQEQLFKMLPDTFPHPHETTGDAQCSQNENDEDSDGEETKVQHTALLLPVETLNIERPEPSLKIVELDDTYEEEFEEAENIVPYKVKLADADSQRSCAFHDCQKNSFPYENGIHQHHVFDKGKRDFLNLCLRNSSTYYKDNSKAETSNTDFDNIVDPDVYSSDIEKIEESTSFERNLKEKNIGLESNQKSDDSCVSLESKDTLLGRDLEKAPIEEKLSQDIKESLELSNLYKRPSFEESKTTKSSLLLQEIACRSKPITKQYQGLERFFIFDTNERLNLLPSHRLECNNSSTRITLAGQKSQRPSTANFPLSNSVKESSSCLSSSHPRSRSAAAQSSSRAASEISEIEYIDITDQNELSLDDTTDQHTLDNLEKELQVLRSLADTSEKLYSLTSEEFPDFSSQSLNISQISTDFLKTSHVRGPCGVEELSCSGRDTKIQSLLSLSESSTDEEEEDFLNKQHVITLPWSKST

SEQ ID NO: 11362 - protein, 955 aa, Homo sapiens
MEVGSEEEKWEKLDAEFDHFVVDMKPFVLKLPHRTERQRCALWIRKLCEPSGTGAGIMGRKNRNLYAKLLLHMLKRGALEGPFTHRPEPGTLKILPSYMSIYFDEPNPARAKGSSPEGLPAWVLGELETSEHKLNESWKLSSGEDNTLVQSPTDVYSREQYTGKLRVRSHSLSPTHREDGQNITPKICEVYSKKSPVSLDDSDIEARLNSWNLGIENPRYLRQKPIPVSLMTPKFSLRKSSSFHDDHFLSRIREKELDMKTKMMEAKFHEEKLKLQQKHDADVQKILERKNNEIEELKTLYRSKQHETEETIRKLEKKVQTLIRDCQVIRETKEDQIAELKKICEQSTESLNNDWEKKLHNAVAEMEQEKFDLQKQHTENIQELLEDTNVRLNKMESEYMAQTQSTNHMIKELEARVQQLTGEAENSNLQRQKLIQEKAELERCYQITCSELQEVKARRNTLHKEKDHLVNDYEQNMKLLQTKYDADINLLKQEHALSASKASSMIEELEQNVCQLKQQLQESELQRKQQLRDQENKFQMEKSHLKHIYEKKAHDLQSELDKGKEDTQKKIHKFEEALKEKEEQLTRVTEVQRLQAQQADAALEEFKRQVELNSEKVYAEMKEQMEKVEADLTRSKSLREKQSKEFLWQLEDIRQRYEQQIVELKLEHEQEKTHLLQQHNAEKDSLVRDHEREIENLEKQLRAANMEHENQIQEFKKRDAQVIADMEAQVHKLREELINVNSQRKQQLVELGLLREEEKQRATREHEIVVNKLKAESEKMKIELKKTHAAETEMTLEKANSKLKQIEKEYTQKLAKSSQIIAELQTTISSLKEENSQQQLAAERRLQDVRQKFEDEKKQLIRDNDQAIKVLQDELENRSNQVRCAEKKLQHKELESQEQITYIRQEYETKLKGLMPASLRQELEDTISSLKSQVNFLQKRASILQEELTTYQGRR

SEQ ID NO: 11363 - protein, 1324 aa, Homo sapiens
MLLSPSLLLLLLLGAPRGCAEGVAAALTPERLLEWQDKGIFVIQSESLKKCIQAGKSVLTLENCKQANKHMLWKWVSNHGLFNIGGSGCLGLNFSAPEQPLSLYECDSTLVSLRWRCNRKMITGPLQYSVQVAHDNTVVASRKYIHKWISYGSGGGDICEYLHKDLHTIKGNTHGMPCMFPFQYNHQWHHECTREGREDDLLWCATTSRYERDEKWGFCPDPTSAEVGCDTIWEKDLNSHICYQFNLLSSLSWSEAHSSCQMQGGTLLSITDETEENFIREHMSSKTVEVWMGLNQLDEHAGWQWSDGTPLNYLNWSPEVNFEPFVEDHCGTFSSFMPSAWRSRDCESTLPYICKKYLNHIDHEIVEKDAWKYYATHCEPGWNPYNRNCYKLQKEEKTWHEALRSCQADNSALIDITSLAEVEFLVTLLGDENASETWIGLSSNKIPVSFEWSNDSSVIFTNWHTLEPHIFPNRSQLCVSAEQSEGHWKVKNCEERLFYICKKAGHVLSDAESGCQEGWERHGGFCYKIDTVLRSFDQASSGYYCPPALVTITNRFEQAFITSLISSVVKMKDSYFWIALQDQNDTGEYTWKPVGQKPEPVQYTHWNTHQPRYSGGCVAMRGRHPLGRWEVKHCRHFKAMSLCKQPVENQEKAEYEERWPFHPCYLDWESEPGLASCFKVFHSEKVLMKRTWREAEAFCEEFGAHLASFAHIEEENFVNELLHSKFNWTEERQFWIGFNKRNPLNAGSWEWSDRTPVVSSFLDNTYFGEDARNCAVYKANKTLLPLHCGSKREWICKIPRDVKPKIPFWYQYDVPWLFYQDAEYLFHTFASEWLNFEFVCSWLHSDLLTIHSAHEQEFIHSKIKALSKYGASWWIGLQEERANDEFRWRDGTPVIYQNWDTGRERTVNNQSQRCGFISSITGLWGSEECSVSMPSICKRKKVWLIEKKKDTPKQHGTCPKGWLYFNYKCLLLNIPKDPSSWKNWTHAQHFCAEEGGTLVAIESEVEQAFITMNLFGQTTSVWIGLQNDDYETWLNGKPVVYSNWSPFDIINIPSHNTTEVQKHIPLCALLSSNPNFHFTGKWYFEDCGKEGYGFVCEKMQDTSGHGVNTSDMYPMPNTLEYGNRTYKIINANMTWYAAIKTCLMHKAQLVSITDQYHQSFLTVVLNRLGYAHWIGLFTTDNGLNFDWSDGTKSSFTFWKDEESSLLGDCVFADSNGRWHSTACESFLQGAICHVPPETRQSEHPELCSETSIPWIKFKSNCYSFSTVLDSMSFEAAHEFCKKEGSNLLTIKDEAENAFLLEELFAFGSSVQMVWLNAQFDGNSK

SEQ ID NO: 11364 - protein, 2132 aa, Homo sapiens
MESGERLPSSAASSTTPTSSSTPSVASVVSKGGLSTGVASLSSTINPCGHLFRTAGDQPFNLSTVSSAFPMVSHPVFGLHSASSGHSEFGGLGTLGTPTALAAHPQLASFPEWWRTTDAHTRTGATFFPPLLGIPPLFAPPAQNHDSSSFHSRTSGKSNRNGPEKGVNGSINGSNTSSVIGINTSVLSTTASSSMGQTKSTSSGGGNRKCNQEQSKNQPLDARVDKIKDKKPRKKAMESSSNSDSDSGTSSDTSSEGISSSDSDDLEEDEEEEDQSIEESEDDDSDSESEAQHKSNNQVLLHGISDPKADGQKATEKAQEKRIHQPLPLASESQTHSFQSQQKQPQVLSQQLPFIFQSSQAKEESVNKHTSVIQSTGLVSNVKPLSLVNQAKKETYMKLIVPSPDVLKAGNKNTSEESSLLTSELRSKREQYKQAFPSQLKKQESSKSLKKVIAALSNPKATSSSPAHPKQTLENNHPNPFLTNALLGNHQPNGVIQSVIQEAPLALTTKTKMQSKINENIAAASSTPFSSPVNLSTSGRRTPGNQTPVMPSASPILHSQGKEKAVSNNVNPVKTQHHSHPAKSLVEQFRGTDSDIPSSKDSEDSNEDEEEDDEEEDEEDDEDDESDDSQSESDSNSESDTEGSEEEDDDDKDQDESDSDTEGEKTSMKLNKTTSSVKSPSMSLTGHSTPRNLHIAKAPGSAPAALCSESQSPAFLGTSSSTLTSSPHSGTSKRRRVTDERELRIPLEYGWQRETRIRNFGGRLQGEVAYYAPCGKKLRQYPEVIKGMQWCLLKEEDVIPRIRAMEGRRGRPPNPDRQRAREESRMRRRKGRPPNVGNAEFLDNADAKLLRKLQAQEIARQAAQIKLLRKLQKQEQARVAKEAKKQQAIMAAEEKRKQKEQIKIMKQQEKIKRIQQIRMEKELRAQQILEAKKKKKEEAANAKLLEAEKRIKEKEMRRQQAVLLKHQERERRRQHMMLMKAMEARKKAEEKERLKQEKRDEKRLNKERKLEQRRLELEMAKELKKPNEDMCLADQKPLPELPRIPGLVLSGSTFSDCLMVVQFLRNFGKVLGFDVNIDVPNLSVLQEGLLNIGDSMGEVQDLLVRLLSAAVCDPGLITGYKAKTALGEHLLNVGVNRDNVSEILQIFMEAHCGQTELTESLKTKAFQAHTPAQKASVLAFLINELACSKSVVSEIDKNIDYMSNLRRDKWVVEGKLRKLRIIHAKKTGKRDTSGGIDLGEEQHPLGTPTPGRKRRRKGGDSDYDDDDDDDSDDQGDEDDEDEEDKEDKKGKKTDICEDEDEGDQAASVEELEKQIEKLSKQQSQYRRKLFDASHSLRSVMFGQDRYRRRYWILPQCGGIFVEGMESGEGLEEIAKEREKLKKAESVQIKEEMFETSGDSLNCSNTDHCEQKEDLKEKDNTNLFLQKPGSFSKLSKLLEVAKMPPESEVMTPKPNAGANGCTLSYQNSGKHSLGSVQSTATQSNVEKADSNNLFNTGSSGPGKFYSPLPNDQLLKTLTEKNRQWFSLLPRTPCDDTSLTHADMSTASLVTPQSQPPSKSPSPTPAPLGSSAQNPVGLNPFALSPLQVKGGVSMMGLQFCGWPTGVVTSNIPFTSSVPSLGSGLGLSEGNGNSFLTSNVASSKSESPVPQNEKATSAQPAAVEVAKPVDFPSPKPIPEEMQFGWWRIIDPEDLKALLKVLHLRGIREKALQKQIQKHLDYITQACLKNKDVAIIELNENEENQVTRDIVENWSVEEQAMEMDLSVLQQVEDLERRVASASLQVKGWMCPEPASEREDLVYFEHKSFTKLCKEHDGEFTGEDESSAHALERKSDNPLDIAVTRLADLERNIERRIEEDIAPGLRVWRRALSEARSAAQVALCIQQLQKSIAWEKSIMKVYCQICRKGDNEELLLLCDGCDKGCHTYCHRPKITTIPDGDWFCPACIAKASGQTLKIKKLHVKGKKTNESKKGKKVTLTGDTEDEDSASTSSSLKRGNKDLKKRKMEENTSINLSKQESFTSVKKPKRDDSKDLALCSMILTEMETHEDAWPFLLPVNLKLVPGYKKVIKKPMDFSTIREKLSSGQYPNLETFALDVRLVFDNCETFNEDDSDIGRAGHNMRKYFEKKWTDTFKVS

SEQ ID NO: 11365 - protein, 2168 aa, Homo sapiens
MESGERLPSSAASSTTPTSSSTPSVASVVSKGGLSTGVASLSSTINPCGHLFRTAGDQPFNLSTVSSAFPMVSHPVFGLHSASSGHSEFGGLGTLGTPTALAAHPQLASFPGAEWWRTTDAHTRTGATFFPPLLGIPPLFAPPAQNHDSSSFHSRTSGKSNRNGPEKGVNGSINGSNTSSVIGINTSVLSTTASSSMGQTKSTSSGGGNRKCNQEQSKNQPLDARVDKIKDKKPRKKAMESSSNSDSDSGTSSDTSSEGISSSDSDDLEEDEEEEDQSIEESEDDDSDSESEAQHKSNNQVLLHGISDPKADGQKATEKAQEKRIHQPLPLASESQTHSFQSQQKQPQVLSQQLPFIFQSSQAKEESVNKHTSVIQSTGLVSNVKPLSLVNQAKKETYMKLIVPSPDVLKAGNKNTSEESSLLTSELRSKREQYKQAFPSQLKKQESSKSLKKVIAALSNPKATSSSPAHPKQTLENNHPNPFLTNALLGNHQPNGVIQSVIQEAPLALTTKTKMQSKINENIAAASSTPFSSPVNLSTSGRRTPGNQTPVMPSASPILHSQGKEKAVSNNVNPVKTQHHSHPAKSLVEQFRGTDSDIPSSKDSEDSNEDEEEDDEEEDEEDDEDDESDDSQSESDSNSESDTEGSEEEDDDDKDQDESDSDTEGEKTSMKLNKTTSSVKSPSMSLTGHSTPRNLHIAKAPGSAPAALCSESQSPAFLGTSSSTLTSSPHSGTSKRRRVTDERELRIPLEYGWQRETRIRNFGGRLQGEVAYYAPCGKKLRQYPEVIKYLSRNGIMDISRDNFSFSAKIRVGDFYEARDGPQGMQWCLLKEEDVIPRIRAMEGRRGRPPNPDRQRAREESRMRRRKGRPPNVGNAEFLDNADAKLLRKLQAQEIARQAAQIKLLRKLQKQEQARVAKEAKKQQAIMAAEEKRKQKEQIKIMKQQEKIKRIQQIRMEKELRAQQILEAKKKKKEEAANAKLLEAEKRIKEKEMRRQQAVLLKHQERERRRQHMMLMKAMEARKKAEEKERLKQEKRDEKRLNKERKLEQRRLELEMAKELKKPNEDMCLADQKPLPELPRIPGLVLSGSTFSDCLMVVQFLRNFGKVLGFDVNIDVPNLSVLQEGLLNIGDSMGEVQDLLVRLLSAAVCDPGLITGYKAKTALGEHLLNVGVNRDNVSEILQIFMEAHCGQTELTESLKTKAFQAHTPAQKASVLAFLINELACSKSVVSEIDKNIDYMSNLRRDKWVVEGKLRKLRIIHAKKTGKRDTSGGIDLGEEQHPLGTPTPGRKRRRKGGDSDYDDDDDDDSDDQGDEDDEDEEDKEDKKGKKTDICEDEDEGDQAASVEELEKQIEKLSKQQSQYRRKLFDASHSLRSVMFGQDRYRRRYWILPQCGGIFVEGMESGEGLEEIAKEREKLKKAESVQIKEEMFETSGDSLNCSNTDHCEQKEDLKEKDNTNLFLQKPGSFSKLSKLLEVAKMPPESEVMTPKPNAGANGCTLSYQNSGKHSLGSVQSTATQSNVEKADSNNLFNTGSSGPGKFYSPLPNDQLLKTLTEKNRQWFSLLPRTPCDDTSLTHADMSTASLVTPQSQPPSKSPSPTPAPLGSSAQNPVGLNPFALSPLQVKGGVSMMGLQFCGWPTGVVTSNIPFTSSVPSLGSGLGLSEGNGNSFLTSNVASSKSESPVPQNEKATSAQPAAVEVAKPVDFPSPKPIPEEMQFGWWRIIDPEDLKALLKVLHLRGIREKALQKQIQKHLDYITQACLKNKDVAIIELNENEENQVTRDIVENWSVEEQAMEMDLSVLQQVEDLERRVASASLQVKGWMCPEPASEREDLVYFEHKSFTKLCKEHDGEFTGEDESSAHALERKSDNPLDIAVTRLADLERNIERRIEEDIAPGLRVWRRALSEARSAAQVALCIQQLQKSIAWEKSIMKVYCQICRKGDNEELLLLCDGCDKGCHTYCHRPKITTIPDGDWFCPACIAKASGQTLKIKKLHVKGKKTNESKKGKKVTLTGDTEDEDSASTSSSLKRGNKDLKKRKMEENTSINLSKQESFTSVKKPKRDDSKDLALCSMILTEMETHEDAWPFLLPVNLKLVPGYKKVIKKPMDFSTIREKLSSGQYPNLETFALDVRLVFDNCETFNEDDSDIGRAGHNMRKYFEKKWTDTFKVS

SEQ ID NO: 11366 - protein, 607 aa, Homo sapiens
MELVRRLMPLTLLILSCLAELTMAEAEGNASCTVSLGGANMAETHKAMILQLNPSENCTWTIERPENKSIRIIFSYVQLDPDGSCESENIKVFDGTSSNGPLLGQVCSKNDYVPVFESSSSTLTFQIVTDSARIQRTVFVFYYFFSPNISIPNCGGYLDTLEGSFTSPNYPKPHPELAYCVWHIQVEKDYKIKLNFKEIFLEIDKQCKFDFLAIYDGPSTNSGLIGQVCGRVTPTFESSSNSLTVVLSTDYANSYRGFSASYTSIYAENINTTSLTCSSDRMRVIISKSYLEAFNSNGNNLQLKDPTCRPKLSNVVEFSVPLNGCGTIRKVEDQSITYTNIITFSASSTSEVITRQKQLQIIVKCEMGHNSTVEIIYITEDDVIQSQNALGKYNTSMALFESNSFEKTILESPYYVDLNQTLFVQVSLHTSDPNLVVFLDTCRASPTSDFASPTYDLIKSGCSRDETCKVYPLFGHYGRFQFNAFKFLRSMSSVYLQCKVLICDSSDHQSRCNQGCVSRSKRDISSYKWKTDSIIGPIRLKRDRSASGNSGFQHETHAEETPNQPFNSVHLFSFMVLALNVVTVATITVRHFVNQRADYKYQKLQNY

SEQ ID NO: 11367 - protein, 443 aa, Homo sapiens
MRNAIIQGLFYGSLTFGIWTALLFIYLHHNHVSSWQKKSQEPLSAWSPGKKVHQQIIYGSEQIPKPHVIVKRTDEDKAKSMLGTDFNHTNPELHKELLKYGFNVIISRSLGIEREVPDTRSKMCLQKHYPARLPTASIVICFYNEECNALFQTMSSVTNLTPHYFLEEIILVDDMSKVDDLKEKLDYHLETFRGKVKIIRNKKREGLIRARLIGASHASGDVLVFLDSHCEVNRVWLEPLLHAIAKDPKMVVCPLIDVIDDRTLEYKPSPLVRGTFDWNLQFKWDNVFSYEMDGPEGSTKPIRSPAMSGGIFAIRRHYFNEIGQYDKDMDFWGRENLELSLRIWMCGGQLFIIPCSRVGHISKKQTGKPSTIISAMTHNYLRLVHVWLDEYKEQFFLRKPGLKYVTYGNIRERVELRKRLGCKSFQWYLDNVFPELEASVNSL

SEQ ID NO: 11368 - protein, 525 aa, Homo sapiens
MPLLDGDLEGSGKHSSRKVDSPFGPGSPSKGFFSRGPQPRPSSPMSAPVRPKTSPGSPKTVFPFSYQESPPRSPRRMSFSGIFRSSSKESSPNSNPATSPGGIRFFSRSRKTSGLSSSPSTPTQVTKQHTFPLESYKHEPERLENRIYASSSPPDTGQRFCPSSFQSPTRPPLASPTHYAPSKAAALAAALGPAEAGMLEKLEFEDEAVEDSESGVYMRFMRSHKCYDIVPTSSKLVVFDTTLQVKKAFFALVANGVRAAPLWESKKQSFVGMLTITDFINILHRYYKSPMVQIYELEEHKIETWRELYLQETFKPLVNISPDASLFDAVYSLIKNKIHRLPVIDPISGNALYILTHKRILKFLQLFMSDMPKPAFMKQNLDELGIGTYHNIAFIHPDTPIIKALNIFVERRISALPVVDESGKVVDIYSKFDVINLAAEKTYNNLDITVTQALQHRSQYFEGVVKCNKLEILETIVDRIVRAEVHRLVVVNEADSIVGIISLSDILQALILTPAGAKQKETETE

SEQ ID NO: 11369 - protein, 556 aa, Homo sapiens
MRRFVYCKVVLATSLMWVLVDVFLLLYFSECNKCDDKKERSLLPALRAVISRNQEGPGEMGKAVLIPKDDQEKMKELFKINQFNLMASDLIALNRSLPDVRLEGCKTKVYPDELPNTSVVIVFHNEAWSTLLRTVYSVINRSPHYLLSEVILVDDASERDFLKLTLENYVKNLEVPVKIIRMEERSGLIRARLRGAAASKGQVITFLDAHCECTLGWLEPLLARIKEDRKTVVCPIIDVISDDTFEYMAGSDMTYGGFNWKLNFRWYPVPQREMDRRKGDRTLPVRTPTMAGGLFSIDRNYFEEIGTYDAGMDIWGGENLEMSFRIWQCGGSLEIVTCSHVGHVFRKATPYTFPGGTGHVINKNNRRLAEVWMDEFKDFFYIISPGVVKVDYGDVSVRKTLRENLKCKPFSWYLENIYPDSQIPRRYYSLGEIRNVETNQCLDNMGRKENEKVGIFNCHGMGGNQVFSYTADKEIRTDDLCLDVSRLNGPVIMLKCHHMRGNQLWEYDAERLTLRHVNSNQCLDEPSEEDKMVPTMQDCSGSRSQQWLLRNMTLGT

SEQ ID NO: 11370 - protein, 1232 aa, Homo sapiens
MDFLLRPQPEPESLGPGTPGFPEQEEDELHRTLGVERFEEILQEAGSRGGEEPGRSYGEEDFEYHRQSSHHIHHPLSTHLPPDARRRKTPQGPGRKPRRRPGASPTGETPTIEEGEEDEDEASEAEGARALTQPSPVSTPSSVQFFLQEDDSADRKAERTSPSSPAPLPHQEATPRASKGAQAGTQVEEAEAEAVAVASGTAGGDDGGASGRPLPKAQPGHRSYNLQERRRIGSMTGAEQALLPRVPTDEIEAQTLATADLDLMKSHRFEDVPGVRRHLVRKNAKGSTQSGREGREPGPTPRARPRAPHKPHEVFVELNELLLDKNQEPQWRETARWIKFEEDVEEETERWGKPHVASLSFRSLLELRRTLAHGAVLLDLDQQTLPGVAHQVVEQMVISDQIKAEDRANVLRALLLKHSHPSDEKDFSFPRNISAGSLGSLLGHHHGQGAESDPHVTEPLMGGVPETRLEVERERELPPPAPPAGITRSKSKHELKLLEKIPENAEATVVLVGCVEFLSRPTMAFVRLREAVELDAVLEVPVPVRFLFLLLGPSSANMDYHEIGRSISTLMSDKQFHEAAYLADEREDLLTAINAFLDCSVVLPPSEVQGEELLRSVAHFQRQMLKKREEQGRLLPTGAGLEPKSAQDKALLQMVEAAGAAEDDPLRRTGRPFGGLIRDVRRRYPHYLSDFRDALDPQCLAAVIFIYFAALSPAITFGGLLGEKTQDLIGVSELIMSTALQGVVFCLLGAQPLLVIGFSGPLLVFEEAFFSFCSSNHLEYLVGRVWIGFWLVFLALLMVALEGSFLVRFVSRFTQEIFAFLISLIFIYETFYKLVKIFQEHPLHGCSASNSSEVDGGENMTWAGARPTLGPGNRSLAGQSGQGKPRGQPNTALLSLVLMAGTFFIAFFLRKFKNSRFFPGRIRRVIGDFGVPIAILIMVLVDYSIEDTYTQKLSVPSGFSVTAPEKRGWVINPLGEKSPFPVWMMVASLLPAILVFILIFMETQITTLIISKKERMLQKGSGFHLDLLLIVAMGGICALFGLPWLAAATVRSVTHANALTVMSKAVAPGDKPKIQEVKEQRVTGLLVALLVGLSIVIGDLLRQIPLAVLFGIFLYMGVTSLNGIQFYERLHLLLMPPKHHPDVTYVKKVRTLRMHLFTALQLLCLALLWAVMSTAASLAFPFILILTVPLRMVVLTRIFTDREMKCLDANEAEPVFDEREGVDEYNEMPMPV

SEQ ID NO: 11371 - protein, 788 aa, Homo sapiens
MHQLFRLVLGQKDLSRAGDLFSLDDSEIEDSLTEALEQIKIISSSSDYQTNNNDQAVVEICITRITTAIRETESIEKHAKALVGLWDSCLEHNLRPFGKDEDTPHAKIASDIMSCILQNYNRPPVMALAIPIAVKFLHRGNKELCRNMSNYLSLAAITKADLLADHTEVIVKSILQGNTMLLRVLPAVYEKQPQPINRHLTELLALMSQLEQPEQYHLLRLLHVAAKKKQLEVVQKCIPFLIGHLKDSTHNDIILNILIEIAVYEPVALNSFLPMLKEIGERFPYLTGQMARIYGAVGHVDEERARSCLTYLVSQLANMEHSFHHILLLEIKSITDTFSSILGPQSRDIFRMSNSFTAIAKLLTRQLENTKAGSGRRKISTEIEFPEKLEETKLIVTENEDHEKLQVKIQAFEDKINAGSNTPGSIRRYSLGQVSKEERKNIRFNRSKSLAFHTMLTKGVGSDDGEDENRGDIPASISLSEIDPLGQGNDKLPFKTDTERSQLGESSVSYPNIIHIDSENLSETVKENSQEETPETTASPIEYQDKLYLHLKKNLSKVKAYAMEIGKKIPVPDQCTIEDTVRSCVAKLFFTCSLKGHYCLYSKSSFILISQEPQPWIQIMFLFQQDLDQVQLHLEEVRFFDVFGFSETAGAWQCFMCNNPEKATVVNQDGQPLIEGKLKEKQVRWKFIKRWKTRYFTLAGNQLLFQKGKSKDDPDDCPIELSKVQSVKAVAKKRRDRSLPRAFEIFTDNKTYVFKAKDEKNAEEWLQCINVAVAQAKERESREVTTYL

SEQ ID NO: 11372 - protein, 735 aa, Homo sapiens
MHCGLLEEPDMDSTESWIERCLNESENKRYSSHTSLGNVSNDENEEKENNRASKPHSTPATLQWLEENYEIAEGVCIPRSALYMHYLDFCEKNDTQPVNAASFGKIIRQQFPQLTTRRLGTRGQSKYHYYGIAVKESSQYYDVMYSKKGAAWVSETGKKEVSKQTVAYSPRSKLGTLLPEFPNVKDLNLPASLPEEKVSTFIMMYRTHCQRILDTVIRANFDEVQSFLLHFWQGMPPHMLPVLGSSTVVNIVGVCDSILYKAISGVLMPTVLQALPDSLTQVIRKFAKQLDEWLKVALHDLPENLRNIKFELSRRFSQILRRQTSLNHLCQASRTVIHSADITFQMLEDWRNVDLNSITKQTLYTMEDSRDEHRKLITQLYQEFDHLLEEQSPIESYIEWLDTMVDRCVVKVAAKRQGSLKKVAQQFLLMWSCFGTRVIRDMTLHSAPSFGSFHLIHLMFDDYVLYLLESLHCQERANELMRAMKGEGSTAEVREEIILTEAAAPTPSPVPSFSPAKSATSVEVPPPSSPVSNPSPEYTGLSTTGAMQSYTWSLTYTVTTAAGSPAENSQQLPCMRNTHVPSSSVTHRIPVYPHREEHGYTGSYNYGSYGNQHPHPMQSQYPALPHDTAISGPLHYAPYHRSSAQYPFNSPTSRMEPCLMSSTPRLHPTPVTPRWPEVPSANTCYTSPSVHSARYGNSSDMYTPLTTRRNSEYEHMQHFPGFAYINGEASTGWAK

SEQ ID NO: 11373 - protein, 711 aa, Homo sapiens
MATSSMSKGCFVFKPNSKKRKISLPIEDYFNKGKNEPEDSKLRFETYQLIWQQMKSENERLQEELNKNLFDNLIEFLQKSHSGFQKNSRDLGGQIKLREIPTAALVLGVNVTDHDLTFGSLTEALQNNVTPYVVSLQAKDCPDMKHFLQKLISQLMDCCVDIKSKEEESVHVTQRKTHYSMDSLSSWYMTVTQKTDPKMLSKKRTTSSQWQSPPVVVILKDMESFATKVLQDFIIISSQHLHEFPLILIFGIATSPIIIHRLLPHAVSSLLCIELFQSLSCKEHLTTVLDKLLLTTQFPFKINEKVLQVLTNIFLYHDFSVQNFIKGLQLSLLEHFYSQPLSVLCCNLPEAKRRINFLSNNQCENIRRLPSFRRYVEKQASEKQVALLTNERYLKEETQLLLENLHVYHMNYFLVLRCLHKFTSSLPKYPLGRQIRELYCTCLEKNIWDSEEYASVLQLLRMLAKDELMTILEKCFKVFKSYCENHLGSTAKRIEEFLAQFQSLDETKEEEDASGSQPKGLQKTDLYHLQKSLLEMKELRRSKKQTKFEVLRENVVNFIDCLVREYLLPPETQPLHEVVYFSAAHALREHLNAAPRIALHTALNNPYYYLKNEALKSEEGCIPNIAPDICIAYKLHLECSRLINLVDWSEAFATVVTAAEKMDANSATSEEMNEIIHARFIRAVSELELLGFIKPTKQKTDHVARLTWGGC

SEQ ID NO: 11374 - protein, 467 aa, Homo sapiens
MCVSEIEPACCRSRAPSPCELPSDPLLSMKQPIMADGPRCKRRKQANPRRKNVVNYDNVVDTGSETDEEDKLHIAEDDGIANPLDQETSPASVPNHESSPHVSQALLPREEEEDEIREGGVEHPWHNNEILQASVDGPEEMKEDYDTMGPEATIQTAINNGTVKNANCTSDFEEYFAKRKLEERDGHAVSIEEYLQRSDTAIIYPEAPEELSRLGTPEANGQEENDLPPGTPDAFAQLLTCPYCDRGYKRLTSLKEHIKYRHEKNEENFSCPLCSYTFAYRTQLERHMVTHKPGTDQHQMLTQGAGNRKFKCTECGKAFKYKHHLKEHLRIHSGEKPYECPNCKKRFSHSGSYSSHISSKKCIGLISVNGRMRNNIKTGSSPNSVSSSPTNSAITQLRNKLENGKPLSMSEQTGLLKIKTEPLDFNDYKVLMATHGFSGTSPFMNGGLGATSPLGVHPSAQSPMQHL

SEQ ID NO: 11375 - protein, 590 aa, Homo sapiens
MELENIVANTVLLKAREGGGGKRKGKSKKWKEILKFPHISQCEDLRRTIDRDYCSLCDKQPIGRLLFRQFCETRPGLECYIQFLDSVAEYEVTPDEKLGEKGKEIMTKYLTPKSPVFIAQVGQDLVSQTEEKLLQKPCKELFSACAQSVHEYLRGEPFHEYLDSMFFDRFLQWKWLERQPVTKNTFRQYRVLGKGGFGEVCACQVRATGKMYACKRLEKKRIKKRKGESMALNEKQILEKVNSQFVVNLAYAYETKDALCLVLTIMNGGDLKFHIYNMGNPGFEEERALFYAAEILCGLEDLHRENTVYRDLKPENILLDDYGHIRISDLGLAVKIPEGDLIRGRVGTVGYMAPEVLNNQRYGLSPDYWGLGCLIYEMIEGQSPFRGRKEKVKREEVDRRVLETEEVYSHKFSEEAKSICKMLLTKDAKQRLGCQEEGAAEVKRHPFFRNMNFKRLEAGMLDPPFVPDPRAVYCKDVLDIEQFSTVKGVNLDHTDDDFYSKFSTGSVSIPWQNEMIETECFKELNVFGPNGTLPPDLNRNHPPEPPKKGLLQRLFKRQHQNNSKSSPSSKTSFNHHINSNHVSSNSTGSS

SEQ ID NO: 11376 - protein, 410 aa, Homo sapiens
MEAENAGSYSLQQAQAFYTFPFQQLMAEAPNMAVVNEQQMPEEVPAPAPAQEPVQEAPKGRKRKPRTTEPKQPVEPKKPVESKKSGKSAKSKEKQEKITDTFKVKRKVDRFNGVSEAELLTKTLPDILTFNLDIVIIGINPGLMAAYKGHHYPGPGNHFWKCLFMSGLSEVQLNHMDDHTLPGKYGIGFTNMVERTTPGSKDLSSKEFREGGRILVQKLQKYQPRIAVFNGKCIYEIFSKEVFGVKVKNLEFGLQPHKIPDTETLCYVMPSSSARCAQFPRAQDKVHYYIKLKDLRDQLKGIERNMDVQEVQYTFDLQLAQEDAKKMAVKEEKYDPGYEAAYGGAYGENPCSSEPCGFSSNGLIESVELRGESAFSGIPNGQWMTQSFTDQIPSFSNHCGTQEQEEESHA

SEQ ID NO: 11377 - protein, 548 aa, Homo sapiens
MTMAAAAVVARGAGARAATAAALRGGCGTAARGRPCAGPARPLCTAPGTAPDMKRYLWERYREAKRSTEELVPSIMSNLLNPDAIFSNNEMSLSDIEIYGFDYDYTLVFYSKHLHTLIFNAARDLLINEHRYPAEIRKYEYDPNFAIRGLHYDVQRAVLMKIDAFHYIQLGTVYRGLSVVPDEEVIEMYEGSHVPLEQMSDFYGKSSHGNTMKQFMDIFSLPEMTLLSCVNEYFLKNNIDYEPVHLYKDVKDSIRDVHIKGIMYRAIEADIEKYICYAEQTRAVLAKLADHGKKMFLITNSPSSFVDKGMSYIVGKDWRDLFDVVIVQAEKPNFFNDKRRPFRKMNEKGVLLWDKIHKLQKGQIYKQGNLYEFLKLTGWRGSRVLYFGDHIYSDLADLTLKHGWRTGAIIPELRSELKIMNTEQYIQTMTWLQTLTGLLEQMQVHRDAESQLVLQEWKKERKEMREMTKSFFNAQFGSLFRTDQNPTYFLRRLSRFADIYMASLSCLLNYDVSHTFYPRRTPLQHELPAWSERPPTFGTPLLQEAQAK

SEQ ID NO: 11378 - protein, 78 aa, Homo sapiens
MIGFLTEDKKKWNLGSNAKDPRGMYQCKGSQNKSKPLQVYYRTSDKQTLLPNDQLYQPLKDREDDQYSHLQGNQLRRN

SEQ ID NO: 11379 - protein, 415 aa, Homo sapiens
MTKNDPFKARVSSGYVPPPVATPFSSKSSTKPAAGGTAPLPPWKSPSSSQPLPQVPAPAQSQTQFHVQPQPQPKPQVQLHVQSQTQPVSLANTQPRGPPASSPAPAPKFSPVTPKFTPVASKFSPGAPGGSGSQPNQKLGHPEALSAGTGSPQPPSFTYAQQREKPRVQEKQHPVPPPAQNQNQVRSPGAPGPLTLKEVEELEQLTQQLMQDMEHPQRQNVAVNELCGRCHQPLARAQPAVRALGQLFHIACFTCHQCAQQLQGQQFYSLEGAPYCEGCYTDTLEKCNTCGEPITDRMLRATGKAYHPHCFTCVVCARPLEGTSFIVDQANRPHCVPDYHKQYAPRCSVCSEPIMPEPGRDETVRVVALDKNFHMKCYKCEDCGKPLSIEADDNGCFPLDGHVLCRKCHTARAQT

SEQ ID NO: 11380 - protein, 498 aa, Homo sapiens
MDVTDHYEDVRKIYDDFLKNSNMLDLIDVYQKCRALTSNCENYNTVSPSQLLDFLSGKQYAVGDETDLSIPTSPTSKYNRDNEKVQLLARKIIFSYLNLLVNSKNDLAVAYILNIPDRGLGREAFTDLKHAAREKQMSIFLVATSFIRTIELGGKGYAPPPSDPLRTHVKGLSNFINFIDKLDEILGEIPNPSIAGGQILSVIKMQLIKGQNSRDPFCKAIEEVAQDLDLRIKNIINSQEGVVALSTTDISPARPKSHAINHGTAYCGRDTVKALLVLLDEEAANAPTKNKAELLYDEENTIHHHGTSILTLFRSPTQVNNSIKPLRERICVSMQEKKIKMKQTLIRSQFACTYKDDYMISKDNWNNVNLASKPLCVLYMENDLSEGVNPSVGRSTIGTSFGNVHLDRSKNEKVSRKSTSQTGNKSSKRKQVDLDGENILCDNRNEPPQHKNAKIPKKSNDSQNRLYGKLAKVAKSNKCTAKDKLISGQAKLTQFFRL

SEQ ID NO: 11381 - protein, 1139 aa, Homo sapiens
MPEPTKKEDEEEVSPPSALPPDWTLVETPPGEEQAKQNANSQLSILFIEKPQGGTVKVGEDITFIAKVKAEDLLRKPTIKWFKGKWMDLASKAGKHLQLKETFERHSRVYTFEMQIIKAKDNFAGNYRCEVTYKDKFDSCSFDLEVHESTGTTPNIDIRSAFKRSGEGQEDAGELDFSGLLKRREVKQQEEEPQVDVWELLKNAKPSEYEKIAFQYGITDLRGMLKRLKRMRREEKKSAAFAKILDPAYQVDKGGRVRFVVELADPKLEVKWYKNGQEIRPSTKYIFEHKGCQRILFINNCQMTDDSEYYVTAGDEKCSTELFVREPPIMVTKQLEDTTAYCGERVELECEVSEDDANVKWFKNGEEIIPGPKSRYRIRVEGKKHILIIEGATKADAAEYSVMTTGGQSSAKLSVDLKPLKILTPLTDQTVNLGKEICLKCEISENIPGKWTKNGLPVQESDRLKVVHKGRIHKLVIANALTEDEGDYVFAPDAYNVTLPAKVHVIDPPKIILDGLDADNTVTVIAGNKLRLEIPISGEPPPKAMWSRGDKAIMEGSGRIRTESYPDSSTLVIDIAERDDSGVYHINLKNEAGEAHASIKVKVVDFPDPPVAPTVTEVGDDWCIMNWEPPAYDGGSPILGYFIERKKKQSSRWMRLNFDLCKETTFEPKKMIEGVAYEVRIFAVNAIGISKPSMPSRPFVPLAVTSPPTLLTVDSVTDTTVTMRWRPPDHIGAAGLDGYVLEYCFEGTEDWIVANKDLIDKTKFTITGLPTDAKIFVRVKAVNAAGASEPKYYSQPILVKEIIEPPKIRIPRHLKQTYIRRVGEAVNLVIPFQGKPRPELTWKKDGAEIDKNQINIRNSETDTIIFIRKAERSHSGKYDLQVKVDKFVETASIDIQIIDRPGPPQIVKIEDVWGENVALTWTPPKDDGNAAITGYTIQKADKKSMEWFTVIEHYHRTSATITELVIGNEYYFRVFSENMCGLSEDATMTKESAVIARDGKIYKNPVYEDFDFSEAPMFTQPLVNTYAIAGYNATLNCSVRGNPKPKITWMKNKVAIVDDPRYRMFSNQGVCTLEIRKPSPYDGGTYCCKAVNDLGTVEIECKLEVKGGLSFCRLLLQGVPPNIIDSYLRDLHSSNPEEY

SEQ ID NO: 11382 - protein, 455 aa, Homo sapiens
MFTEGEEMYLQGSTVWHPDCKQSTKTEEKLRLPNIRRSSSDFFYSKSLIRRTGRSPSLQPTRTSSESIYSRPGSSIPGSPGHTIYAKVDNEILDYKDLAAIPKVKAIYDIERPDLITYEPFYTSGYDDKQERQSLGESPRTLSPTPSAEGYQDVRDRMIHRSTSQGSINSPVYSRHSYTPTTSRSPQHFHRPDQGINIYRKPPIYKQHAALAAQSKSSEDIIKFSKFPAAQAPDPSETPKIETDHWPGPPSFAVVGPDMKRRSSGREEDDEELLRRRQLQEEQLMKLNSGLGQLILKEEMEKESRERSSLLASRYDSPINSASHIPSSKTASLPGYGRNGLHRPVSTDFAQYNSYGDVSGGVRDYQTLPDGHMPAMRMDRGVSMPNMLEPKIFPYEMLMVTNRGRNKILREVDRTRLERHLAPEVFREIFGMSIQEFDRLPLWRRNDMKKKAKLF

SEQ ID NO: 11383 - protein, 694 aa, Homo sapiens
EGGQGPRGLGTVPWLRDLPGSENHMPWEEPAGEKPSCSHSQKAFHMEPAQKPCFTTDMVTWALLCISAETVRGEAPSQPRGIPHRSPVSVDDLWLEKTQRKKLQKQAHVERRLHIGAVHKDGVKCWRKTIITSPESLNLPRRSHPLSQSAPTGLNHMGWPEHTPGTAMPDGALDTAVCADEVGSEEDLYDDLHSSSHHYSHPGGGGEQLAINELISDGSVVCAEALWDHVTMDDQELGFKAGDVIEVMDATNREWWWGRVADGEGWFPASFVRLRVNQDEPADDDAPLAGNSGAEDGGAEAQSSKDQMRTNVINEILSTERDYIKHLRDICEGYVRQCRKRADMFSEEQLRTIFGNIEDIYRCQKAFVKALEQRFNRERPHLSELGACFLEHQADFQIYSEYCNNHPNACVELSRLTKLSKYVYFFEACRLLQKMIDISLDGFLLTPVQKICKYPLQLAELLKYTHPQHRDFKDVEAALHAMKNVAQLINERKRRLENIDKIAQWQSSIEDWEGEDLLVRSSELIYSGELTRVTQPQAKSQQRMFFLFDHQLIYCKKDLLRRDVLYYKGRLDMDGLEVVDLEDGKDRDLHVSIKNAFRLHRGATGDSHLLCTRKPEQKQRWLKAFAREREQVQLDQETGFSITELQRKQAMLNASKQQVTGKPKGRRTAAPPPRLPGPYPADIIPFSEPQSQAS

SEQ ID NO: 11384 - protein, 379 aa, Homo sapiens
MGGRVFLVFLAFCVWLTLPGAETQDSRGCARWCPQDSSCVNATACRCNPGFSSFSEIITTPMETCDDINECATLSKVSCGKFSDCWNTEGSYDCVCSPGYEPVSGAKTFKNESENTCQDVDECQQNPRLCKSYGTCVNTLGSYTCQCLPGFKLKPEDPKLCTDVDECSSGQHQCDSSTVCFNTVGSYSCRCRPGWKPRHGIPNNQKDTVCEDMTFSTWTPPPGVHSQTLSRFFDKVQDLGRDYKPGLANNTIQSILQALDELLEAPGDLETLPRLQQHCVASHLLDGLEDVLRGLSKNLSNGLLNFSYPAGTELSLEVQKQVDRSVTLRQNQAVMQLDWNQAQKSGDPGGGSRADCHHLHGAERLSAVPPPGGPHFSPV

SEQ ID NO: 11385 - protein, 765 aa, Homo sapiens
MGGRVFLVFLAFCVWLTLPGAETQDSRGCARWCPQDSSCVNATACRCNPGFSSFSEIITTPMETCDDINECATLSKVSCGKFSDCWNTEGSYDCVCSPGYEPVSGAKTFKNESENTCQDVDECQQNPRLCKSYGTCVNTLGSYTCQCLPGFKLKPEDPKLCTDVNECTSGQNPCHSSTHCLNNVGSYQCRCRPGWQPIPGSPNGPNNTVCEDVDECSSGQHQCDSSTVCFNTVGSYSCRCRPGWKPRHGIPNNQKDTVCEDMTFSTWTPPPGVHSQTLSRFFDKVQDLGRDYKPGLANNTIQSILQALDELLEAPGDLETLPRLQQHCVASHLLDGLEDVLRGLSKNLSNGLLNFSYPAGTELSLEVQKQVDRSVTLRQNQAVMQLDWNQAQKSGDPGPSVVGLVSIPGMGKLLAEAPLVLEPEKQMLLHETHQGLLQDGSPILLSDVISAFLSNNDTQNLSSPVTFTFSHREEDPVLTVITYMGLSVSLLCLLLAALTFLLCKAIQNTSTSLHLQLSLCLFLAHLLFLVAIDQTGHKVLCSIIAGTLHYLYLATLTWMLLEALYLFLTARNLTVVNYSSINRFMKKLMFPVGYGVPAVTVAISAASRPHLYGTPSRCWLQPEKGFIWGFLGPVCAIFSVNLVLFLVTLWILKNRLSSLNSEVSTLRNTRMLAFKATAQLFILGCTWCLGILQVGPAARVMAYLFTIINSLQGVFIFLVYCLLSQQVREQYGKWSKGIRKLKTESEMHTLSSSAKADTSKPSTVN

SEQ ID NO: 11386 - protein, 955 aa, Homo sapiens
MEASSSGITNGKTKVFHPEGGVDLQGYQLDMQILPDGPKSDVDFSEILNAIQEMAKDVNILFDELEAVSSPCKDDDSLLHPGNLTSTSDDASRLEAGGETVPERNKSNGLYFRDGKCRIDYILVYRKSNPQTEKREVFERNIRAEGLQMEKESSLINSDIIFVKLHAPWEVLGRYAEQMNVRMPFRRKIYYLPRRYKFMSRIDKQISRFRRWLPKKPMRLDKETLPDLEENDCYTAPFSQQRIHHFIIHNKETFFNNATRSRIVHHILQRIKYEEGKNKIGLNRLLTNGSYEAAFPLHEGSYRSKNSIRTHGAENHRHLLYECWASWGVWYKYQPLDLVRRYFGEKIGLYFAWLGWYTGMLFPAAFIGLFVFLYGVTTLDHSQVSKEVCQATDIIMCPVCDKYCPFMRLSDSCVYAKVTHLFDNGATVFFAVFMAVWATVFLEFWKRRRAVIAYDWDLIDWEEEEEEIRPQFEAKYSKKERMNPISGKPEPYQAFTDKCSRLIVSASGIFFMICVVIAAVFGIVIYRVVTVSTFAAFKWALIRNNSQVATTGTAVCINFCIIMLLNVLYEKVALLLTNLEQPRTESEWENSFTLKMFLFQFVNLNSSTFYIAFFLGRFTGHPGAYLRLINRWRLEECHPSGCLIDLCMQMGIIMVLKQTWNNFMELGYPLIQNWWTRRKVRQEHGPERKISFPQWEKDYNLQPMNAYGLFDEYLEMILQFGFTTIFVAAFPLAPLLALLNNIIEIRLDAYKFVTQWRRPLASRAKDIGIWYGILEGIGILSVITNAFVIAITSDFIPRLVYAYKYGPCAGQGEAGQKCMVGYVNASLSVFRISDFENRSEPESDGSEFSGTPLKYCRYRDYRDPPHSLVPYGYTLQFWHVLAARLAFIIVFEHLVFCIKHLISYLIPDLPKDLRDRMRREKYLIQEMMYEAELERLQKERKERKKNGKAHHNEWP

SEQ ID NO: 11387 - protein, 920 aa, Homo sapiens
MEASSSGITNGKTKVFHPVAKDVNILFDELEAVSSPCKDDDSLLHPGNLTSTSDDASRLEAGGETVPERNKSNGLYFRDGKCRIDYILVYRKSNPQTEKREVFERNIRAEGLQMEKESSLINSDIIFVKLHAPWEVLGRYAEQMNVRMPFRRKIYYLPRRYKFMSRIDKQISRFRRWLPKKPMRLDKETLPDLEENDCYTAPFSQQRIHHFIIHNKETFFNNATRSRIVHHILQRIKYEEGKNKIGLNRLLTNGSYEAAFPLHEGSYRSKNSIRTHGAENHRHLLYECWASWGVWYKYQPLDLVRRYFGEKIGLYFAWLGWYTGMLFPAAFIGLFVFLYGVTTLDHSQVSKEVCQATDIIMCPVCDKYCPFMRLSDSCVYAKVTHLFDNGATVFFAVFMAVWATVFLEFWKRRRAVIAYDWDLIDWEEEEEEIRPQFEAKYSKKERMNPISGKPEPYQAFTDKCSRLIVSASGIFFMICVVIAAVFGIVIYRVVTVSTFAAFKWALIRNNSQVATTGTAVCINFCIIMLLNVLYEKVALLLTNLEQPRTESEWENSFTLKMFLFQFVNLNSSTFYIAFFLGRFTGHPGAYLRLINRWRLEECHPSGCLIDLCMQMGIIMVLKQTWNNFMELGYPLIQNWWTRRKVRQEHGPERKISFPQWEKDYNLQPMNAYGLFDEYLEMILQFGFTTIFVAAFPLAPLLALLNNIIEIRLDAYKFVTQWRRPLASRAKDIGIWYGILEGIGILSVITNAFVIAITSDFIPRLVYAYKYGPCAGQGEAGQKCMVGYVNASLSVFRISDFENRSEPESDGSEFSGTPLKYCRYRDYRDPPHSLVPYGYTLQFWHVLAARLAFIIVFEHLVFCIKHLISYLIPDLPKDLRDRMRREKYLIQEMMYEAELERLQKERKERKKNGKAHHNEWP

SEQ ID NO: 11388 - protein, 1694 aa, Homo sapiens
MGVPKFYRWISERYPCLSEVVKEHQIPEFDNLYLDMNGIIHQCSHPNDDDVHFRISDDKIFTDIFHYLEVLFRIIKPRKVFFMAVDGVAPRAKMNQQRGRRFRSAKEAEDKIKKAIEKGETLPTEARFDSNCITPGTEFMARLHEHLKYFVNMKISTDKSWQGVTIYFSGHETPGEGEHKIMEFIRSEKAKPDHDPNTRHCLYGLDADLIMLGLTSHEAHFSLLREEVRFGGKKTQRVCAPEETTFHLLHLSLMREYIDYEFSVLKEKITFKYDIERIIDDWILMGFLVGNDFIPHLPHLHINHDALPLLYGTYVTILPELGGYINESGHLNLPRFEKYLVKLSDFDREHFSEVFVDLKWFESKVGNKYLNEAAGVAAEEARNYKEKKKLKGQENSLCWTALDKNEGEMITSKDNLEDETEDDDLFETEFRQYKRTYYMTKMGVDVVSDDFLADQAACYVQAIQWILHYYYHGVQSWSWYYPYHYAPFLSDIHNISTLKIHFELGKPFKPFEQLLAVLPAASKNLLPACYQHLMTNEDSPIIEYYPPDFKTDLNGKQQEWEAVVLIPFIDEKRLLEAMETCNHSLKKEERKRNQHSECLMCWYDRDTEFIYPSPWPEKFPAIERCCTRYKIISLDAWRVDINKNKITRIDQKALYFCGFPTLKHIRHKFFLKKSGVQVFQQSSRGENMMLEILVDAESDELTVENVASSVLGKSVFVNWPHLEEARVVAVSDGETKFYLEEPPGTQKLYSGRTAPPSKVVHLGDKEQSNWAKEVQGISEHYLRRKGIIINETSAVVYAQLLTGRKYQINQNGEVRLEKQWSKQVVPFVYQTIVKDIRAFDSRFSNIKTLDDLFPLRSMVFMLGTPYYGCTGEVQDSGDVITEGRIRVIFSIPCEPNLDALIQNQHKYSIKYNPGYVLASRLGVSGYLVSRFTGSIFIGRGSRRNPHGDHKANVGLNLKFNKKNEEVPGYTKKVGSEWMYSSAAEQLLAEYLERAPELFSYIAKNSQEDVFYEDDIWPGENENGAEKVQEIITWLKGHPVSTLSRSSCDLQILDAAIVEKIEEEVEKCKQRKNNKKVRVTVKPHLLYRPLEQQHGVIPDRDAEFCLFDRVVNVRENFSVPVGLRGTIIGIKGANREADVLFEVLFDEEFPGGLTIRCSPGRGYRLPTSALVNLSHGSRSETGNQKLTAIVKPQPAVHQHSSSSSVSSGHLGALNHSPQSLFVPTQVPTKDDDEFCNIWQSLQGSGKMQYFQPTIQEKGAVLPQEISQVNQHHKSGFNDNSVKYQQRKHDPHRKFKEECKSPKAECWSQKMSNKQPNSGIENFLASLNISKENEVQSSHHGEPPSEEHLSPQSFAMKGTRMLKEILKIDGSNTVDHKNEIKQIANEIPVSSNRRDEYGLPSQPKQNKKLASYMNKPHSANEYHNVQSMDNMCWPAPSQIPPVSTPVTELSRICSLVGMPQPDFSFLRMPQTMTVCQVKLSNGLLVHGPQCHSENEAKEKAALFALQQLGSLGMNFPLPSQVFANYPSAVPPGTIPPAFPPPTANIMPSSSHLFGSMPWGPSVPVPGKPFHHTLYSGTMPMAGGIPGGVHNQFIPLQVTKKRVANKKNFENKEAQSSQATPVQTSQPDSSNIVKVSPRESSSASLKSSPIAQPASSFQVETASQGHSISHHKSTPISSSRRKSRKLAVNFGVSKPSE

SEQ ID NO: 11389 - protein, 755 aa, Homo sapiens
MPPFLLLEAVCVFLFSRVPPSLPLQEVHVSKETIGKISAASKMMWCSAAVDIMFLLDGSNSVGKGSFERSKHFAITVCDGLDISPERVRVGAFQFSSTPHLEFPLDSFSTQQEVKARIKRMVFKGGRTETELALKYLLHRGLPGGRNASVPQILIIVTDGKSQGDVALPSKQLKERGVTVFAVGVRFPRWEELHALASEPRGQHVLLAEQVEDATNGLFSTLSSSAICSSATPDCRVEAHPCEHRTLEMVREFAGNAPCWRGSRRTLAVLAAHCPFYSWKRVFLTHPATCYRTTCPGPCDSQPCQNGGTCVPEGLDGYQCLCPLAFGGEANCALKLSLECRVDLLFLLDSSAGTTLDGFLRAKVFVKRFVRAVLSEDSRARVGVATYSRELLVAVPVGEYQDVPDLVWSLDGIPFRGGPTLTGSALRQAAERGFGSATRTGQDRPRRVVVLLTESHSEDEVAGPARHARARELLLLGVGSEAVRAELEEITGSPKHVMVYSDPQDLFNQIPELQGKLCSRQRPGCRTQALDLVFMLDTSASVGPENFAQMQSFVRSCALQFEVNPDVTQVGLVVYGSQVQTAFGLDTKPTRAAMLRAISQAPYLGGVGSAGTALLHIYDKVMTVQRGARPGVPKAVVVLTGGRGAEDAAVPAQKLRNNGISVLVVGVGPVLSEGLRRLAGPRDSLIHVAAYADLRYHQDVLIEWLCGEAKQPVNLCKPSPCMNEGSCVLQNGSYRCKCRDGWEGPHCENRFLRRP

SEQ ID NO: 11390 - protein, 476 aa, Homo sapiens
MGSKMNLIEHSHLPTTDEFSFSENLFGVLTEQVAGPLGQNLEVEPYSQYSNVQFPQVQPQISSSSYYSNLGFYPQQPEEWYSPGIYELRRMPAETLYQGETEVAEMPVTKKPRMGASAGRIKGDELCVVCGDRASGYHYNALTCEGCKGFFRRSITKNAVYKCKNGGNCVMDMYMRRKCQECRLRKCKEMGMLAECMYTGLLTEIQCKSKRLRKNVKQHADQTVNEDSEGRDLRQVTSTTKSCREKTELTPDQQTLLHFIMDSYNKQRMPQEITNKILKEEFSAEENFLILTEMATNHVQVLVEFTKKLPGFQTLDHEDQIALLKGSAVEAMFLRSAEIFNKKLPSGHSDLLEERIRNSGISDEYITPMFSFYKSIGELKMTQEEYALLTAIVILSPDRQYIKDREAVEKLQEPLLDVLQKLCKIHQPENPQHFACLLGRLTELRTFNHHHAEMLMSWRVNDHKFTPLLCEIWDVQ

SEQ ID NO: 11391 - protein, 539 aa, Homo sapiens
MPFKAFDTFKEKILKPGKEGVKNAVGDSLGILQRKIDGTTEEEDNIELNEEGRPVQTSRPSPPLCDCHCCGLPKRYIIAIMSGLGFCISFGIRCNLGVAIVEMVNNSTVYVDGKPEIQTAQFNWDPETVGLIHGSFFWGYIMTQIPGGFISNKFAANRVFGAAIFLTSTLNMFIPSAARVHYGCVMCVRILQGLVEGVTYPACHGMWSKWAPPLERSRLATTSFCGSYAGAVVAMPLAGVLVQYIGWSSVFYIYGMFGIIWYMFWLLQAYECPAAHPTISNEEKTYIETSIGEGANVVSLSVGLLSAVPHMVMTIVVPIGGQLADYLRSRQILTTTAVRKIMNCGGFGMEATLLLVVGFSHTKGVAISFLVLAVGFSGFAISGFNVNHLDIAPRYASILMGISNGVGTLSGMVCPLIVGAMTRHKTREEWQNVFLIAALVHYSGVIFYGVFASGEKQEWADPENLSEEKCGIIDQDELAEEIELNHESFASPKKKMSYGATSQNCEVQKKEWKGQRGATLDEEELTSYQNEERNFSTIS

SEQ ID NO: 11392 - protein, 724 aa, Homo sapiens
MPFPVTTQGSQQTQPPQKHYGITSPISLAAPKETDCVLTQKLIETLKPFGVFEEEEELQRRILILGKLNNLVKEWIREISESKNLPQSVIENVGGKIFTFGSYRLGVHTKGADIDALCVAPRHVDRSDFFTSFYDKLKLQEEVKDLRAVEEAFVPVIKLCFDGIEIDILFARLALQTIPEDLDLRDDSLLKNLDIRCIRSLNGCRVTDEILHLVPNIDNFRLTLRAIKLWAKRHNIYSNILGFLGGVSWAMLVARTCQLYPNAIASTLVHKFFLVFSKWEWPNPVLLKQPEECNLNLPVWDPRVNPSDRYHLMPIITPAYPQQNSTYNVSVSTRMVMVEEFKQGLAITDEILLSKAEWSKLFEAPNFFQKYKHYIVLLASAPTEKQRLEWVGLVESKIRILVGSLEKNEFITLAHVNPQSFPAPKENPDKEEFRTMWVIGLVFKKTENSENLSVDLTYDIQSFTDTVYRQAINSKMFEVDMKIAAMHVKRKQLHQLLPNHVLQKKKKHSTEGVKLTALNDSSLDLSMDSDNSMSVPSPTSATKTSPLNSSGSSQGRNSPAPAVTAASVTNIQATEVSVPQVNSSESSGGTSSESIPQTATQPAISPPPKPTVSRVVSSTRLVNPPPRSSGNAATSGNAATKIPTPIVGVKRTSSPHKEESPKKTKTEEEQLDTETSTTQSETIQTAASLLASQKTSSTDLSDIPALPANPIPVIKNSIKLRLNR

SEQ ID NO: 11393 - protein, 1177 aa, Homo sapiens
MRSRNQGGESASDGHISCPKPSIIGNAGEKSLSEDAKKKKKSNRKEDDVMASGTVKRHLKTSGECERKTKKSLELSKEDLIQLLSIMEGELQAREDVIHMLKTEKTKPEVLEAHYGSAEPEKVLRVLHRDAILAQEKSIGEDVYEKPISELDRLEEKQKETYRRMLEQLLLAEKCHRRTVYELENEKHKHTDYMNKSDDFTNLLEQERERLKKLLEQEKAYQARKEKENAKRLNKLRDELVKLKSFALMLVDERQMHIEQLGLQSQKVQDLTQKLREEEEKLKAITSKSKEDRQKLLKLEVDFEHKASRFSQEHEEMNAKLANQESHNRQLRLKLVGLTQRIEELEETNKNLQKAEEELQELRDKIAKGECGNSSLMAEVENLRKRVLEMEGKDEEITKTESQCRELRKKLQEEEHHSKELRLEVEKLQKRMSELEKLEEAFSKSKSECTQLHLNLEKEKNLTKDLLNELEVVKSRVKELECSESRLEKAELSLKDDLTKLKSFTVMLVDERKNMMEKIKQEERKVDGLNKNFKVEQGKVMDVTEKLIEESKKLLKLKSEMEEKVYNLTRERDELIGKLKSEEEKSSELSCSVDLLKKRLDGIEEVEREITRGRSRKGSELTCPEDNKIKELTLEIERLKKRLQQLEVVEGDLMKTEDEYDQLEQKFRTEQDKANFLSQQLEEIKHQIAKNKAIEKGEVVSQEAELRHRFRLEEAKSRDLKAEVQALKEKIHELMNKEDQLSQLQVDYSVLQQRFMEEENKNKNMGQEVLNLTKELELSKRYSRALRPSVNGRRMVDVPVTSTGVQTDAVSGEAAEEETPAVFIRKSFQEENHIMSNLRQVGLKKPVERSSVLDRYPPAANELTMRKSWIPWMRKRENGPSITQEKGPRTNSSPGHPGEVVLSPKQGQPLHIRVTPDHENSTATLEITSPTSEEFFSSTTVIPTLGNQKPRITIIPSPNVMPQKQKSGDTTLGPERAMSPVTITTFSREKTPESGRGAFADRPTSPIQIMTVSTSAAPAEIAVSPESQEMPMGRTILKVTPEKQTVPTPVRKYNSNANIITTEDNKIHIHLGSQFKRSPGTSGEGVSPVITVRPVNVTAEKEVSTGTVLRSPRNHLSSRPGASKVTSTITITPVTTSSARGTQSVSGQDGSSQRPTPTRIPMSKESIIIHQLRMNSR

SEQ ID NO: 11394 - protein, 257 aa, Homo sapiens
MATEIGSPPRFFHMPRFQHQAPRQLFYKRPDFAQQQAMQQLTFDGKRMRKAVNRKTIDYNPSVIKYLENRIWQRDQRDMRAIQPDAGYYNDLVPPIGMLNNPMNAVTTKFVRTSTNKVKCPVFVVRWTPEGRRLVTGASSGEFTLWNGLTFNFETILQAHDSPVRAMTWSHNDMWMLTADHGGYVKYWQSNMNNVKMFQAHKEAIREASFSPTDNKFATCSDDGTVRIWDFLRCHEERILRDTCFHHCRCYFLSVKR

SEQ ID NO: 11395 - protein, 669 aa, Homo sapiens
MDADKEKDLQKFLKNVDEISNLIQEMNSDDPVVQQKAVLETEKRLLLMEEDQEEDECRTTLNKTMISPPQTAMKSAEEINSEAFLASVEKDAKERAKRRRENKVLADALKEKGNEAFAEGNYETAILRYSEGLEKLKDMKVLYTNRAQAYMKLEDYEKALVDCEWALKCDEKCTKAYFHMGKANLALKNYSVSRECYKKILEINPKLQTQVKGYLNQVDLQEKADLQEKEAHELLDSGKNTAVTTKNLLETLSKPDQIPLFYAGGIEILTEMINECTEQTLFRMHNGFSIISDNEVIRRCFSTAGNDAVEEMVCVSVLKLWQAVCSRNEENQRVLVIHHDRARLLAALLSSKVLAIRQQSFALLLHLAQTESGRSLIINHLDLTRLLEALVSFLDFSDKEANTAMGLFTDLALEERFQVWFQANLPGVLPALTGVLKTDPKVSSSSALCQCIAIMGNLSAEPTTRRHMAACEEFGDGCLSLLARCEEDVDLFREVIYTLLGLMMNLCLQAPFVSEVWAVEVSRRCLSLLNSQDGGILTRAAGVLSRTLSSSLKIVEEALRAGVVKKMMKFLKTGGETASRYAIKILAICTNSYHEAREEVIRLDKRAPTPPLETRLVPGNQSLLVQQAEELGFSILKRMWPGWNSITILKPQQRWQNSLGPHPSGCVYQ

SEQ ID NO: 11396 - protein, 1639 aa, Homo sapiens
MAQILPIRFQEHLQLQNLGINPANIGFSTLTMESDKFICIREKVGEQAQVVIIDMNDPSNPIRRPISADSAIMNPASKVIALKAGKTLQIFNIEMKSKMKAHTMTDDVTFWKWISLNTVALVTDNAVYHWSMEGESQPVKMFDRHSSLAGCQIINYRTDAKQKWLLLTGISAQQNRVVGAMQLYSVDRKVSQPIEGHAASFAQFKMEGNAEESTLFCFAVRGQAGGKLHIIEVGTPPTGNQPFPKKAVDVFFPPEAQNDFPVAMQISEKHDVVFLITKYGYIHLYDLETGTCIYMNRISGETIFVTAPHEATAGIIGVNRKGQVLSVCVEEENIIPYITNVLQNPDLALRMAVRNNLAGAEELFARKFNALFAQGNYSEAAKVAANAPKGILRTPDTIRRFQSVPAQPGQTSPLLQYFGILLDQGQLNKYESLELCRPVLQQGRKQLLEKWLKEDKLECSEELGDLVKSVDPTLALSVYLRANVPNKVIQCFAETGQVQKIVLYAKKVGYTPDWIFLLRNVMRISPDQGQQFAQMLVQDEEPLADITQIVDVFMEYNLIQQCTAFLLDALKNNRPSEGPLQTRLLEMNLMHAPQVADAILGNQMFTHYDRAHIAQLCEKAGLLQRALEHFTDLYDIKRAVVHTHLLNPEWLVNYFGSLSVEDSLECLRAMLSANIRQNLQICVQVASKYHEQLSTQSLIELFESFKSFEGLFYFLGSIVNFSQDPDVHFKYIQAACKTGQIKEVERICRESNCYDPERVKNFLKEAKLTDQLPLIIVCDRFDFVHDLVLYLYRNNLQKYIEIYVQKVNPSRLPVVIGGLLDVDCSEDVIKNLILVVRGQFSTDELVAEVEKRNRLKLLLPWLEARIHEGCEEPATHNALAKIYIDSNNNPERFLRENPYYDSRVVGKYCEKRDPHLACVAYERGQCDLELINVCNENSLFKSLSRYLVRRKDPELWGSVLLESNPYRRPLIDQVVQTALSETQDPEEVSVTVKAFMTADLPNELIELLEKIVLDNSVFSEHRNLQNLLILTAIKADRTRVMEYINRLDNYDAPDIANIAISNELFEEAFAIFRKFDVNTSAVQVLIEHIGNLDRAYEFAERCNEPAVWSQLAKAQLQKGMVKEAIDSYIKADDPSSYMEVVQAANTSGNWEELVKYLQMARKKARESYVETELIFALAKTNRLAELEEFINGPNNAHIQQVGDRCYDEKMYDAAKLLYNNVSNFGRLASTLVHLGEYQAAVDGARKANSTRTWKEVCFACVDGKEFRLAQMCGLHIVVHADELEELINYYQDRGYFEELITMLEAALGLERAHMGMFTELAILYSKFKPQKMREHLELFWSRVNIPKVLRAAEQAHLWAELVFLYDKYEEYDNAIITMMNHPTDAWKEGQFKDIITKVANVELYYRAIQFYLEFKPLLLNDLLMVLSPRLDHTRAVNYFSKVKQLPLVKPYLRSVQNHNNKSVNESLNNLFITEEDYQALRTSIDAYDNFDNISLAQRLEKHELIEFRRIAAYLFKGNNRWKQSVELCKKDSLYKDAMQYASESKDTELAEELLQWFLQEEKRECFGACLFTCYDLLRPDVVLETAWRHNIMDFAMPYFIQVMKEYLTKVDKLDASESLRKEEEQATETQPIVYGNLSL

SEQ ID NO: 11397 - protein, 628 aa, Homo sapiens
MAELGELKHMVMSFRVSELQVLLGFAGRNKSGRKHELLAKALHLLKSSCAPSVQMKIKELYRRRFPRKTLGPSDLSLLSLPPGTSPVGSPGPLAPIPPTLLAPGTLLGPKREVDMHPPLPQPVHPDVTMKPLPFYEVYGELIRPTTLASTSSQRFEEAHFTFALTPQQVQQILTSREVLPGAKCDYTIQVQLRFCLCETSCPQEDYFPPNLFVKVNGKLCPLPGYLPPTKNGAEPKRPSRPINITPLARLSATVPNTIVVNWSSEFGRNYSLSVYLVRQLTAGTLLQKLRAKGIRNPDHSRALIKEKLTADPDSEVATTSLRVSLMCPLGKMRLTVPCRALTCAHLQSFDAALYLQMNEKKPTWTCPVCDKKAPYESLIIDGLFMEILSSCSDCDEIQFMEDGSWCPMKPKKEASEVCPPPGYGLDGLQYSPVQGGDPSENKKKVEVIDLTIESSSDEEDLPPTKKHCSVTSAAIPALPGSKGVLTSGHQPSSVLRSPAMGTLGGDFLSSLPLHEYPPAFPLGADIQGLDLFSFLQTESQHYGPSVITSLDEQDALGHFFQYRGTPSHFLGPLAPTLGSSHCSATPAPPPGRVSSIVAPGGALREGHGGPLPSGPSLTGCRSDIISLD

SEQ ID NO: 11398 - protein, 617 aa, Homo sapiens
MPALSRWASLPGPSMREAAFMYSTAVAIFLVILVAALQGSAPRESPLPYHIPLDPEGSLELSWNVSYTQEAIHFQLLVRRLKAGVLFGMSDRGELENADLVVLWTDGDTAYFADAWSDQKGQIHLDPQQDYQLLQVQRTPEGLTLLFKRPFGTCDPKDYLIEDGTVHLVYGILEEPFRSLEAINGSGLQMGLQRVQLLKPNIPEPELPSDACTMEVQAPNIQIPSQETTYWCYIKELPKGFSRHHIIKYEPIVTKGNEALVHHMEVFQCAPEMDSVPHFSGPCDSKMKPDRLNYCRHVLAAWALGAKAFYYPEEAGLAFGGPGSSRYLRLEVHYHNPLVIEGRNDSSGIRLYYTAKLRRFNAGIMELGLVYTPVMAIPPRETAFILTGYCTDKCTQLALPPSGIHIFASQLHTHLTGRKVVTVLVRDGREWEIVNQDNHYSPHFQEIRMLKKVVSVHPGDVLITSCTYNTEDRELATVGGFGILEEMCVNYVHYYPQTQLELCKSAVDAGFLQKYFHLINRFNNEDVCTCPQASVSQQFTSVPWNSFNRDVLKALYSFAPISMHCNKSSAVRFQGEWNLQPLPKVISTLEEPTPQCPTSQGRSPAGPTVVSIGGGKG

SEQ ID NO: 11399 - protein, 930 aa, Homo sapiens
MDEQSVERWLTEQRAQCPHCRAPLQLRELVNCRWAEEVTQQLDTLQLCSLTKHEENEKDKCENHHEKLSVFCWTCKKCICHQCALWGGMHGGHTFKPLAEIYEQHVTKVNEEVAKLRRRLMELISLVQEVERNVEAVRNAKDERVREIRNAVEMMIARLDTQLKNKLITLMGQKTSLTQETELLESLLQEVEHQLRSCSKSELISKSSEILMMFQQVHRKPMASFVTTPVPPDFTSELVPSYDSATFVLENFSTLRQRADPVYSPPLQVSGLCWRLKVYPDGNGVVRGYYLSVFLELSAGLPETSKYEYRVEMVHQSCNDPTKNIIREFASDFEVGECWGYNRFFRLDLLANEGYLNPQNDTVILRFQVRSPTFFQKSRDQHWYITQLEAAQTSYIQQINNLKERLTIELSRTQKSRDLSPPDNHLSPQNDDALETRAKKSACSDMLLEGGPTTASVREAKEDEEDEEKIQNEDYHHELSDGDLDLDLVYEDEVNQLDGSSSSASSTATSNTEENDIDEETMSGENDVEYNNMELEEGELMEDAAAAGPAGSSHGYVGSSSRISRRTHLCSAATSSLLDIDPLILIHLLDLKDRSSIENLWGLQPRPPASLLQPTASYSRKDKDQRKQQAMWRVPSDLKMLKRLKTQMAEVRCMKTDVKNTLSEIKSSSAASGDMQTSLFSADQAALAACGTENSGRLQDLGMELLAKSSVANCYIRNSTNKKSNSPKPARSSVAGSLSLRRAVDPGENSRSKGDCQTLSEGSPGSSQSGSRHSSPRALIHGSIGDILPKTEDRQCKALDSDAVVVAVFSGLPAVEKRRKMVTLGANAKGGHLEGLQMTDLENNSETGELQPVLPEGASAAPEEGMSSDSDIECDTENEEQEEHTSVGGFHDSFMVMTQPPDEDTHSSFPDGEQIGPEDLSFNTDENSGR

SEQ ID NO: 11400 - protein, 964 aa, Homo sapiens; identical to SEQ ID NO: 1611

SEQ ID NO: 11401 - protein, 423 aa, Homo sapiens
MERMLPLLALGLLAAGFCPAVLCHPNSPLDEENLTQENQDRGTHVDLGLASANVDFAFSLYKQLVLKAPDKNVIFSPLSISTALAFLSLGAHNTTLTEILKGLKFNLTETSEAEIHQSFQHLLRTLNQSSDELQLSMGNAMFVKEQLSLLDRFTEDAKRLYGSEAFATDFQDSAAAKKLINDYVKNGTRGKITDLIKDLDSQTMMVLVNYIFFKAKWEMPFDPQDTHQSRFYLSKKKWVMVPMMSLHHLTIPYFRDEELSCTVVELKYTGNASALFILPDQDKMEEVEAMLLPETLKRWRDSLEFREIGELYLPKFSISRDYNLNDILLQLGIEEAFTSKADLSGITGARNLAVSQVVHKAVLDVFEEGTEASAATAVKITLLSALVETRTIVRFNRPFLMIIVPTDTQNIFFMSKVTNPKQA

SEQ ID NO: 11402 - protein, 412 aa, Homo sapiens
MDTSPSRKYPVKKRVKIHPNTVMVKYTSHYPQPGDDGYEEINEGYGNFMEENPKKGLLSEMKKKGRAFFGTMDTLPPPTEDPMINEIGQFQSFAEKNIFQSRKMWIVLFGSALAHGCVALITRLVSDRSKVPSLELIFIRSVFQVLSVLVVCYYQEAPFGPSGYRLRLFFYGVCNVISITCAYTSFSIVPPSNGTTMWRATTTVFSAILAFLLVDEKMAYVDMATVVCSILGVCLVMIPNIVDEDNSLLNAWKEAFGYTMTVMAGLTTALSMIVYRSIKEKISMWTALFTFGWTGTIWGISTMFILQEPIIPLDGETWSYLIAICVCSTAAFLGVYYALDKFHPALVSTVQHLEIVVAMVLQLLVLHIFPSIYDVFGGVIIMISVFVLAGYKLYWRNLRKQDYQEILDSPIK

SEQ ID NO: 11403 - protein, 780 aa, Homo sapiens
MATSNLLKNKGSLQFEDKWDFMRPIVLKLLRQESVTKQQWFDLFSDVHAVCLWDDKGPAKIHQALKEDILEFIKQAQARVLSHQDDTALLKAYIVEWRKFFTQCDILPKPFCQLEITLMGKQGSNKKSNVEDSIVRKLMLDTWNESIFSNIKNRLQDSAMKLVHAERLGEAFDSQLVIGVRESYVNLCSNPEDKLQIYRDNFEKAYLDSTERFYRTQAPSYLQQNGVQNYMKYADAKLKEEEKRALRYLETRRECNSVEALMECCVNALVTSFKETILAECQGMIKRNETEKLHLMFSLMDKVPNGIEPMLKDLEEHIISAGLADMVAAAETITTDSEKYVEQLLTLFNRFSKLVKEAFQDDPRFLTARDKAYKAVVNDATIFKLELPLKQKGVGLKTQPESKCPELLANYCDMLLRKTPLSKKLTSEEIEAKLKEVLLVLKYVQNKDVFMRYHKAHLTRRLILDISADSEIEENMVEWLREVGMPADYVNKLARMFQDIKVSEDLNQAFKEMHKNNKLALPADSVNIKILNAGAWSRSSEKVFVSLPTELEDLIPEVEEFYKKNHSGRKLHWHHLMSNGIITFKNEVGQYDLEVTTFQLAVLFAWNQRPREKISFENLKLATELPDAELRRTLWSLVAFPKLKRQVLLYEPQVNSPKDFTEGTLFSVNQEFSLIKNAKVQKRGKINLIGRLQLTTERMREEENEGIVQLRILRTQEAIIQIMKMRKKISNAQLQTELVEILKNMFLPQKKMIKEQIEWLIEHKYIRRDESDINTFIYMA

SEQ ID NO: 11404 - protein, 144 aa, Homo sapiens
MDSNHQSNYKLSKTEKKFLRKQIKAKHTLLRHEGIETVSYATQSLVVANGGLGNGVSRNQLLPVLEKCGLVDALLMPPNKPYSFARYRTTEESKRAYVTLNGKEVVDDLGQKITLYLNFVEKVEGVEASSLTTRTHGSRRNNFF

SEQ ID NO: 11405 - protein, 596 aa, Homo sapiens
MTSPSPRIQIISTDSAVASPQRIQIVTDQQTGQKIQIVTAVDASGSPKQQFILTSPDGAGTGKVILASPETSSAKQLIFTTSDNLVPGRIQIVTDSASVERLLGKTDVQRPQVVEYCVVCGDKASGRHYGAVSCEGCKGFFKRSVRKNLTYSCRSNQDCIINKHHRNRCQFCRLKKCLEMGMKMESVQSERKPFDVQREKPSNCAASTEKIYIRKDLRSPLIATPTFVADKDGARQTGLLDPGMLVNIQQPLIREDGTVLLATDSKAETSQGALGTLANVVTSLANLSESLNNGDTSEIQPEDQSASEITRAFDTLAKALNTTDSSSSPSLADGIDTSGGGSIHVISRDQSTPIIEVEGPLLSDTHVTFKLTMPSPMPEYLNVHYICESASRLLFLSMHWARSIPAFQALGQDCNTSLVRACWNELFTLGLAQCAQVMSLSTILAAIVNHLQNSIQEDKLSGDRIKQVMEHIWKLQEFCNSMAKLDIDGYEYAYLKAIVLFSPDHPGLTSTSQIEKFQEKAQMELQDYVQKTYSEDTYRLARILVRLPALRLMSSNITEELFFTGLIGNVSIDSIIPYILKMETAEYNGQITGASL

SEQ ID NO: 11406 - protein, 458 aa, Homo sapiens
MTKYPDNLSDSLFSGDEENAGTEEIKNEINGNWISASSINEARINAKAKRRLRKNSSRDSGRGDSVSDSGSDALRSGLTVPTSPKGRLLDRRSRSGKGRGLPKKGGAGGKGVWGTPGQVYDVEEVDVKDPNYDDDQENCVYETVVLPLDERAFEKTLTPIIQEYFEHGDTNEVAEMLRDLNLGEMKSGVPVLAVSLALEGKASHREMTSKLLSDLCGTVMSTTDVEKSFDKLLKDLPELALDTPRAPQLVGQFIARAVGDGILCNTYIDSYKGTVDCVQARAALDKATVLLSMSKGGKRKDSVWGSGGGQQSVNHLVKEIDMLLKEYLLSGDISEAEHCLKELEVPHFHHELVYEAIIMVLESTGESTFKMILDLLKSLWKSSTITVDQMKRGYERIYNEIPDINLDVPHSYSVLERFVEECFQAGIISKQLRDLCPSRGRKRFVSEGDGGRLKPESY

SEQ ID NO: 11407 - protein, 558 aa, Homo sapiens
MLGGSGSHGRRSLAALSQIAYQRNDDDEEEAARERRRRARQERLRQKQEEESLGQVTDQVEVNAQNSVPDEEAKTTTTNTQVEGDDEAAFLERLARREERRQKRLQEALERQKEFDPTITDASLSLPSRRMQNDTAENETTEKEEKSESRQERYEIEETETVTKSYQKNDWRDAEENKKEDKEKEEEEEEKPKRGSIGENQGEEKGTKVQAKREKLQEDKPTFKKEEIKDEKIKKDKEPKEEVKSFMDRKKGFTEVKSQNGEFMTHKLKHTENTFSRPGGRASVDTKEAEGAPQVEAGKRLEELRRRRGETESEEFEKLKQKQQEAALELEELKKKREERRKVLEEEEQRRKQEEADRKLREEEEKRRLKEEIERRRAEAAEKRQKMPEDGLSDDKKPFKCFTPKGSSLKIEERAEFLNKSVQKSSGVKSTHQAAIVSKIDSRLEQYTSAIEGTKSAKPTKPAASDLPVPAEGVRNIKSMWEKGNVFSSPTAAGTPNKETAGLKVGVSSRINEWLTKTPDGNKSPAPKPSDLRPGDVSSKRNLWEKQSVDKVTSPTKV

SEQ ID NO: 11408 - protein, 884 aa, Homo sapiens
MRIISRQIVLLFSGFWGLAMGAFPSSVQIGGLFIRNTDQEYTAFRLAIFLHNTSPNASEAPFNLVPHVDNIETANSFAVTNAFCSQYSRGVFAIFGLYDKRSVHTLTSFCSALHISLITPSFPTEGESQFVLQLRPSLRGALLSLLDHYEWNCFVFLYDTDRGYSILQAIMEKAGQNGWHVSAICVENFNDVSYRQLLEELDRRQEKKFVIDCEIERLQNILEQIVSVGKHVKGYHYIIANLGFKDISLERFIHGGANVTGFQLVDFNTPMVIKLMDRWKKLDQREYPGSETPPKYTSALTYDGVLVMAETFRSLRRQKIDISRRGNAGDCLANPAAPWGQGIDMERTLKQVRIQGLTGNVQFDHYGRRVNYTMDVFELKSTGPRKVGYWNDMDKLVLIQDVPTLGNDTAAIENRTVVVTTIMESPYVMYKKNHEMFEGNDKYEGYCVDLASEIAKHIGIKYKIAIVPDGKYGARDADTKIWNGMVGELVYGKAEIAIAPLTITLVREEVIDFSKPFMSLGISIMIKKPQKSKPGVFSFLDPLAYEIWMCIVFAYIGVSVVLFLVSRFSPYEWHTEEPEDGKEGPSDQPPNEFGIFNSLWFSLGAFMQQGCDISPRSLSGRIVGGVWWFFTLIIISSYTANLAAFLTVERMVSPIESAEDLAKQTEIAYGTLDSGSTKEFFRRSKIAVYEKMWTYMRSAEPSVFTRTTAEGVARVRKSKGKFAFLLESTMNEYIEQRKPCDTMKVGGNLDSKGYGVATPKGSSLRNAVNLAVLKLNEQGLLDKLKNKWWYDKGECGSGGGDSKDKTSALSLSNVAGVFYILVGGLGLAMLVALIEFCYKSRAEAKRMKVAKSAQTFNPTSSQNTQNLATYREGYNVYGTESIKI

SEQ ID NO: 11409 - protein, 447 aa, Homo sapiens
MAAVPRVEGVFIFLIEDSGKKKRRKNFEAMFKGILQSGLDNFVINHMLKNNVAGQTSIQTLVPNTDQKSTSVKKDNHKKKTVKMLEYLGKDVLHGVFNYLAKHDVLTLKEEEKKKYYDTKIEDKALILVDSLRKNRVAHQMFTQTLLNMDQKITSVKPLLQIEAGPPESAESTNILKLCPREEFLRLCKKNHDEIYPIKKREDRRRLALIICNTKFDHLPARNGAHYDIVGMKRLLQGLGYTVVDEKNLTARDMESVLRAFAARPEHKSSDSTFLVLMSHGILEGICGTAHKKKKPDVLLYDTIFQIFNNRNCLSLKDKPKVIIVQACRGEKHGELWVRDSPASLALISSQSSENLEADSVCKIHEEKDFIAFCSSTPHNVSWRDRTRGSIFITELITCFQKYSCCCHLMEIFRKVQKSFEVPQAKAQMPTIERATLTRDFYLFPGN

SEQ ID NO: 11410 - protein, 258 aa, Homo sapiens
MVITEVAEGPVDGSEKELGSNSPPQRNWKGIAIALLVILVVCSLITMSVILLTPDELTNSSETRLSLEDLFRKDFVLHDPEARWINDTDVVYKSENGHVIKLNIETNATTLLLENTTFVTFKASRHSVSPDLKYVLLAYDVKQIFHYSYTASYVIYNIHTREVWELNPPEVEDSVLQYAAWGVQGQQLIYIFENNIYYQPDIKSSSLRLTSSGKEEIIFNGIADWLYEEELLHSHIAHWWSPDGERLAFLMINDSLVP

SEQ ID NO: 11411 - protein, 800 aa, Homo sapiens
MTAAKQEPQPTPGARASQAQPADQELGSNSPPQRNWKGIAIALLVILVVCSLITMSVILLTPDELTNSSETRLSLEDLFRKDFVLHDPEARWINDTDVVYKSENGHVIKLNIETNATTLLLENTTFVTFKASRHSVSPDLKYVLLAYDVKQIFHYSYTASYVIYNIHTREVWELNPPEVEDSVLQYAAWGVQGQQLIYIFENNIYYQPDIKSSSLRLTSSGKEEIIFNGIADWLYEEELLHSHIAHWWSPDGERLAFLMINDSLVPTMVIPRFTGALYPKGKQYPYPKAGQVNPTIKLYVVNLYGPTHTLELMPPDSFKSREYYITMVKWVSNTKTVVRWLNRAQNISILTVCETTTGACSKKYEMTSDTWLSQQNEEPVFSRDGSKFFMTVPVKQGGRGEFHHVAMFLIQSKSEQITVRHLTSGNWEVIKILAYDETTQKIYFLSTESSPRGRQLYSASTEGLLNRQCISCNFMKEQCTYFDASFSPMNQHFLLFCEGPRVPVVSLHSTDNPAKYFILESNSMLKEAILKKKIGKPEIKILHIDDYELPLQLSLPKDFMDRNQYALLLIMDEEPGGQLVTDKFHIDWDSVLIDMDNVIVARFDGRGSGFQGLKILQEIHRRLGSVEVKDQITAVKFLLKLPYIDSKRLSIFGKGYGGYIASMILKSDEKLFKCGSVVAPITDLKLYASAFSERYLGMPSKEESTYQAASVLHNVHGLKEENILIIHGTADTKVHFQHSAELIKHLIKAGVNYTMQVYPDEGHNVSEKSKYHLYSTILKFFSDCLKEEISVLPQEPEEDE

SEQ ID NO: 11412 - protein, 2635 aa, Homo sapiens
MSTKAEQFASKIRYLQEYHNRVLHNIYPVPSGTDIANTLKYFSQTLLSILSRTGKKENQDASNLTVPMTMCLFPVPFPLTPSLRPQVSSINPTVTRSLLYSVLRDAPSERGPQSRDAQLSDYPSLDYQGLYVTLVTLLDLVPLLQHGQHDLGQSIFYTTTCLLPFLNDDILSTLPYTMISTLATFPPFLHKDIIEYLSTSFLPMAILGSSRREGVPAHVNLSASSMLMIAMQYTSNPVYHCQLLECLMKYKQEVWKDLLYVIAYGPSQVKPPAVQMLFHYWPNLKPPGAISEYRGLQYTAWNPIHCQHIECHNAINKPAVKMCIDPSLSVALGDKPPPLYLCEECSERIAGDHSEWLIDVLLPQAEISAICQKKNCSSHVRRAVVTCFSAGCCGRHGNRPVRYCKRCHSNHHSNEVGAAAETHLYQTSPPPINTRECGAEELVCAVEAVISLLKEAEFHAEQREHELNRRRQLGLSSSHHSLDNADFDNKDDDKHDQRLLSQFGIWFLVSLCTPSENTPTESLARLVAMVFQWFHSTAYMMDDEVGSLVEKLKPQFVTKWLKTVCDVRFDVMVMCLLPKPMEFARVGGYWDKSCSTVTQLKEGLNRILCLIPYNVINQSVWECIMPEWLEAIRTEVPDNQLKEFREVLSKMFDIELCPLPFSMEEMFGFISCRFTGYPSSVQEQALLWLHVLSELDIMVPLQLLISMFSDGVNSVKELANQRKSRVSELAGNLASRRVSVASDPGRRVQHNMLSPFHSPFQSPFRSPLRSPFRSPFKNFGHPGGRTIDFDCEDDEMNLNCFILMFDLLLKQMELQDDGITMGLEHSLSKDIISIINNVFQAPWGGSHTCQKDEKAIECNLCQSSILCYQLACELLERLAPKEESRLVEPTDSLEDSLLSSRPEFIIGPEGEEEENPASKHGENPGNCTEPVEHAAVKNDTERKFCYQQLPVTLRLIYTIFQEMAKFEEPDILFNMLNCLKILCLHGECLYIARKDHPQFLAYIQDHMLIASLWRVVKSEFSQLSSLAVPLLLHALSLPHGADIFWTIINGNFNSKDWKMRFEAVEKVAVICRFLDIHSVTKNHLLKYSLAHAFCCFLTAVEDVNPAVATRAGLLLDTIKRPALQGLCLCLDFQFDTVVKDRPTILSKLLLLHFLKQDIPALSWEFFVNRFETLSLEAQLHLDCNKEFPFPTTITAVRTNVANLSDAALWKIKRARFARNRQKSVRSLRDSVKGPVESKRALSLPETLTSKIRQQSPENDNTIKDLLPEDAGIDHQTVHQLITVLMKFMAKDESSAESDISSAKAFNTVKRHLYVLLGYDQQEGCFMIAPQKMRLSTCFNAFIAGIAQVMDYNINLGKHLLPLVVQVLKYCSCPQLRHYFQQPPRCSLWSLKPHIRQMWLKALLVILYKYPYRDCDISKILLHLIHITVNTLNAQYHSCKPHATAGPLYSDNSNISRYSEKEKGEIELAEYRETGALQDSLLHCVREESIPKKKLRSFKQKSLDIGNADSLLFTLDEHRRKSCIDRCDIEKPPTQAAYIAQRPNDPGRSRQNSATRPDNSEIPENPAMEGFPDARRPVIPEVRLNCMETFEVKVDSPVKPAPKEDLDLIDLSSDSTSGPEKHSILSTSDSDSLVFEPLPPLRIVESDEEEETMNQGDDGPSGKNAASSPSVPSHPSVLSLSTAPLVQVSVEDCSKDFSSKDSGNNQSAGNTDSALITLEDPMDAEGSSKPEELPEFSCGSPLTLKQKRDLLQKSFALPEMSLDDHPDPGTEGEKPGELMPSSGAKTVLLKVPEDAENPTESEKPDTSAESDTEQNPERKVEEDGAEESEFKIQIVPRQRKQRKIAVSAIQREYLDISFNILDKLGEQKDPDPSTKGLSTLEMPRESSSAPTLDAGVPETSSHSSISTQYRQMKRGSLGVLTMSQLMKRQLEHQSSAPHNISNWDTEQIQPGKRQCNVPTCLNPDLEGQPLRMRGATKSSLLSAPSIVSMFVPAPEEFTDEQPTVMTDKCHDCGAILEEYDEETLGLAIVVLSTFIHLSPDLAAPLLLDIMQSVGRLASSTTFSNQAESMMVPGNAAGVAKQFLRCIFHQLAPNGIFPQLFQSTIKDGTFLRTLASSLMDFNELSSIAALSQLLEGLNNKKNLPAGGAMIRCLENIATFMEALPMDSPSSLWTTISNQFQTFFAKLPCVLPLKCSLDSSLRIMICLLKIPSTNATRSLLEPFSKLLSFVIQNAVFTLAYLVELCGLCYRAFTKERDKFYLSRSVVLELLQALKLKSPLPDTNLLLLVQFICADAGTKLAESTILSKQMIASVPGCGTAAMECVRQYINEVLDFMADMHTLTKLKSHMKTCSQPLHEDTFGGHLKVGLAQIAAMDISRGNHRDNKAVIRYLPWLYHPPSAMQQGPKEFIECVSHIRLLSWLLLGSLTHNAVCPNASSPCLPIPLDAGSHVADHLIVILIGFPEQSKTSVLHMCSLFHAFIFAQLWTVYCEQSAVATNLQNQNEFSFTAILTALEFWSRVTPSILQLMAHNKVMVEMVCLHVISLMEALQECNSTIFVKLIPMWLPMIQSNIKHLSAGLQLRLQAIQNHVNHHSLRTLPGSGQSSAGLAALRKWLQCTQFKMAQVEIQSSEAASQFYPL

SEQ ID NO: 11413 - protein, 913 aa, Homo sapiens
MAREAGQVCARPAVPRGRKGSVFFACVSVVTARRRAVARRAALQSPTPWLAPLPAPATTESSTQEIGEELINGVIYSISLRKVQLHHGGNKGQRWLGYENESALNLYETCKVRTVKAGTLEKLVEHLVPAFQGSDLSYVTIFLCTYRAFTTTQQVLDLLFKRYGRCDALTASSRYGCILPYSDEDGGPQDQLKNAISSILGTWLDQYSEDFCQPPDFPCLKQLVAYVQLNMPGSDLERRAHLLLAQLEHSEPIEAEPEALSPVPALKPTPELELALTPARAPSPVPAPAPEPEPAPTPAPGSELEVAPAPAPELQQAPEPAVGLESAPAPALELEPAPEQDPAPSQTLELEPAPAPVPSLQPSWPSPVVAENGLSEEKPHLLVFPPDLVAEQFTLMDAELFKKVVPYHCLGSIWSQRDKKGKEHLAPTIRATVTQFNSVANCVITTCLGNRSTKAPDRARVVEHWIEVARECRILKNFSSLYAILSALQSNSIHRLKKTWEDVSRDSFRIFQKLSEIFSDENNYSLSRELLIKEGTSKFATLEMNPKRAQKRPKETGIIQGTVPYLGTFLTDLVMLDTAMKDYLYGRLINFEKRRKEFEVIAQIKLLQSACNNYSIAPDEQFGAWFRAVERLSETESYNLSCELEPPSESASNTLRTKKNTAIVKRWSDRQAPSTELSTSGSSHSKSCDQLRCGPYLSSGDIADALSVHSAGSSSSDVEEINISFVPESPDGQEKKFWESASQSSPETSGISSASSSTSSSSASTTPVAATRTHKRSVSGLCNSSSALPLYNQQVGDCCIIRVSLDVDNGNMYKSILVTSQDKAPAVIRKAMDKHNLEEEEPEDYELLQILSDDRKLKIPENANVFYAMNSTANYDFVLKKRTFTKGVKVKHGASSTLPRMKQKGLKIAKGIF

SEQ ID NO: 11414 - protein, 370 aa, Homo sapiens
MHRLIFVYTLICANFCSCRDTSATPQSASIKALRNANLRRDESNHLTDLYRRDETIQVKGNGYVQSPRFPNSYPRNLLLTWRLHSQENTRIQLVFDNQFGLEEAENDICRYDFVEVEDISETSTIIRGRWCGHKEVPPRIKSRTNQIKITFKSDDYFVAKPGFKIYYSLLEDFQPAAASETNWESVTSSISGVSYNSPSVTDPTLIADALDKKIAEFDTVEDLLKYFNPESWQEDLENMYLDTPRYRGRSYHDRKSKVDLDRLNDDAKRYSCTPRNYSVNIREELKLANVVFFPRCLLVQRCGGNCGCGTVNWRSCTCNSGKTVKKYHEVLQFEPGHIKRRGRAKTMALVDIQLDHHERCDCICSSRPPR

SEQ ID NO: 11415 - protein, 859 aa, Homo sapiens
MMVDCQSSTQEIGEELINGVIYSISLRKVQLHHGGNKGQRWLGYENESALNLYETCKVRTVKAGTLEKLVEHLVPAFQGSDLSYVTIFLCTYRAFTTTQQVLDLLFKRYGRCDALTASSRYGCILPYSDEDGGPQDQLKNAISSILGTWLDQYSEDFCQPPDFPCLKQLVAYVQLNMPGSDLERRAHLLLAQLEHSEPIEAEPEALSPVPALKPTPELELALTPARAPSPVPAPAPEPEPAPTPAPGSELEVAPAPAPELQQAPEPAVGLESAPAPALELEPAPEQDPAPSQTLELEPAPAPVPSLQPSWPSPVVAENGLSEEKPHLLVFPPDLVAEQFTLMDAELFKKVVPYHCLGSIWSQRDKKGKEHLAPTIRATVTQFNSVANCVITTCLGNRSTKAPDRARVVEHWIEVARECRILKNFSSLYAILSALQSNSIHRLKKTWEDVSRDSFRIFQKLSEIFSDENNYSLSRELLIKEGTSKFATLEMNPKRAQKRPKETGIIQGTVPYLGTFLTDLVMLDTAMKDYLYGRLINFEKRRKEFEVIAQIKLLQSACNNYSIAPDEQFGAWFRAVERLSETESYNLSCELEPPSESASNTLRTKKNTAIVKRWSDRQAPSTELSTSGSSHSKSCDQLRCGPYLSSGDIADALSVHSAGSSSSDVEEINISFVPESPDGQEKKFWESASQSSPETSGISSASSSTSSSSASTTPVAATRTHKRSVSGLCNSSSALPLYNQQVGDCCIIRVSLDVDNGNMYKSILVTSQDKAPAVIRKAMDKHNLEEEEPEDYELLQILSDDRKLKIPENANVFYAMNSTANYDFVLKKRTFTKGVKVKHGASSTLPRMKQKGLKIAKGIF

SEQ ID NO: 11416 - protein, 473 aa, Homo sapiens
MAAEAAGGKYRSTVSKSKDPSGLLISVIRTLSTSDDVEDRENEKGRLEEAYEKCDRDLDELIVQHYTELTTAIRTYQSITERITNSRNKIKQVKENLLSCKMLLHCKRDELRKLWIEGIEHKHVLNLLDEIENIKQVPQKLEQCMASKHYLSATDMLVSAVESLEGPLLQVEGLSDLRLELHSKKMNLHLVLIDELHRHLYIKSTSRVVQRNKEKGKISSLVKDASVPLIDVTNLPTPRKFLDTSHYSTAGSSSVREINLQDIKEDLELDPEENSTLFMGILIKGLAKLKKIPETVKAIIERLEQELKQIVKRSTTQVADSGYQRGENVTVENQPRLLLELLELLFDKFNAVAAAHSVVLGYLQDTVVTPLTQQEDIKLYDMADVWVKIQDVLQMLLTEYLDMKNTRTASEPSAQLSYASTGREFAAFFAKKKPQRPKNSLFKFESSSHAISMSAYLREQRRELYSRSGELQG

SEQ ID NO: 11417 - protein, 963 aa, Homo sapiens [sequence omitted]

SEQ ID NO: 11418 - protein, 267 aa, Homo sapiens
MANCERTFIAIKPDGVQRGLVGEIIKRFEQKGFRLVGLKFMQASEDLLKEHYVDLKDRPFFAGLVKYMHSGPVVAMVWEGLNVVKTGRVMLGETNPADSKPGTIRGDFCIQVGRTMANLERTFIAIKPDGVQRGLVGEIIKRFEQKGFRLVAMKFLRASEEHLKQHYIDLKDRPFFPGLVKYMNSGPVVAMVWEGLNVVKTGRVMLGETNPADSKPGTIRGDFCIQVGRNIIHGSDSVKSAEKEISLWFKPEELVDYKSCAHDWVYE

SEQ ID NO: 11419 - protein, 879 aa, Homo sapiens
MGRLASRPLLLALLSLALCRGRVVRVPTATLVRVVGTELVIPCNVSDYDGPSEQNFDWSFSSLGSSFVELASTWEVGFPAQLYQERLQRGEILLRRTANDAVELHIKNVQPSDQGHYKCSTPSTDATVQGNYEDTVQVKVLADSLHVGPSARPPPSLSLREGEPFELRCTAASASPLHTHLALLWEVHRGPARRSVLALTHEGRFHPGLGYEQRYHSGDVRLDTVGSDAYRLSVSRALSADQGSYRCIVSEWIAEQGNWQEIQEKAVEVATVVIQPSVLRAAVPKNVSVAEGKELDLTCNITTDRADDVRPEVTWSFSRMPDSTLPGSRVLARLDRDSLVHSSPHVALSHVDARSYHLLVRDVSKENSGYYYCHVSLWAPGHNRSWHKVAEAVSSPAGVGVTWLEPDYQVYLNASKVPGFADDPTELACRVVDTKSGEANVRFTVSWYYRMNRRSDNVVTSELLAVMDGDWTLKYGERSKQRAQDGDFIFSKEHTDTFNFRIQRTTEEDRGNYYCVVSAWTKQRNNSWVKSKDVFSKPVNIFWALEDSVLVVKARQPKPFFAAGNTFEMTCKVSSKNIKSPRYSVLIMAEKPVGDLSSPNETKYIISLDQDSVVKLENWTDASRVDGVVLEKVQEDEFRYRMYQTQVSDAGLYRCMVTAWSPVRGSLWREAATSLSNPIEIDFQTSGPIFNASVHSDTPSVIRGDLIKLFCIITVEGAALDPDDMAFDVSWFAVHSFGLDKAPVLLSSLDRKGIVTTSRRDWKSDLSLERVSVLEFLLQVHGSEDQDFGNYYCSVTPWVKSPTGSWQKEAEIHSKPVFITVKMDVLNAFKYPLLIGVGLSTVIGLLSCLIGYCSSHWCCKKEVQETRRERRRLMSMEMD

SEQ ID NO: 11420 - protein, 491 aa, Homo sapiens
MMSEHDLADVVQIAVEDLSPDHPVVLENHVVTDEDEPALKRQRLEINCQDPSIKSFLYSINQTICLRLDSIEAKLQALEATCKSLEEKLDLVTNKQHSPIQVPMVAGSPLGATQTCNKVRCAVPGRRQNTIVVKVPGQEDSHHEDGESGSEASDSVSSCGQAGSQSIGSNVTLITLNSEEDYPNGTWLGDENNPEMRVRCAIIPSDMLHISTNCRTAEKMALTLLDYLFHREVQAVSNLSGQGKHGKKQLDPLTIYGIRCHLFYKFGITESDWYRIKQSIDSKCRTAWRRKQRGQSLAVKSFSRRTPNSSSYCPSEPMMSTPPPASELPQPQPQPQALHYALANAQQVQIHQIGEDGQVQVIPQGHLHIAQVPQGEQVQITQDSEGNLQIHHVGQDGQLLEATRIPCLLAPSVFKASSGQVLQGAQLIAVASSDPAAAGVDGSPLQGSDIQVQYVQLAPVSDHTAGAQTAEALQPTLQPEMQLEHGAIQIQ

SEQ ID NO: 11421 - protein, 436 aa, Homo sapiens
MQGTPGGGTRPGPSPVDRRTLLVFSFILAAALGQMNFTGDQVLRVLAKDEKQLSLLGDLEGLKPQKVDFWRGPARPSLPVDMRVPFSELKDIKAYLESHGLAYSIMIKDIQVLLDEERQAMAKSRRLERSTNSFSYSSYHTLEEIYSWIDNFVMEHSDIVSKIQIGNSFENQSILVLKFSTGGSRHPAIWIDTGIHSREWITHATGIWTANKIVSDYGKDRVLTDILNAMDIFIELVTNPDGFAFTHSMNRLWRKNKSIRPGIFCIGVDLNRNWKSGFGGNGSNSNPCSETYHGPSPQSEPEVAAIVNFITAHGNFKALISIHSYSQMLMYPYGRLLEPVSNQRELYDLAKDAVEALYKVHGIEYIFGSISTTLYVASGITVDWAYDSGIKYAFSFELRDTGQYGFLLPATQIIPTAQETWMALRTIMEHTLNHPY

SEQ ID NO: 11422 - protein, 1722 aa, Homo sapiens
MDDDDAKLKAEIEAELDKLSISSLEKEDIESDAKSETQSDDSDTDSVELPESVLHCINIIKNRSKAVEELILQDLEDTDILSCSYGAVSNNHMHLRTGLSTEYEESSEQLIKILSEIEKEEFMRSKTDCATPDFVPEPSPHDLPMDEHVLPDDADINFGYCEVEEKCRQSFEAWQEKQKELEDKEKQTLKAQRDREEKQFQEEEEKRHCWMKQFKVEKKKLENIQKQEQDKMNDELYKEEKIWKEKFKQHEEYIRNLHLQMEEERTRFKDQQEKEKNSLLKQQNNAAVKIQAKYKAFVAYQKYGPIIKEQIESKKRKAQEWKEKEAKIRQKEEENRKRLEEEQRIKEERKKQKEEERKRREKEYEEKKNIVKQEREQLISKEKIILREDASQQLIISSALKKSGYNNKHLSLEDISNDKGDIAKNLVDENSKKQEDVLLWLVEESNMKENVDRQTILKESIQVKLKESISSQTILADFKMEEKNENLAKKRCSEELVKQERKYENTDNKTELGNSDLKGNLKEQFPLQELKSDAQKEEKIMKHVINENTGQKTQIILGHNQEISEVKTNEEQKIIKDNQQKKIQKVEKEEIQEQNGLLYKDKDTLVISVKQRSLSLTSENSKDVRENVILQEKEIYSKSKEIEENPKDNAWNSGIVIFNTTDTMINIEGKRNDQDYVLGRHAPCEGLSNYNAESSMVSKEVNSLKSEIRNISEKCHENAPEPDSMTCCVSESTLLYSIEERRLAWIKSFKPWLEIFKQNQQKKIVRRKRPVKCPANMTPALDKLEILRCGPWDTLQQVTTVTFQDLPGCVLSTLAECTNLQFLSLRRCGLTSLHSLSNCKKLKYIDAQENHIEAIECENLENLCVVLLNKNQLTSLHGLDGCTNIQCLELSYNKITRIGYSFFLEEKLVDNAGFCHHLGTSTSYLSLAQVWIPTGLCWSWIPITSLTKNSDCNFLISHLYWNCGLESLKNLQQLILDHNQLINTKGLCDTPTIVYLDCSHNHLTDVEGVENCGLLQILKLQGNYLSELPSLENLVLLRELHLDDNSISTVEAFSSYWLPLLQNITISQNSLTKIVPLFHFVSLEKLDVSHNCLSDLKSAIKWFDACYSLHELSLTGNPLLQETNWRDSLLKVLPALRILNGNILNSNSESRTEEHNQLGSAGFLALCQSQIREFNLLIENYITGKGDVFTLDTAENLCHYFKKLMILSTEYRHAHERGDVTITKKDESEAQKNHLAPTNSDSTLQNGVFYSCAREGEPDSPDIPEKWMDSVSSHSPLSKSATCENMEGRHQEILVCQKREDSKASSIPTIRIPFKEVVMTNSLLRNHQNIEPSEKIMAAVVIQSYWRGYLMRRQTHFSTRLHTAATEGLPNSSIKNQTILKKGKRENIVNIRKQREKAAILIQAVWKGFILRKKLTTALEAIKNEESDEEYREIDLEDFIFDEAALEEEWLALDSTRFPSQTLLLSNQLHWPKIPGNLKWDDTSFNLPSNPAQAWLCNDKENLSSSEHTQFNSRSENKTSSWTPESKTSRKSLLKSEKEKKISEEWGFKDISTAQQMLKRAQKMKSKKLKKKIDSTVRLALFKNNENKVSLPKSPKMVQPRRDGYFEGIEEDPIHKDTTANEKLERNREYTYQWLHTQVGVHETTSSRNMKCNHFLPELDPDVLNGGRVQLVARLVSREDTDLDLFSMTNGSALSVNREKKNQAHRHSAGSSSKLWFPSKLI

SEQ ID NO: 11423 - protein, 229 aa, Homo sapiens
MDCRVHMRPIGLTWVLQLTLAWILLEACGGSRPLQARSQQHHGLAADLGKGKLHLAGPCCPSEMDTTETSGPGNHPERCGVPSPECESFLEHLQRALRSRFRLRLLGVRQAQPLCEELCQAWFANCEDDITCGPTWLPLSEKRGCEPSCLTYGQTFADGTDLCRSALGHALPVAAPGARHCFNISISAVPRPRPGRRGREAPSRRSRSPRTSILDAAGSGSGSGSGSGP

SEQ ID NO: 11424 - protein, 653 aa, Homo sapiens
MEPSGSEQLFEDPDPGGKSQDAEARKQTESEQKLSKMTHNALENINVIGQGLKHLFQHQRRRSSVSPHDVQQIQADPEPEMDLESQNACAEIDGVPTHPTALNRVLQQIRVPPKMKRGTSLHSRRGKPEAPKGSPQINRKSGQEMTAVMQSGRPRSSSTTDAPTSSAMMEIACAAAAAAAACLPGEEGTAERIERLEVSSLAQTSSAVASSTDGSIHTDSVDGTPDPQRTKAAIAHLQQKILKLTEQIKIAQTARDDNVAEYLKLANSADKQQAARIKQVFEKKNQKSAQTILQLQKKLEHYHRKLREVEQNGIPRQPKDVFRDMHQGLKDVGAKVTGFSEGVVDSVKGGFSSFSQATHSAAGAVVSKPREIASLIRNKFGSADNIPNLKDSLEEGQVDDAGKALGVISNFQSSPKYGSEEDCSSATSGSVGANSTTGGIAVGASSSKTNTLDMQSSGFDALLHEIQEIRETQARLEESFETLKEHYQRDYSLIMQTLQEERYRCERLEEQLNDLTELHQNEILNLKQELASMEEKIAYQSYERARDIQEALEACQTRISKMELQQQQQQVVQLEGLENATARNLLGKLINILLAVMAVLLVFVSTVANCVVPLMKTRNRTFSTLFLVVFIAFLWKHWDALFSYVERFFSSPR

SEQ ID NO: 11425 - protein, 707 aa, Homo sapiens
MSTADALDDENTFKILVATDIHLGFMEKDAVRGNDTFVTLDEILRLAQENEVDFILLGGDLFHENKPSRKTLHTCLELLRKYCMGDRPVQFEILSDQSVNFGFSKFPWVNYQDGNLNISIPVFSIHGNHDDPTGADALCALDILSCAGFVNHFGRSMSVEKIDISPVLLQKGSTKIALYGLGSIPDERLYRMFVNKKVTMLRPKEDENSWFNLFVIHQNRSKHGSTNFIPEQFLDDFIDLVIWGHEHECKIAPTKNEQQLFYISQPGSSVVTSLSPGEAVKKHVGLLRIKGRKMNMHKIPLHTVRQFFMEDIVLANHPDIFNPDNPKVTQAIQSFCLEKIEEMLENAERERLGNSHQPEKPLVRLRVDYSGGFEPFSVLRFSQKFVDRVANPKDIIHFFRHREQKEKTGEEINFGKLITKPSEGTTLRVEDLVKQYFQTAEKNVQLSLLTERGMGEAVQEFVDKEEKDAIEELVKYQLEKTQRFLKERHIDALEDKIDEEVRRFRETRQKNTNEEDDEVREAMTRARALRSQSEESASAFSADDLMSIDLAEQMANDSDDSISAATNKGRGRGRGRRGGRGQNSASRGGSQRGRDTGLETSTRSRNSKTAVSASRNMSIIDAFKSTRQQPSRNVTTKNYSEVIEVDESDVEEDIFPTTSKTDQRWSSTSSSKIMSQSQVSKGVDFESSEDDDDDPFMNTSSLRRNRR

SEQ ID NO: 11426 - protein, 1144 aa, Homo sapiens
MKGSSLSSESSPVSSPATNHSSPASTPKRVPMGPIIVPPGGHSVPSTPPVVTIAPTKTVNGVWRSESRQDAGSRSSSGGRERLIVEPPLPQEKAGGPAIPSHLLSTPYPFGLSPSSVVQDSRFPPLNLQRPVHHVVPPSTVTEDYLRSFRPYHTTDDLRMSSLPPLGLDPATAAAYYHPSYLAPHPFPHPAFRMDDSYCLSALRSPFYPIPTPGSLPPLHPSAMHLHLSGVRYPPELSHSSLAALHSERMSGLSAERLQMDEELRREREREREREREREADREREKEREREREKEREQEKEREREKERERELERQREQRAREKELLAAKALEPSFLPVAELHGLRGHATEERGKPSEQLTPTRAEKLKDAGLQAPKPVQHPLHPVPTPHHTVPSLISNHGIFSLPSSSAATALLIQRTNEEEKWLARQRRLRQEKEDRQSQVSEFRQQVLEQHLDMGRPPVPAEAEHRPESTTRPGPNRHEPGGRDPPQHFGGPPPLISPKPQLHAAPTALWNPVSLMDNTLETRRAESHSLHSHPAAFEPSRQAAVPLVKVERVFCPEKAEEGPRKREPAPLDKYQPPPPPPREGGSLEHQPFLPGPGPFLAELEKSTQTILGQQRASLPQAATFGELSGPLKPGSPYRPPVPRAPDPAYIYDEFLQQRRRLVSKLDLEERRRREAQEKGYYYDLDDSYDESDEEEVRAHLRCVAEQPPLKLDTSSEKLEFLQLFGLTTQQQKEELVAQKRRKRRRMLRERSPSPPTIQSKRQTPSPRLALSTRYSPDEMNNSPNFEEKKKFLTIFNLTHISAEKRKDKERLVEMLRAMKQKALSAAVADSLTNSPRDSPAVSLSEPATQQASLDVEKPVGVAASLSDIPKAAEPGKLEQVRPQELSRVQELAPASGEKARLSEAPGGKKSLSMLHYIRGAAPKDIPVPLSHSTNGKSKPWEPFVAEEFAHQFHESVLQSTQKALQKHKGSVAVLSAEQNHKVDTSVHYNIPELQSSSRAPPPQHNGQQEPPTARKGPPTQELDRDSEEEEEEDDEDGEDEEEVPKRKWQGIEAVFEAYQEHIEEQNLERQVLQTQCRRLEARHYSLSLTAEQLSHSVAELRSQKQKMVSERERLQAELDHLRKCLALPAMHWPRGYLKGYPR

SEQ ID NO: 11427 - protein, 732 aa, Homo sapiens
MLARRQRDPLQALRRRNQELKQQVDSLLSESQLKEALEPNKRQHIYQRCIQLKQAIDENKNALQKLSKADESAPVANYNQRKEEEHTLLDKLTQQLQGLAVTISRENITEVGAPTEEEEESESEDSEDSGGEEEDAEEEEEEKEENESHKWSTGEEYIAVGDFTAQQVGDLTFKKGEILLVIEKKPDGWWIAKDAKGNEGLVPRTYLEPYSEEEEGQESSEEGSEEDVEAVDETADGAEVKQRTDPHWSAVQKAISEAGIFCLVNHVSFCYLIVLMRNRMETVEDTNGSETGFRAWNVQSRGRIFLVSKPVLQINTVDVLTTMGAIPAGFRPSTLSQLLEEGNQFRANYFLQPELMPSQLAFRDLMWDATEGTIRSRPSRISLILTLWSCKMIPLPGMSIQVLSRHVRLCLFDGNKVLSNIHTVRATWQPKKPKTWTFSPQVTRILPCLLDGDCFIRSNSASPDLGILFELGISYIRNSTGERGELSCGWVFLKLFDASGVPIPAKTYELFLNGGTPYEKGIEVDPSISRRAHGSVFYQIMTMRRQPQLLVKLRSLNRRSRNVLSLLPETLIGNMCSIHLLIFYRQILGDVLLKDRMSLQSTDLISHPMLATFPMLLEQPDVMDALRSSWAGKESTLKRSEKRDKEFLKSTFLLVYHDCVLPLLHSTRLPPFRWAEEETETARWKVITDFLKQNQENQGALQALLSPDGVHEPFDLSEQTYDFLGEMRKNAV

SEQ ID NO: 11428 - protein, 928 aa, Homo sapiens
MDVGFSRTTVQTLSRSHCKNIKQKISQWEGRANGISNPEKWCPKDFGVRYNCHQEIRLKKNPIAERKSKNLDVTSRENVGLDINENTKSHDQSENENKKHEYDDTHFFKNESESNWVCSRVKEIESCKEDVLDPETSLPPGNFYTSQILWKKIEALPPDKLLNLALEHCDSSEKELNFRVLDSSYGITKSLENIYSEPEGQECGPSINPLPKPRRTFRYLSESGVTPYKERNCDKKYCENNSCAQSSLASSQEPEPKKYGGKIRGRSKRKSFEFEDIQHFRNRNSQTIREELGRNSGSALYYTQSEDNIYEDIIYPTKENPYEDIPVQPLPMWRSPSAWKLPPAKSAFKAPKLPPKPQFLHRKTMEVKNSQAYLRSKLTKDTTLPVTLTEWKLFRAGEVANTKRKNLPRLVLKIDDIFESKRGKKKVKLHSYTGKELPPTKGETSGNESDAEYLPKNRHKRLAQLQPSSKRNPHYQTLERDLIELQEQQLFELFVVVSLQKKPSGISYIPQVIQQFPGKDDHGYKQSKDMEERLKVIPKFCFPDSKDWMPTSELKSETFSFVLTGEDGSRWFGYCKKLLPVGKGKRLPEVYCMVSRLGCFNLFSKILDEVEKRREMSPALVYPFMRSVMEAPFPAPGRTITVKSYLPGAGDESIELCRPLDSRLEHVDFKCLFKCLSVCHLIRVCASLLLERRVIFVANSLSTLSKCGHAVVATLYPFTWQHTYIPVLPASMIDIVCSPTPFLIGILSCSLPQLQDLPIEEVLIVDLCADKFLQEVSDEDEILPPKLQAALMQILEERNEILTQEQNFSQDVTLNSLVSEAFVRFFVELVGHYSLNMTVTERGERVFQREPFRKSHTSRSVRHFLDLFMETQMFAGFIQDRELRKSGVKGLFEIRAIQYLETIPESEPSGMNRILRSLGSKMKFLQKK

SEQ ID NO: 11429 - protein, 871 aa, Homo sapiens
MDVGFSRTTVQTLSRSHCKNIKQKISQWEGRANGISNPEKWCPKDFGVRYNCHQEIRLKKNPIAERKSKNLDVTSRENVGLDINENTKSHDQSENENKKHEYDDTHFFKNESESNWVCSRVKEIESCKEDVLDPETSLPPGNFYTSQILWKKIEALPPDKLLNLALEHCDSSEKELNFRVLDSSYGITKSLENIYSEPEGQECGPSINPLPKPRRTFRYLSESGVTPYKERNCDKKYCENNSCAQSSLASSQEPEPKKYGGKIRGRSKRKSFEFEDIQHFRNRNSQTIREELGRNSGSALYYTQSEDNIYEDIIYPTKENPYEDIPVQPLPMWRSPSAWKLPPAKSAFKAPKLVLKIDDIFESKRGKKKVKLHSYTGKELPPTKGETSGNESDAEYLPKNRHKRLAQLQPSSKRNPHYQTLERDLIELQEQQLFELFVVVSLQKKPSGISYIPQVIQQFPGKDDHGYKQSKDMEERLKVIPKFCFPDSKDWMPTSELKSETFSFVLTGEDGSRWFGYCKKLLPVGKGKRLPEVYCMVSRLGCFNLFSKILDEVEKRREMSPALVYPFMRSVMEAPFPAPGRTITVKSYLPGAGDESIELCRPLDSRLEHVDFKCLFKCLSVCHLIRVCASLLLERRVIFVANSLSTLSKCGHAVVATLYPFTWQHTYIPVLPASMIDIVCSPTPFLIGILSCSLPQLQDLPIEEVLIVDLCADKFLQEVSDEDEILPPKLQAALMQILEERNEILTQEQNFSQDVTLNSLVSEAFVRFFVELVGHYSLNMTVTERGERVFQREPFRKSHTSRSVRHFLDLFMETQMFAGFIQDRELRKSGVKGLFEIRAIQYLETIPESEPSGMNRILRSLGSKMKFLQKK

SEQ ID NO: 11430 - protein, 262 aa, Homo sapiens
MGTTGLESLSLGDRGAAPTVTSSERLVPDPPNDLRKEDVAMELERVGEDEEQMMIKRSSECNPLLQEPIASAQFGATAGTECQDTIPRTQIERRKTSLYFSSKYNKEALSPPRRKAFKKWTPPRSPFNLVQETLFHDPWKLLIATIFLNRTSGKMAIPVLWKFLEKYPSAEVARTADWRDVSELLKPLGLYDLRAKTIVKFSDEYLTKQWKYPIELHGIGKYGNDSYRIFCVNEWKQVHPEDHKLNKYHDWLWENHEKLSLS

SEQ ID NO: 11431 - protein, 382 aa, Homo sapiens
MIDHLSRAVISDPEQNLAIEQKESDHILPDSKMTPLRFRKRTLHETKIRTHSTLTENVLSHKLQFDGRIVSRNGRDACRELIGFFFTHDQSLTIYEYRQFGKNRTNVLPFIQKSIYSHQCGRRKGKQYRLGDFYVGATLTFLSSDHLSLPESIKENTLLKLRITNIDQIALDSLKTASMEQEDDIIIQETNDRLVFKAIQDVLKEKLHKRGVRILTGLGKYFQQLDKEGNGLLDKADFKQALKVFHLEVSEKDFESAWLILNDNGNGKVDYGEFKRGIIGEMNEYRKSYVRKAFMKLDFNKSGSVPIINIRKCYCAKKHSQVISGHSTEEEIKSSFLETLKVACSKSDEVSYGEFEDYYEGLSIGIVDDEDFVNILRTPWGI

SEQ ID NO: 11432 - protein, 618 aa, Homo sapiens
MGKIENNERVILNVGGTRHETYRSTLKTLPGTRLALLASSEPPGDCLTTAGDKLQPSPPPLSPPPRAPPLSPGPGGCFEGGAGNCSSRGGRASDHPGGGREFFFDRHPGVFAYVLNYYRTGKLHCPADVCGPLFEEELAFWGIDETDVEPCCWMTYRQHRDAEEALDIFETPDLIGGDPGDDEDLAAKRLGIEDAAGLGGPDGKSGRWRRLQPRMWALFEDPYSSRAARFIAFASLFFILVSITTFCLETHEAFNIVKNKTEPVINGTSVVLQYEIETDPALTYVEGVCVVWFTFEFLVRIVFSPNKLEFIKNLLNIIDFVAILPFYLEVGLSGLSSKAAKDVLGFLRVVRFVRILRIFKLTRHFVGLRVLGHTLRASTNEFLLLIIFLALGVLIFATMIYYAERVGAQPNDPSASEHTQFKNIPIGFWWAVVTMTTLGYGDMYPQTWSGMLVGALCALAGVLTIAMPVPVIVNNFGMYYSLAMAKQKLPRKRKKHIPPAPQASSPTFCKTELNMACNSTQSDTCLGKDNRLLEHNRSVLSGDDSTGSEPPLSPPERLPIRRSSTRDKNRRGETCFLLTTGDYTCASDGGIRKGIRNGHSILHHLDNGTKCHYLRIIF

SEQ ID NO: 11433 - protein, 298 aa, Homo sapiens
MVLLLILSVLLLKEDVRGSAQSSERRVVAHMPGDIIIGALFSVHHQPTVDKVHERKCGAVREQYGIQRVEAMLHTLERINSDPTLLPNITLGCEIRDSCWHSAVALEQSIEFIRDSLISSEEEEGLVRCVDGSSSSFRSKKPIVGVIGPGSSSVAIQVQNLLQLFNIPQIAYSATSMDLSDKTLFKYFMRVVPSDAQQARAMVDIVKRYNWTYVSAVHTEGRGTKKEEMRKRDQTLMLSFMRCVFLRFEEIRWNDSLVYDALENENIQVLSLCFPSSAVIQINTFLSPIALINRLNVT

SEQ ID NO: 11434 - protein, 303 aa, Homo sapiens
MAAEQEKVGAEFQALRAFLVEQEGRLLGRLEELSREVAQKQNENLAQLGVEITQLSKLSSQIQETAQKPDLDFLQEFKSTLSRCSNVPGPKPTTVSSEMKNKVWNVSLKTFVLKGMLKKFKEDLRGELEKEEKVELTLDPDTANPRLILSLDLKGVRLGERAQDLPNHPCRFDTNTRVLASCGFSSGRHHWEVEVGSKDGWAFGVARESVRRKGLTPFTPEEGVWALQLNGGQYWAVTSPERSPLSCGHLSRVRVALDLEVGAVSFYAVEDMRHLYTFRVNFQERVFPLFSVCSTGTYLRIWP

SEQ ID NO: 11435 - protein, 329 aa, Homo sapiens
MTQATGQMLCLHVQVPLQLLLLGQKQMAAEQEKVGAEFQALRAFLVEQEGRLLGRLEELSREVAQKQNENLAQLGVEITQLSKLSSQIQETAQKPDLDFLQEFKSTLSRCSNVPGPKPTTVSSEMKNKVWNVSLKTFVLKGMLKKFKEDLRGELEKEEKVELTLDPDTANPRLILSLDLKGVRLGERAQDLPNHPCRFDTNTRVLASCGFSSGRHHWEVEVGSKDGWAFGVARESVRRKGLTPFTPEEGVWALQLNGGQYWAVTSPERSPLSCGHLSRVRVALDLEVGAVSFYAVEDMRHLYTFRVNFQERVFPLFSVCSTGTYLRIWP

SEQ ID NO: 11436 - protein, 604 aa, Homo sapiens
MGAALGTGTRLAPWPGRACGALPRWTPTAPAQGCHSKPGPARPVPLKKRGYDVTRNPHLNKGMAFTLEERLQLGIHGLIPPCFLSQDVQLLRIMRYYERQQSDLDKYIILMTLQDRNEKLFYRVLTSDVEKFMPIVYTPTVGLACQHYGLTFRRPRGLFITIHDKGHLATMLNSWPEDNIKAVVVTDGERILGLGDLGCYGMGIPVGKLALYTACGGVNPQQCLPVLLDVGTNNEELLRDPLYIGLKHQRVHGKAYDDLLDEFMQAVTDKFGINCLIQFEDFANANAFRLLNKYRNKYCMFNDDIQGTASVAVAGILAALRITKNKLSNHVFVFQGAGEAAMGIAHLLVMALEKEGVPKAEATRKIWMVDSKGLIVKGRSHLNHEKEMFAQDHPEVNSLEEVVRLVKPTAIIGVAAIAGAFTEQILRDMASFHERPIIFALSNPTSKAECTAEKCYRVTEGRGIFASGSPFKSVTLEDGKTFIPGQGNNAYVFPGVALGVIAGGIRHIPDEIFLLTAEQIAQEVSEQHLSQGRLYPPLSTIRDVSLRIAIKVLDYAYKHNLASYYPEPKDKEAFVRSLVYTPDYDSFTLDSYTWPKEAMNVQTV

SEQ ID NO: 11437 - protein, 503 aa, Homo sapiens
MVEALRVWASTHMSPSWTLLKLCDVQPMQYFDLTCQLLGKAEVDGASFLLKVWDGTRTPFPSWRVLIQDLVLEGDLSHIHRLQNLTIDILVYDNHVHVARSLKVGSFLRIYSLHTKLQSMNSENQTMLSLEFHLHGGTSYGRGIRVLPESNSDVDQLKKDLESANLTANQHSDVICQSEPDDSFPSSGSVSLYEVERCQQLSATILTDHQYLERTPLCAILKQKAPQQYRIRAKLRSYKPRRLFQSVKLHCPKCHLLQEVPHEGDLDIIFQDGATKTPDVKLQNTSLYDSKIWTTKNQKGRKVAVHFVKNNGILPLSNECLLLIEGGTLSEICKLSNKFNSVIPVRSGHEDLELLDLSAPFLIQGTIHHYGCKQCSSLRSIQNLNSLVDKTSWIPSSVAEALGIVPLQYVFVMTFTLDDGTGVLEAYLMDSDKFFQIPASEVLMDDDLQKSVDMIMDMFCPPGIKIDAYPWLECFIKSYNVTNGTDNQICYQIFDTTVAEDVI

SEQ ID NO: 11438 - protein, 637 aa, Homo sapiens
MALCYGTFWGYPKMLEAANLMEGLVDIGPWVTLPRGQPEVLEWGLPKDQDSVAFEDVAVNFTHEEWALLGPSQKNLYRDVMRETIRNLNCIGMKWENQNIDDQHQNLRRNPRCDVVERFGKSKDGSQCGETLSQIRNSIVNKNTPARVDACGSSVNGEVIMGHSSLNCYIRVDTGHKHRECHEYAEKSYTHKQCGKGLSYRHSFQTCERPHTGKKPYDCKECGKTFSSPGNLRRHMVVKGGDGPYKCELCGKAFFWPSLLRMHERTHTGEKPYECKQCSKAFPVYSSYLRHEKIHTGEKPYECKQCSKAFPDYSSYLRHERTHTGEKPYKCKQCGKAFSVSGSLRVHERIHTGEKPYTCKQCGKAFCHLGSFQRHMIMHSGDGPHKCKICGKGFDFPGSARIHEGTHTLEKPYECKQCGKLLSHRSSFRRHMMAHTGDGPHKCTVCGKAFDSPSVFQRHERTHTGEKPYECKQCGKAFRTSSSLRKHETTHTGEQPYKCKCGKAFSDLFSFQSHETTHSEEEPYECKECGKAFSSFKYFCRHERTHSEEKSYECQICGKAFSRFSYLKTHERTHTAEKPYECKQCRKAFFWPSFLLRHERTHTGERPYECKHCGKAFSRSSFCREHERTHTGEKPYE

SEQ ID NO: 11439 - protein, 1298 aa, Homo sapiens
MQRGAALCLRLWLCLGLLDGLVSGYSMTPPTLNITEESHVIDTGDSLSISCRGQHPLEWAWPGAQEAPATGDKDSEDTGVVRDCEGTDARPYCKVLLLHEVHANDTGSYVCYYKYIKARIEGTTAASSYVFVRDFEQPFINKPDTLLVNRKDAMWVPCLVSIPGLNVTLRSQSSVLWPDGQEVVWDDRRGMLVSTPLLHDALYLQCETTWGDQDFLSNPFLVHITGNELYDIQLLPRKSLELLVGEKLVLNCTVWAEFNSGVTFDWDYPGKQAERGKWVPERRSQQTHTELSSILTIHNVSQHDLGSYVCKANNGIQRFRESTEVIVHENPFISVEWLKGPILEATAGDELVKLPVKLAAYPPPEFQWYKDGKALSGRHSPHALVLKEVTEASTGTYTLALWNSAAGLRRNISLELVVNVPPQIHEKEASSPSIYSRHSRQALTCTAYGVPLPLSIQWHWRPWTPCKMFAQRSLRRRQQQDLMPQCRDWRAVTTQDAVNPIESLDTWTEFVEGKNKTVSKLVIQNANVSAMYKCVVSNKVGQDERLIYFYVTTIPDGFTIESKPSEELLEGQPVLLSCQADSYKYEHLRWYRLNLSTLHDAHGNPLLLDCKNVHLFATPLAASLEEVAPGARHATLSLSIPRVAPEHEGHYVCEVQDRRSHDKHCHKKYLSVQALEAPRLTQNLTDLLVNVSDSLEMQCLVAGAHAPSIVWYKDERLLEEKSGVDLADSNQKLSIQRVREEDAGRYLCSVCNAKGCVNSSASVAVEGSEDKGSMEIVILVGTGVIAVFFWVLLLLIFCNMRRPAHADIKTGYLSIIMDPGEVPLEEQCEYLSYDASQWEFPRERLHLGRVLGYGAFGKVVEASAFGIHKGSSCDTVAVKMLKEGATASEHRALMSELKILIHIGNHLNVVNLLGACTKPQGPLMVIVEFCKYGNLSNFLRAKRDAFSPCAEKSPEQRGRFRAMVELARLDRRRPGSSDRVLFARFSKTEGGARRASPDQEAEDLWLSPLTMEDLVCYSFQVARGMEFLASRKCIHRDLAARNILLSESDVVKICDFGLARDIYKDPDYVRKGSARLPLKWMAPESIFDKVYTTQSDVWSFGVLLWEIFSLGASPYPGVQINEEFCQRLRDGTRMRAPELATPAIRRIMLNCWSGDPKARPAFSELVEILGDLLQGRGLQEEEEVCMAPRSSQSSEEGSFSQVSTMALHIAQADAEDSPPSLQRHSLAARYYNWVSFPGCLARGAETRGSSRMKTFEEFPMTPTTYKGSVDNQTDSGMVLASEEFEQIESRHRQESGFR

SEQ ID NO: 11440 - protein, 506 aa, Homo sapiens
MTSGGSRFLWLLKILVIILVLGIVGFMFGSMFLQAVFSSPKPELPSPAPGVQKLKLLPEERLRNLFSYDGIWLFPKNQCKCEANKEQGGYNFQDAYGQSDLPAVKARRQAEFEHFQRREGLPRPLPLLVQPNLPFGYPVHGVEVMPLHTVPIPGLQFEGPDAPVYEVTLTASLGTLNTLADVPDSVVQGRGQKQLIISTSDRKLLKFILQHVTYTSTGYQHQKVDIVSLESRSSVAKFPVTIRHPVIPKLYDPGPERKLRNLVTIATKTFLRPHKLMIMLRSIREYYPDLTVIVADDSQKPLEIKDNHVEYYTMPFGKGWFAGRNLAISQVTTKYVLWVDDDFLFNEETKIEVLVDVLEKTELDVVGGSVLGNVFQFKLLLEQSENGACLHKRMGFFQPLDGFPSCVVTSGVVNFFLAHTERLQRVGFDPRLQRVAHSEFFIDGLGTLLVGSCPEVIIGHQSRSPVVDSELAALEKTYNTYRSNTLTRVQFKLALHYFKNHLQCAA

SEQ ID NO: 11441 - protein, 926 aa, Homo sapiens
MLQVHRTGLGRLGVSLSKGLHHKAVLAVRREDVNAWERRAPLAPKHIKGITNLGYKVLIQPSNRRAIHDKDYVKAGGILQEDISEACLILGVKRPPEEKLMSRKTYAFFSHTIKAQEANMGLLDEILKQEIRLIDYEKMVDHRGVRVVAFGQWAGVAGMINILHGMGLRLLALGHHTPFMHIGMAHNYRNSSQAVQAVRDAGYEISLGLMPKSIGPLTFVFTGTGNVSKGAQAIFNELPCEYVEPHELKEVSQTGDLRKVYGTVLSRHHHLVRKTDAVYDPAEYDKHPERYISRFNTDIAPYTTCLINGIYWEQNTPRLLTRQDAQSLLAPGKFSPAGVEGCPALPHKLVAICDISADTGGSIEFMTECTTIEHPFCMYDADQHIIHDSVEGSGILMCSIDNLPAQLPIEATECFGDMLYPYVEEMILSDATQPLESQNFSPVVRDAVITSNGTLPDKYKYIQTLRESRERAQSLSMGTRRKVLVLGSGYISEPVLEYLSRDGNIEITVGSDMKNQIEQLGKKYNINPVSMDICKQEEKLGFLVAKQDLVISLLPYVLHPLVAKACITNKVNMVTASYITPALKELEKSVEDAGITIIGELGLDPGLDHMLAMETIDKAKEVGATIESYISYCGGLPAPEHSNNPLRYKFSWSPVGVLMNVMQSATYLLDGKVVNVAGGISFLDAVTSMDFFPGLNLEGYPNRDSTKYAEIYGISSAHTLLRGTLRYKGYMKALNGFVKLGLINREALPAFRPEANPLTWKQLLCDLVGISPSSEHDVLKEAVLKKLGGDNTQLEAAEWLGLLGDEQVPQAESILDALSKHLVMKLSYGPEEKDMIVMRDSFGIRHPSGHLEHKTIDLVAYGDINGFSAMAKTVGLPTAMAAKMLLDGEIGAKGLMGPFSKEIYGPILERIKAEGIIYTTQSTIKP

SEQ ID NO: 11442 - protein, 619 aa, Homo sapiens
MTDKSIVILSLMVFHSSFINGKTCRRQLVEEWHPQPSSYVVNWTLTENICLDFYRDCWFLGVNTKIDTSGNQAVPQICPLQIQLGDILVISSEPSLQFPEINLMNVSETSFVGCVQNTTTEDQLLFGCRLKGMHTVNSKWLSVGTHYFITVMASGPSPCPLGLRLNVTVKQQFCQESLSSEFCSGHGKCLSEAWSKTYSCHCQPPFSGKYCQELDACSFKPCKNNGSCINKRENWDEQAYECVCHPPFTGKNCSEIIGQCQPHVCFHGNCSNITSNSFICECDEQFSGPFCEVSAKPCVSLLFWKRGICPNSSSAYTYECPKGSSSQNGETDVSEFSLVPCQNGTDCIKISNDVMCICSPIFTDLLCKSIQTSCESFPLRNNATCKKCEKDYPCSCISGFTEKNCEKAIDHCKLLSINCLNEEWCFNIIGRFKYVCIPGCTKNPCWFLKNVYLIHQHLCYCGVTFHGICQDKGPAQFEYVWQLGFAGSEGEKCQGVIDAYFFLAANCTEDATYVNDPEDNNSSCWFPHEGTKEICANGCSCLSEEDSQEYRYLCFLRWAGNMYLENTTDDQENECQHEAVCKDEINRPRRILNTVIPHQIQQHIERFIQHDQVGFIVRI

SEQ ID NO: 11443 - protein, 891 aa, Homo sapiens
MGALLLHPSRRGPAGVVASWTSSPAGRDGGVGIAGAWYFPRASSQAREMPQCPTLESQEGENSEEKGDSSKEDPKETVALAFVRENPGAQNGLQNAQQQGKKKRKKKRLVINLSSCRYESVRRAAQQYGFREGGEDDDWTLYWTDYSVSLERVMEMKSYQKINHFPGMSEICRKDLLARNMSRMLKMFPKDFRFFPRTWCLPADWGDLQTYSRSRKNKTYICKPDSGCQGKGIFITRTVKEIKPGEDMICQLYISKPFIIDGFKFDLRIYVLVTSCDPLRIFVYNEGLARFATTSYSRPCTDNLDDICMHLTNYSINKHSSNFSRDAHSGSKRKLSTFSAYLEDHSYNVEQIWRDIEDVIIKTLISAHPIIRHNYHTCFPNHTLNSACFEILGFDILLDHKLKPWLLEVNHSPSFSTDSRLDKEVKDGLLYDTLVLINLESCDKKKVLEEERQRGQFLQQCCSREMRIEEAKGFRAVQLKKTETYEKENCGGFRLIYPSLNSEKYEKFFQDNNSLFQNTVASRAREEYARQLIQELRLKREKKPFQMKKKVEMQGESAGEQVRKKGMRGWQQKQQQKDKAATQASKQYIQPLTLVSYTPDLLLSVRGERKNETDSSLNQEAPTEEASSVFPKLTSAKPFSSLPDLRNINLSSSKLEPSKPNFSIKEAKSASAVNVFTGTVHLTSVETTPESTTQLSISPKSPPTLAVTASSEYSGPETDRVVSFKCKKQQTPPHLTQKKMLKSFLPTKSKSFWESPNTNWTLLKSDMNKPHLISELLTKLQLSGKLSFFPAHYNPKLGMNNLSQNPSLPGECHSRSDSSGEKRQLDVSSLLLQSPQSYNVTLRDLLVIATPAQLDPRPCRSHASAMRDPCMQDQEAYSHCLISGQKGCERS

SEQ ID NO: 11444 - protein, 2315 aa, Homo sapiens
MRILKRFLACIQLLCVCRLDWANGYYRQQRKLVEEIGWSYTGALNQKNWGKKYPTCNSPKQSPINIDEDLTQVNVNLKKLKFQGWDKTSLENTFIHNTGKTVEINLTNDYRVSGGVSEMVFKASKITFHWGKCNMSSDGSEHSLEGQKFPLEMQIYCFDADRFSSFEEAVKGKGKLRALSILFEVGTEENLDFKAIIDGVESVSRFGKQAALDPFILLNLLPNSTDKYYIYNGSLTSPPCTDTVDWIVFKDTVSISESQLAVFCEVLTMQQSGYVMLMDYLQNNFREQQYKFSRQVFSSYTGKEEIHEAVCSSEPENVQADPENYTSLLVTWERPRVVYDTMIEKFAVLYQQLDGEDQTKHEFLTDGYQDLGAILNNLLPNMSYVLQIVAICTNGLYGKYSDQLIVDMPTDNPELDLFPELIGTEEIIKEEEEGKDIEEGAIVNPGRDSATNQIRKKEPQISTTTHYNRIGTKYNEAKTNRSPTRGSEFSGKGDVPNTSLNSTSQPVTKLATEKDISLTSQTVTELPPHTVEGTSASLNDGSKTVLRSPHMNLSGTAESLNTVSITEYEEESLLTSFKLDTGAEDSSGSSPATSAIPFISENISQGYIFSSENPETITYDVLIPESARNASEDSTSSGSEESLKDPSMEGNVWFPSSTDITAQPDVGSGRESFLQTNYTEIRVDESEKTTKSFSAGPVMSQGPSVTDLEMPHYSTFAYFPTEVTPHAFTPSSRQQDLVSTVNVVYSQTTQPVYNGETPLQPSYSSEVFPLVTPLLLDNQILNTTPAASSSDSALHATPVFPSVDVSFESILSSYDGAPLLPFSSASFSSELFRHLHTVSQILPQVTSATESDKVPLHASLPVAGGDLLLEPSLAQYSDVLSTTHAASETLEFGSESGVLYKTLMFSQVEPPSSDAMMHARSSGPEPSYALSDNEGSQHIFTVSYSSAIPVHDSVGVTYQGSLFSGPSHIPIPKSSLITPTASLLQPTHALSGDGEWSGASSDSEFLLPDTDGLTALNISSPVSVAEFTYTTSVFGDDNKALSKSEIIYGNETELQIPSFNEMVYPSESTVMPNMYDNVNKLNASLQETSVSISSTKGMFPGSLAHTTTKVFDHEISQVPENNFSVQPTHTVSQASGDTSLKPVLSANSEPASSDPASSEMLSPSTQLLFYETSASFSTEVLLQPSFQASDVDTLLKTVLPAVPSDPILVETPKVDKISSTMLHLIVSNSASSENMLHSTSVPVFDVSPTSHMHSASLQGLTISYASEKYEPVLLKSESSHQVVPSLYSNDELFQTANLEINQAHPPKGRHVFATPVLSIDEPLNTLINKLIHSDEILTSTKSSVTGKVFAGIPTVASDTFVSTDHSVPIGNGHVAITAVSPHRDGSVTSTKLLFPSKATSELSHSAKSDAGLVGGGEDGDTDDDGDDDDDDRGSDGLSIHKCMSCSSYRESQEKVMNDSDTHENSLMDQNNPISYSLSENSEEDNRVTSVSSDSQTGMDRSPGKSPSANGLSQKHNDGKEENDIQTGSALLPLSPESKAWAVLTSDEESGSGQGTSDSLNENETSTDFSFADTNEKDADGILAAGDSEITPGFPQSPTSSVTSENSEVFHVSEAEASNSSHESRIGLAEGLESEKKAVIPLVIVSALTFICLVVLVGILIYWRKCFQTAHFYLEDSTSPRVISTPPTPIFPISDDVGAIPIKHFPKHVADLHASSGFTEEFETLKEFYQEVQSCTVDLGITADSSNHPDNKHKNRYINIVAYDHSRVKLAQLAEKDGKLTDYINANYVDGYNRPKAYIAAQGPLKSTAEDFWRMIWEHNVEVIVMITNLVEKGRRKCDQYWPADGSEEYGNFLVTQKSVQVLAYYTVRNFTLRNTKIKKGSQKGRPSGRVVTQYHYTQWPDMGVPEYSLPVLTFVRKAAYAKRHAVGPVVVHCSAGVGRTGTYIVLDSMLQQIQHEGTVNIFGFLKHIRSQRNYLVQTEEQYVFIHDTLVEAILSKETEVLDSHIHAYVNALLIPGPAGKTKLEKQFQLLSQSNIQQSDYSAALKQCNREKNRTSSIIPVERSRVGISSLSGEGTDYINASYIMGYYQSNEFIITQHPLLHTIKDFWRMIWDHNAQLVVMIPDGQNMAEDEFVYWPNKDEPINCESFKVTLMAEEHKCLSNEEKLIIQDFILEATQDDYVLEVRHFQCPKWPNPDSPISKTFELISVIKEEAANRDGPMIVHDEHGGVTAGTFCALTTLMHQLEKENSVDVYQVAKMINLMRPGVFADIEQYQFLYKVILSLVSTRQEENPSTSLDSNGAALPDGNIAESLESLV

SEQ ID NO: 11445 - protein, 389 aa, Homo sapiens
MPGVANSGPSTSSRETANPCSRKKVHFGSIHDAVRAGDVKQLSEIVCLHWLLWHGADITHVTTRGWTASHIAAIRGQDACVQALIMNGANLTAQDDRGCTPLHLAATHGHSFTLQIMLRSGVDPSVTDKREWRPVHYAAFHGRLGCLQLLVKWGCSIEDVDYNGNLPVHLAAMEGHLHCFKFLVSRMSSATQVLKAFNDNGENVLDLAQRFFKQNILQFIQGAEYEGKDLEDQETLAFPGHVAAFKGDLGMLKKLVEDGVININERADNGSTPMHKAAGQGHIECLQWLIKMGADSNITNKAGERPSDVAKRFAHLAAVKLLEELQKYDIDDENEIDENDVKYFIRHGVEGSTDAKDDLCLSDLDKTDARRPSKNCRASWSMNDYVEKN

SEQ ID NO: 11446 - protein, 1896 aa, Homo sapiens
MPLPPRSLQVLLLLLLLLLLLPGMWAEAGLPRAGGGSQPPFRTFSASDWGLTHLVVHEQTGEVYVGAVNRIYKLSGNLTLLRAHVTGPVEDNEKCYPPPSVQSCPHGLGSTDNVNKLLLLDYAANRLLACGSASQGICQFLRLDDLFKLGEPHHRKEHYLSSVQEAGSMAGVLIAGPPGQGQAKLFVGTPIDGKSEYFPTLSSRRLMANEEDADMFGFVYQDEFVSSQLKIPSDTLSKFPAFDIYYVYSFRSEQFVYYLTLQLDTQLTSPDAAGEHFFTSKIVRLCVDDPKFYSYVEFPIGCEQAGVEYRLVQDAYLSRPGRALAHQLGLAEDEDVLFTVFAQGQKNRVKPPKESALCLFTLRAIKEKIKERIQSCYRGEGKLSLPWLLNKELGCINSPLQIDDDFCGQDFNQPLGGTVTIEGTPLFVDKDDGLTAVAAYDYRGRTVVFAGTRSGRIRKILVDLSNPGGRPALAYESVVAQEGSPILRDLVLSPNHQYLYAMTEKQVTRVPVESCVQYTSCELCLGSRDPHCGWCVLHSICSRRDACERADEPQRFAADLLQCVQLTVQPRNVSVTMSQVPLVLQAWNVPDLSAGVNCSFEDFTESESVLEDGRIHCRSPSAREVAPITRGQGDQRVVKLYLKSKETGKKFASVDFVFYNCSVHQSCLSCVNGSFPCHWCKYRHVCTHNVADCAFLEGRVNVSEDCPQILPSTQIYVPVGVVKPITLAARNLPQPQSGQRGYECLFHIPGSPARVTALRFNSSSLQCQNSSYSYEGNDVSDLPVNLSVVWNGNFVIDNPQNIQAHLYKCPALRESCGLCLKADPRFECGWCVAERRCSLRHHCAADTPASWMHARHGSSRCTDPKILKLSPETGPRQGGTRLTITGENLGLRFEDVRLGVRVGKVLCSPVESEYISAEQIVCEIGDASSVRAHDALVEVCVRDCSPHYRALSPKRFTFVTPTFYRVSPSRGPLSGGTWIGIEGSHLNAGSDVAVSVGGRPCSFSWRNSREIRCLTPPGQSPGSAPIIININRAQLTNPEVKYNYTEDPTILRIDPEWSINSGGTLLTVTGTNLATVREPRIRAKYGGIERENGCLVYNDTTMVCRAPSVANPVRSPPELGERPDELGFVMDNVRSLLVLNSTSFLYYPDPVLEPLSPTGLLELKPSSPLILKGRNLLPPAPGNSRLNYTVLIGSTPCTLTVSETQLLCEAPNLTGQHKVTVRAGGFEFSPGTLQVYSDSLLTLPAIVGIGGGGGLLLLVIVAVLIAYKRKSRDADRTLKRLQLQMDNLESRVALECKEAFAELQTDIHELTNDLDGAGIPFLDYRTYAMRVLFPGIEDHPVLKEMEVQANVEKSLTLFGQLLTKKHFLLTFIRTLEAQRSFSMRDRGNVASLIMTALQGEMEYATGVLKQLLSDLIEKNLESKNHPKLLLRRTESVAEKMLTNWFTFLLYKFLKECAGEPLFMLYCAIKQQMEKGPIDAITGEARYSLSEDKLIRQQIDYKTLTLNCVNPENENAPEVPVKGLDCDTVTQAKEKLLDAAYKGVPYSQRPKAADMDLEWRQGRMARIILQDEDVTTKIDNDWKRLNTLAHYQVTDGSSVALVPKQTSAYNISNSSTFTKSLSRYESMLRTASSPDSLRSRTPMITPDLESGTKLWHLVKNHDHLDQREGDRGSKMVSEIYLTRLLATKGTLQKFVDDLFETIFSTAHRGSALPLAIKYMFDFLDEQADKHQIHDADVRHTWKSNCLPLRFWVNVIKNPQFVFDIHKNSITDACLSVVAQTFMDSCSTSEHKLGKDSPSNKLLYAKDIPNYKSWVERYYADIAKMPAISDQDMSAYLAEQSRLHLSQFNSMSALHEIYSYITKYKDEILAALEKDEQARRQRLRSKLEQVVDTMALSS

SEQ ID NO: 11447 - protein, 256 aa, Homo sapiens
MCNTNMSVPTDGAVTTSQIPASEQETLVRPKPLLLKLLKSVGAQKDTYTMKEVLFYLGQYIMTKRLYDEKQQHIVYCSNDLLGDLFGVPSFSVKEHRKIYTMIYRNLVVVNQQESSDSGTSVSENRCHLEGGSDQKDLVQELQEEKPSSSHLVSRPSTSSRRRAISETEENSDELSGERQRKRHKSDSISLSFDESLALCVIREICCERSSSSESTGTPSNPDLDAGVYQVTVYQAGESDTDSFEEDPEISLADYW

SEQ ID NO: 11448 - protein, 522 aa, Homo sapiens
MCNTNMSVPTDGAVTTSQIPASEQETLVRPKPLLLKLLKSVGAQKDTYTMKERWSFTMLPRLVWNSWAQGICLPRPPKVLDLQVLFYLGQYIMTKRLYDEKQQHIVYCSNDLLGDLFGVPSFSVKEHRKIYTMIYRNLVVVNQQESSDSGTSVSENRCHLEGGSDQKDLVQELQEEKPSSSHLVSRPSTSSRRRAISETEENSDELSGERQRKRHKSDSISLSFDESLALCVIREICCERSSSSESTGTPSNPDLDAGVSEHSGDWLDQDSVSDQFSVEFEVESLDSEDYSLSEEGQELSDEDDEVYQVTVYQAGESDTDSFEEDPEISLADYWKCTSCNEMNPPLPSHCNRCWALRENWLPEDKGKDKGEISEKAKLENSTQAEEGFDVPDCKKTIVNDSRESCVEENDDKITQASQSQESEDYSQPSTSSSIIYSSQEDVKEFEREETQDKEESVESSLPLNAIEPCVICQGRPKNGCIVHGKTGHLMACFTCAKKLKKRNKPCPVCRQPIQMIVLTYFP

SEQ ID NO: 11449 - protein, 888 aa, Homo sapiens
MNHLNVLAKALYDNVAESPDELSFRKGDIMTVLEQDTQGLDGWWLCSLHGRQGIVPGNRLKILVGMYDKKPAGPGPGPPATPAQPQPGLHAPAPPASQYTPMLPNTYQPQPDSVYLVPTPSKAQQGLYQVPGPSPQFQSPPAKQTSTFSKQTPHHPFPSPATDLYQVPPGPGGPAQDIYQVPPSAGMGHDIYQVPPSMDTRSWEGTKPPAKVVVPTRVGQGYVYEAAQPEQDEYDIPRHLLAPGPQDIYDVPPVRGLLPSQYGQEVYDTPPMAVKGPNGRDPLLEVYDVPPSVEKGLPPSNHHAVSKCQGNARARLRLWGVWVYDVPPSVSKDVPDGPLLREETYDVPPAFAKAKPFDPARTPLVLAAPPPDSPPAEDVYDVPPPAPDLYDVPPGLRRPGPGTLYDVPRERVLPPEVADGGVVDSGVYAVPPPAEREAPAEGKRLSASSTGSTRSSQSASSLEVAGPGREPLELEVAVEALARLQQGVSATVAHLLDLAGSAGATGSWRSPSEPQEPLVQDLQAAVAAVQSAVHELLEFARSAVGNAAHTSDRALHAKLSRQLQKMEDVHQTLVAHGQALDAGRGGSGATLEDLDRLVACSRAVPEDAKQLASFLHGNASLLFRRTKATAPGPEGGGTLHPNPTDKTSSIQSRPLPSPPKFTSQDSPDGQYENSEGGWMEDYDYVHLQGKEEFEKTQKELLEKGSITRQGKSQLELQQLKQFERLEQEVSRPIDHDLANWTPAQPLAPGRTGGLGPSDRQLLLFYLEQCEANLTTLTNAVDAFFTAVATNQPPKIFVAHSKFVILSAHKLVFIGDTLSRQAKAADVRSQVTHYSNLLCDLLRGIVATTKAAALQYPSPSAAQDMVERVKELGHSTQQFRRVLGQLAAA

SEQ ID NO: 11450 - protein, 888 aa, Homo sapiens
MHCPGEAPLAAPRPTPKDPCLRNVLAKALYDNVAESPDELSFRKGDIMTVLEQDTQGLDGWWLCSLHGRQGIVPGNRLKILVGMYDKKPAGPGPGPPATPAQPQPGLHAPAPPASQYTPMLPNTYQPQPDSVYLVPTPSKAQQGLYQVPGPSPQFQSPPAKQTSTFSKQTPHHPFPSPATDLYQVPPGPGGPAQDIYQVPPSAGMGHDIYQVPPSMDTRSWEGTKPPAKVVVPTRVGQGYVYEAAQPEQDEYDIPRHLLAPGPQDIYDVPPVRGLLPSQYGQEVYDTPPMAVKGPNGRDPLLEVYDVPPSVEKGLPPSNHHAVYDVPPSVSKDVPDGPLLREETYDVPPAFAKAKPFDPARTPLVLAAPPPDSPPAEDVYDVPPPAPDLYDVPPGLRRPGPGTLYDVPRERVLPPEVADGGVVDSGVYAVPPPAEREAPAEGKRLSASSTGSTRSSQSASSLEVAGPGREPLELEVAVEALARLQQGVSATVAHLLDLAGSAGATGSWRSPSEPQEPLVQDLQAAVAAVQSAVHELLEFARSAVGNAAHTSDRALHAKLSRQLQKMEDVHQTLVAHGQALDAGRGGSGATLEDLDRLVACSRAVPEDAKQLASFLHGNASLLFRRTKATAPGPEGGGTLHPNPTDKTSSIQSRPLPSPPKFTSQDSPDGQYENSEGGWMEDYDYVHLQGKEEFEKTQKELLEKGSITRQGKSQLELQQLKQFERLEQEVSRPIDHDLANWTPAQPLAPGRTGGLGPSDRQLLLFYLEQCEANLTTLTNAVDAFFTAVATNQPPKIFVAHSKFVILSAHKLVFIGDTLSRQAKAADVRSQVTHYSNLLCDLLRGIVATTKAAALQYPSPSAAQDMVERVKELGHSTQQFRRVLGQLAAA

SEQ ID NO: 11451 - protein, 716 aa, Homo sapiens
MERTAGKELALAPLQDWGEETEDGAVYSVSLRRQRSQRRSPAEGPGGSQAPSPIANTFLHYRTSKVRVLRAARLERLVGELVFGDREQDPSFMPAFLATYRTFVPTACLLGFLLPPMPPPPPPGVEIKKTAVQDLSFNKNLRAVVSVLGSWLQDHPQDFRDHPAHSDLGSVRTFLGWAAPGSAEAQKAEKLLEDFLEEAEREQEEEPPQVWTGPPRVAQTSDPDSSEACAEEEEGLMPQGPQLLDFSVDEVAEQLTLIDLELFSKVRLYECLGSVWSQRDRPGAAGASPTVRATVAQFNTVTGCVLGSVLGAPGLAAPQRAQRLEKWIRIAQRCRELRNFSSLRAILSALQSNPIYRLKRSWGAVSREPLSTFRKLSQIFSDENNHLSSREILFQEEATEGSQEEDNTPGSLPSKPPPGPVPYLGTFLTDLVMLDTALPDMLEGDLINFEKRRKEWEILARIQQLQRRCQSYTLSPHPPILAALHAQNQLTEEQSYRLSRVIEPPAASCPSSPRIRRRISLTKRLSAKLAREKSSSPSGSPGDPSSPTSSLCISPSVSPGSPPSSPRSRDAPAGSPPASPGPQGPSTKLPLSLDLPSPRPFALPLGSPRIPLPAQQSSEARVIRVSIDNDHGNLYRSILLTSQDKAPSVVRRALQKHNVPQPWACDYQLFQVLPGDRVLLIPDNANVFYAMSPVAPRDFMLRRKEGTRNTLSVSPS

SEQ ID NO: 11452 - protein, 122 aa, Homo sapiens
MTSPEIASLSWGQMKVKGSNTTYKDCKVWPGGSRTWDWRETGTEHSPGVQPADVKEVVEKGVQTLVIGRGMSEALKVPSSTVEYLKKHGIDVRVLQTEQAVKEYNALVAQGVRVGGVFHSTC

SEQ ID NO: 11453 - protein, 505 aa, Homo sapiens
MKIAVIGQSLFGQEVYCHLRKEGHEVVGVFTVPDKDGKADPLGLEAEKDGVPVFKYSRWRAKGQALPDVVAKYQALGAELNVLPFCSQFIPMEIISAPRHGSIIYHPSLLPRHRGASAINWTLIHGDKKGGFSIFWADDGLDTGDLLLQKECEVLPDDTVSTLYNRFLFPEGIKGMVQAVRLIAEGKAPRLPQPEEGATYEGIQKKETAKINWDQPAEAIHNWIRGNDKVPGAWTEACEQKLTFFNSTLNTSGLVPEGDALPIPGAHRPGVVTKAGLILFGNDDKMLLVKNIQLEDGKMILASNFFKGAASSVLELTEAELVTAEAVRSVWQRILPKVLEVEDSTDFFKSGAASVDVVRLVEEVKELCDGLELENEDVYMASTFGDFIQLLVRKLRGDDEEGECSIDYVEMAVNKRTVRMPHQLFIGGEFVDAEGAKTSETINPTDGSVICQVSLAQVTDVDKAVAAAKDAFENGRWGKISARDRGRLMYRAPPSPSTRPDPTAT

SEQ ID NO: 11454 - protein, 902 aa, Homo sapiens
MKIAVIGQSLFGQEVYCHLRKEGHEVVGVFTVPDKDGKADPLGLEAEKDGVPVFKYSRWRAKGQALPDVVAKYQALGAELNVLPFCSQFIPMEIISAPRHGSIIYHPSLLPRHRGASAINWTLIHGDKKGGFSIFWADDGLDTGDLLLQKECEVLPDDTVSTLYNRFLFPEGIKGMVQAVRLIAEGKAPRLPQPEEGATYEGIQKKETAKINWDQPAEAIHNWIRGNDKVPGAWTEACEQKLTFFNSTLNTSGLVPEGDALPIPGAHRPGVVTKAGLILFGNDDKMLLVKNIQLEDGKMILASNFFKGAASSVLELTEAELVTAEAVRSVWQRILPKVLEVEDSTDFFKSGAASVDVVRLVEEVKELCDGLELENEDVYMASTFGDFIQLLVRKLRGDDEEGECSIDYVEMAVNKRTVRMPHQLFIGGEFVDAEGAKTSETINPTDGSVICQVSLAQVTDVDKAVAAAKDAFENGRWGKISARDRGRLMYRLADLMEQHQEELATIEALDAGAVYTLALKTHVGMSIQTFRYFAGWCDKIQGSTIPINQARPNRNLTLTRKEPVGVCGIIIPWNYPLMMLSWKTAACLAAGNTVVIKPAQVTPLTALKFAELTLKAGIPKGVVNVLPGSGSLVGQRLSDHPDVRKIGFTGSTEVGKHIMKSCAISNVKKVSLELGGKSPLIIFADCDLNKAVQMGMSSVFFNKGENCIAAGRLFVEDSIHDEFVRRVVEEVRKMKVGNPLDRDTDHGPQNHHAHLVKLMEYCQHGVKEGATLVCGGNQVPRPGFFFEPTVFTDVEDHMFIAKEESFGPVMIISRFADGDLDAVLSRANATEFGLASGVFTRDINKALYVSDKLQAGTVFVNTYNKTDVAAPFGGFKQSGFGKDLGEAALNEYLRVKTVTFEY

SEQ ID NO: 11455 - protein, 754 aa, Homo sapiens
MSPEPVPPPPPPQCPGCDRAEPIAQRLEEGDEAFRAGDYEMAAELFRSMLAGLAQPDRGLCLRLGDALARAGRLPEALGAFRGAARLGALRPEELEELAGGLVRAVGLRDRPLSAENPGGEPEAPGEGGPAPEPRAPRDLLGCPRCRRLLHKPVTLPCGLTVCKRCVEPGPARPQVRRVNVVLSGLLEKCFPAECRLRRLAGQARSLQRQQQPEAALLRCDQALELAPDDNSLLLLRAELYLTMKNYEQALQDASAACQNEPLLIKGHQVKAQALSGLGRSKEVLKEFLYCLALNPECNSVKKEAQKVMCEVLFSATANVHENLTSSIQSRLKAQGHSHMNAQALLEEGDAGSSENSSEKSDMLGNTNSSVLYFILGLHFEEDKKALESILPTAPSAGLKRQFPDDVEDAPDLNAPGKIPKKDLSLQRSPNSETEESQGLSLDVTDFECALCMRLLFEPVTTPCGHTFCLKCLERCLDHAPHCPLCKDKLSELLASRNFNITVLAEELIFRYLPDELSDRKRIYDEEMSELSNLTRDVPIFVCAMAFPTVPCPLHVFEPRYRLMIRRCMETGTKRFGMCLSAEHAGLSEYGCMLEIKDVRTFPDGSSVVDAIGISRFRVLSHRHRDGYNTADIEYLEDEKVEGPEYEELAALHDSVHQQSVSWFASLQDRMKEQILSHFGVMPDREPEPQSNPSGPAWSWWILAVLPLERKAQLAILGMTSLKERLLAIRRILVIITRKMNSRQELANARERNN

SEQ ID NO: 11456 - protein, 1250 aa, Homo sapiens
MRRGGWRKRAENDGWETWGGYMAAKVQKLEEQFRSDAAMQKDGTSSTIFSGVAIYVNGYTDPSAEELRKLMMLHGGQYHVYYSRSKTTHIIATNLPNAKIKELKGEKVIRPEWIVESIKAGRLLSYIPYQLYTKQSSVQKGLSFNPVCRPEDPLPGPSNIAKQLNNRVNHIVKKIETENEVKVNGMNSWNEEDENNDFSFVDLEQTSPGRKQNGIPHPRGSTAIFNGHTPSSNGALKTQDCLVPMVNSVASRLSPAFSQEEDKAEKSSTDFRDCTLQQLQQSTRNTDALRNPHRTNSFSLSPLHSNTKINGAHHSTVQGPSSTKSTSSVSTFSKAAPSVPSKPSDCNFISNFYSHSRLHHISMWKCELTEFVNTLQRQSNGIFPGREKLKKMKTGRSALVVTDTGDMSVLNSPRHQSCIMHVDMDCFFVSVGIRNRPDLKGKPVAVTSNRGTGRAPLRPGANPQLEWQYYQNKILKGKADIPDSSLWENPDSAQANGIDSVLSRAEIASCSYEARQLGIKNGMFFGHAKQLCPNLQAVPYDFHAYKEVAQTLYETLASYTHNIEAVSCDEALVDITEILAETKLTPDEFANAVRMEIKDQTKCAASVGIGSNILLARMATRKAKPDGQYHLKPEEVDDFIRGQLVTNLPGVGHSMESKLASLGIKTCGDLQYMTMAKLQKEFGPKTGQMLYRFCRGLDDRPVRTEKERKSVSAEINYGIRFTQPKEAEAFLLSLSEEIQRRLEATGMKGKRLTLKIMVRKPGAPVETAKFGGHGICDNIARTVTLDQATDNAKIIGKAMLNMFHTMKLNISDMRGVGIHVNQLVPTNLNPSTCPSRPSVQSSHFPSGSYSVRDVFQVQKAKKSTEEEHKEVFRAAVDLEISSASRTCTFLPPFPAHLPTSPDTNKAESSGKWNGLHTPVSVQSRLNLSIEVPSPSQLDQSVLEALPPDLREQVEQVCAVQQAESHGDKKKEPVNGCNTGILPQPVGTVLLQIPEPQESNSDAGINLIALPAFSQVDPEVFAALPAELQRELKAAYDQRQRQGENSTHQQSASASVPKNPLLHLKAAVKEKKRNKKKKTIGSPKRIQSPLNNKLLNSPAKTLPGACGSPQKLIDGFLKHEGPPAEKPLEELSASTSGVPGLSSLQSDPAGCVRPPAPNLAGAVEFNDVKTLLREWITTISDPMEEDILQVVKYCTDLIEEKDLEKLDLVIKYMKRLMQQSVESVWNMAFDFILDNVQVVLQQTYGSTLKVT

SEQ ID NO: 11457 - protein, 589 aa, Homo sapiens
MSQEGDYGRWTISSSDESEEEKPKPDKPSTSSLLCARQGAANEPRYTCSEAQKAAHKRKISPVKFSNTDSVLPPKRQKSGSQEDLGWCLSSSDDELQPEMPQKQAEKVVIKKEKDISAPNDGTAQRTENHGAPACHRLKEEEDEYETSGEGQDIWDMLDKGNPFQFYLTRVSGVKPKYNSGALHIKDILSPLFGTLVSSAQFNYCFDVDWLVKQYPPEFRKKPILLVHGDKREAKAHLHAQAKPYENISLCQAKLDIAFGTHHTKMMLLLYEEGLRVVIHTSNLIHADWHQKTQGIWLSPLYPRIADGTHKSGESPTHFKADLISYLMAYNAPSLKEWIDVIHKHDLSETNVYLIGSTPGRFQGSQKDNWGHFRLKKLLKDHASSMPNAESWPVVGQFSSVGSLGADESKWLCSEFKESMLTLGKESKTPGKSSVPLYLIYPSVENVRTSLEGYPAGGSLPYSIQTAEKQNWLHSYFHKWSAETSGRSNAMPHIKTYMRPSPDFSKIAWFLVTSANLSKAAWGALEKNGTQLMIRSYELGVLFLPSAFAPAKRIKDEVEASFSGSRQFQSETEVLRWQPGANGHLSCAI

SEQ ID NO: 11458 - protein, 321 aa, Homo sapiens
MGELPLDINIQEPRWDQSTFLGRARHFFTVTDPRNLLLSGAQLEASRNIVQNYRAGVVTPGITEDQLWRAKYVYDSAFHPDTGEKVVLIGRMSAQVPMNMTITGCMLTFYRKTPTVVFWQWVNQSFNAIVNYSNRSGDTPITVRQLGTAYVSATTGAVATALGLKSLTKHLPPLVGRFVPFAAVAAANCINIPLMRQRELQVGIPVADEAGQRLGYSVTAAKQGIFQVVISRICMAIPAMAIPPLIMDTLEKKDFLKRRPWLGAPLQVGLVGFCLVFATPLCCALFPQKSSIHISNLEPELRAQIHEQNPSVEVVYYNKGL

SEQ ID NO: 11459 - protein, 329 aa, Homo sapiens
MRPPPALALAGLCLLALPAAAASYFGLTGREVLTPFPGLGTAAAPAQGGAHLKQCDLLKLSRRQKQLCRREPGLAETLRDAAHLGLLECQFQFRHERWNCSLEGRMGLLKRGFKETAFLYAVSSAALTHTLARACSAGRMERCTCDDSPGLESRQAWQWGVCGDNLKYSTKFLSNFLGSKRGNKDLRARADAHNTHVGIKAVKSGLRTTCKCHGVSGSCAVRTCWKQLSPFRETGQVLKLRYDSAVKVSSATNEALGRLELWAPARQGSLTKGLAPRSGDLVYMEDSPSFCRPSKYSPGTAGWSAVARSQLITTSTSRIQAILPSQLPE

SEQ ID NO: 11460 - protein, 690 aa, Homo sapiens
MMRSRSKSPRRPSPTARGANCDVELLKTTTRDREELKCMLEKYERHLAEIQGNVKVLKSERDKIFLLYEQAQEEITRLRREMMKSCKSPKSTTAHAILRRVETERDVAFTDLRRMTTERDSLRERLKIAQETAFNEKAHLEQRIEELECTVHNLDDERMEQMSNMTLMKETISTVEKEMKSLARKAMDTESELGRQKAENNSLRLLYENTEKDLSDTQRHLAKKKYELQLTQEKIMCLDEKIDNFTRQNIAQREEISILGGTLNDLAKEKECLQACLDKKSENIASLGESLAMKEKTISGMKNIIAEMEQASRQCTEALIVCEQDVSRMRRQLDETNDELAQIARERDILAHDNDNLQEQFAKAKQENQALSKKLNDTHNELNDIKQKVQDTNLEVNKLKNILKSEESENRQMMEQLRKANEDAENWENKARQSEADNNTLKLELITAEAEGNRLKEKVDSLNREVEQHLNAERSYKSQISTLHKSVVKMEEELQKVQFEKVSALADLSSTRELCIKLDSSKELLNRQLVAKDQEIEMRENELDSAHSEIELLRSQMANERISMQNLEALLVANRDKEYQSQIALQEKESEIQLLKEHLCLAENKMAIQSRDVAQFRNVVTQLEADLDITKRQLGTERFERERAVQELRRQNYSSNAYHMSSTMKPNTKCHSPERAHHRSPDRGLDRSLE

SEQ ID NO: 11461 - protein, 197 aa, Homo sapiens
MTLDHQIINPTLKWSQPAVPSGGPLVQHAHTTLDSDAGLTENPLTKLLAIGKEDDNAQWHLSGSILDVYSGEQGISPINMGLTSASCPSSLPMKREITETDTRALAKERQKKDNHNLIERRRRYNINYRIKELGTLIPKSNDPDMRWNKGTILKASVEYIKWLQKEQQRARELEHRQKKLEQANRRLLLRIQVFIRM

SEQ ID NO: 11462 - protein, 530 aa, Homo sapiens
MMTPQVITPQQMQQILQQQVLSPQQLQALLQQQQAVMLQQQQLQEFYKKQQEQLHLQLLQQQQQQQQQQQQQQQQQQQQQQQQQQQQQQQQQQQQQQQQHPGKQAKEQQQQQQQQQQLAAQQLVFQQQLLQMQQLQQQQHLLSLQRQGLISIPPGQAALPVQSLPQAGLSPAEIQQLWKEVTGVHSMEDNGIKHGGLDLTTNNSSSTTSSNTSKASPPITHHSIVNGQSSVLSARRDSSSHEETGASHTLYGHGVCKWPGCESICEDFGQFLKHLNNEHALDDRSTAQCRVQMQVVQQLEIQLSKERERLQAMMTHLHMRPSEPKPSPKPAIMESSDRQLTLNEIYSWFTRTFAYFRRNAATWKNAVRHNLSLHKCFVRVENVKGAVWTVDEVEYQKRRSQKITGSPTLVKNIPTSLGYGAALNASLQAALAESSLPLLSNPGLINNASSGLLQAVHEDLNGSLDHIDSNGNSSPGCSPQPHIHSIHVKEEPVIAEDEDCPMSLVTTANHSPELEDDREIEEEPLSEDLE

SEQ ID NO: 11463 - protein, 694 aa, Homo sapiens
MMQESATETISNSSMNQNGMSTLSSQLDAGSRDGRSSGDTSSEVSTVELLHLQQQQALQAARQLLLQQQTSGLKSPKSSDKQRPLQVPVSVAMMTPQVITPQQMQQILQQQVLSPQQLQALLQQQQAVMLQQQQQQQQQQQQQQQQQQQQQQQQQQQQQQQQQQQQQQQQQHPGKQAKEQQQQQQQQQLAAQQLVFQQQLLQMQQLQQQQHLLSLQRQGLISIPPGQAALPVQSLPQAGLSPAEIQQLWKEVTGVHSMEDNGIKHGGLDLTTNNSSSTTSSNTSKASPPITHHSIVNGQSSVLSARRDSSSHEETGASHTLYGHGVCKWPGCESICEDFGQFLKHLNNEHALDDRSTAQCRVQMQVVQQLEIQLSKERERLQAMMTHLHMRPSEPKPSPKPLNLVSSVTMSKNMLETSPQSLPQTPTTPTAPVTPITQGPSVITPASVPNVGAIRRRHSDKYNIPMSSEIAPNYEFYKNADVRPPFTYATLIRQAIMESSDRQLTLNEIYSWFTRTFAYFRRNAATWKNAVRHNLSLHKCFVRVENVKGAVWTVDEVEYQKRRSQKITGSPTLVKNIPTSLGYGAALNASLQAALAESSLPLLSNPGLINNASSGLLQAVHEDLNGSLDHIDSNGNSSPGCSPQPHIHSIHVKEEPVIAEDEDCPMSLVTTANHSPELEDDREIEEEPLSEDLE

SEQ ID NO: 11464 - protein, 825 aa, Homo sapiens
MPAPIRLRELIRTIRTARTQAEEREMIQKECAAIRSSFREEDNTYRCRNVAKLLYMHMLGYPAHFGQLECLKLIASQKFTDKRIGYLGAMLLLDERQDVHLLMTNCIKNDLNHSTQFVQGLALCTLGCMGSSEMCRDLAGEVEKLLKTSNSYLRKKAALCAVHVIRKVPELMEMFLPATKNLLNEKNHGVLHTSVVLLTEMCERSPDMLAHFRKNEKLVPQLVRILKNLIMSGYSPEHDVSGISDPFLQVRILRLLRILGRNDDDSSEAMNDILAQVATNTETSKNVGNAILYETVLTIMDIKSESGLRVLAINILGRFLLNNDKNIRYVALTSLLKTVQTDHNAVQRHRSTIVDCLKDLDVSIKRRAMELSFALVNGNNIRGMMKELLYFLDSCEPEFKADCASGIFLAAEKYAPSKRWHIDTIMRVLTTAGSYVRDDAVPNLIQLITNSVEMHAYTVQRLYKAILGDYSQQPLVQVAAWCIGEYGDLLVSGQCEEEEPIQVTEDEVLDILESVLISNMSTSVTRGYALTAIMKLSTRFTCTVNRIKKVVSIYGSSIDVELQQRAVEYNALFKKYDHMRSALLERMPVMEKVTTNGPTEIVQTNGETEPAPLETKPPPSGPQPTSQANDLLDLLGGNDITPVIPTAPTSKPSSAGGELLDLLGDINLTGAPAAAPAPASVPQISQPPFLLDGLSSQPLFNDIAAGIPSITAYSKNGLKIEFTFERSNTNPSVTVITIQASNSTELDMTDFVFQAAVPKTFQLQLLSPSSSIVPAFNTGTITQVIKVLNPQKQQLRMRIKLTYNHKGSAMQDLAEVNNFPPQSWQ

SEQ ID NO: 11465 - protein, 1256 aa, Homo sapiens
MKRNGSRNCLNRRSRFGSRERDWLREDVKRGCVYLYGADTTTATTTTTTSSSSSSSSSSSDLHLVLCTVETPASEICAGEGRESLYLQLHGDLVRRLEPTERPLQIVYDYLSRLGFDDPVRIQEEATNPDLGCMIRFYGEKPCHMDRLDRILLSGIYNVRKGKTQLHKWAERLVVLCGTCLIVSSVKDCQTGKMHILPLVGGKIEEVKRRQYSLAFSSAGAQAQTYHVSFETLAEYQRWQRQASKVVSQRISTVDLSCYSLEEVPEHLFYSQDITYLNLRHNFMQLERPGGLDTLYKFSQLKGLNLSHNKLGLFPILLCEISTLTELNLSCNGFHDLPSQIGNLLNLQTLCLDGNFLTTLPEELGNLQQLSSLGISFNNFSQIPEVYEKLTMLDRVVMAGNCLEVLNLGVLNRMNHIKHVDLRMNHLKTMVIENLEGNKHITHVDLRDNRLTDLDLSSLCSLEQLHCGRNQLRELTLSGFSLRTLYASSNRLTAVNVYPVPSLLTFLDLSRNLLECVPDWACEAKKIEVLDVSYNLLTEVPVRILSSLSLRKLMLGHNHVQNLPTLVEHIPLEVLDLQHNALTRLPDTLFSKALNKLNKLEQLEELNLSGNKLKTIPTTIANCKRLHTLVAHSNNISIFPEILQLPQIQFVDLSCNDLTEILIPEALPATLQDLDLTGNTNLVLEHKTLDIFSHITTLKIDQKPLPTTDSTVTSTFWSHGLAEMAGQRNKLCVSALAMDSFAEGVGAVYGMFDGDRNEELPRLLQCTMADVLLEEVQQSTNDTVFMANTFLVSHRKLGMAGQKLGSSALLCYIRPDTADPASSFSLTVANVGTCQAVLCRGGKPVPLSKVFSLEQDPEEAQRVKDQKAIITEDNKVNGVTCCTRMLGCTYLYPWILPKPHISSTPLTIQDELLILGNKALWEHLSYTEAVNAVRHVQDPLAAAKKLCTLAQSYGCQDNVGAMVVYLNIGEEGCTCEMNGLTLPGPVGFASTTTIKDAPKPATPSSSSGIASEFSSEMSTSEVSSEVGSTASDEHNAGGLDTALLPRPERRCSLHPTPTSGLFQRQPSSATFSSNQSDNGLDSDDDQPVEGVITNGSKVEVEVDIHCCRGRDLENSPPLIESSPTLCSEEHARGSCFGIRRQNSVNSGMLLPMSKDRMELQKSPSTSCLYGKKLSNGSIVPLEDSLNLIEVATEVPKRKTGYFAAPTQMEPEDQFVVPHDLEEEVKEQMKQHQDSRLEPEPHEEDRTEPPEEFDTAL

SEQ ID NO: 11466 - protein, 805 aa, Homo sapiens
MKDRSSTPPLHVHVDENTPVHVHIKKLPKPSATSSQKSHKRGMKGDTVNVRRSVRVKTKNPPHCLEITPPSSEKLVSVMRLSDLSTEDDDSGHCKMNRYDKKIDSLMNAVGCLKSEVKMQKGERQMAKRFLEERKEELEEVAHELAETEHENTVLRHNIERMKEEKDFTILQKKHLQQEKECLMSKLVEAEMDGAAAAKQVMALKDTIGKLKTEKQMTCTDINTLTRQKELLLQKLSTFEETNRTLRDLLREQHCKEDSERLMEQQGALLKRLAEADSEKARLLLLLQDKDKEVEELLQEIQCEKAQAKTASELSKSMESMRGHLQAQLRSKEAENSRLCMQIKNLERSGNQHKAEVEAIMEQLKELKQKGDRDKESLKKAIRAQKERAEKSEEYAEQLHVQLADKDLYVAEALSTLESWRSRYNQVVKEKGDLELEIIVLNDRVTDLVNQQQTLEEKMREDRDSLVERLHRQTAEYSAFKLENERLKASFAPMEDKLNQAHLEVQQLKASVKNYEGMIDNYKSQVMKTRLEADEVAAQLERCDKENKILKDEMNKEIEAARRQFQSQLADLQQLPDILKITEAKLAECQDQLQGYERKNIDLTAIISDLRSRIEHQGDKLEMAREKHQASQKENKQLSLKVDELERKLEATSAQNIEFLQVIAKREEAIHQSQLRLEEKTRECGTLARQLESAIEDARRQVEQTKEHALSKERAAQNKILDLETQLSRTKTELSQLRRSRDDADRRYQSRLQDLKDRLEQSESTNRSMQNYVQFLKSSYANVFGDGPYSTFLTSSPIRSRSPPA

SEQ ID NO: 11467 - protein, 666 aa, Homo sapiens
MNTGRDSQSPDSAKGFRSVRPNLQDKRSPTQSQITVNGNSGGAVSPMSYYQRPFSPSAYSLPASLNSSIVMQHGTSLDSTDTYPQHAQSLDGTTSSSIPLYRSSEEEKRVTVIKAPHYPGIGPVDESGIPTAIRTTVDRPKDWYKTMFKQIHMVHKPDDDTDMYNTPYTYNAGLYNPPYSAQSHPAAKTQTYRPLSKSHSDNSPNAFKDASSPVPPPHVPPPVPPLRPRDRSSTEKHDWDPPDRKVDTRKFRSEPRSIFEYEPGKSSILQHERPTDRINPDDIDLENEPWYKFFSELEFGRPPPKKPLDYVQDHSSGVFNEASLYQSSIDRSLERPMSSASMASDFRKRRKSEPAVGPPRGLGDQSASRTSPGRVDLPGSSTTLTKSFTSSSPSSPSRAKDRESPRSYSSTLTDMGRSAPRERRGTPEKEKLPAKAVYDFKAQTSKELSFKKGDTVYILRKIDQNWYEGEHHGRVGIFPISYVEKLTPPEKAQPARPPPPAQPGEIGEAIAKYNFNADTNVELSLRKGDRVILLKRVDQNWYEGKIPGTNRQGIFPVSYVEVVKKNTKGAEDYPDPPIPHSYSSDRIHSLSSNKPQRPVFTHENIQGGGEPFQALYNYTPRNEDELELRESDVIDVMEKCDDGWFVGTSRRTKFFGTFPGNYVKRL

SEQ ID NO: 11468 - protein, 796 aa, Homo sapiens
MSPEKQHREEDEVDSVLLSASKILNSSEGVKESGCSDTEYGCIAESENQIQPQSALKVLQQQLESFQALRMQTLQNVSMPTENQEENLSMEKSHHFEDSKTLHSVEEKLSGDSVNSLPQSVNVPSQIHSEDTLTLRTSTDNLSSNIIIHPSENSDILKNYNNFYRFLPTAPPNVMSQADTVILDKSKITVPFLKHGFCENLDDICHSIKQMKEELQKSHDGEVALTNELQTLQTDPDVHRNGKYDMSPIHQDKMNFIKEENLDGNLNEDIKSKRISELEALVKKLLPFRETVSKFHVHFCRKCKKLSKSEMHRGKKNEKNNKEIPITGKNITDLKFHSRVPRYTLSFLDQTKHEMKDKERQPFLVKQGSIISENEKTSKVNSVTEQCVAKIQYLQNYLKESVQIQKKVMELESENLNLKSKMKPLIFTTQSLIQKVETYEKQLKNLVEEKSTIQSKLSKTEEYSKECLKEFKKIISKYNVLQGQNKTLEEKNIQLSLEKQQMMEALDQLKSKEHKTQSDMAIVNNENNRMSIEMEAMKTNILLIQDEKEMLEKKTHQLLKEKSSLGNELKESQLEIIQLKEKERLAKTEQETLLQIIETVKDEKLNLETTLQESTAARQIMEREIENIQTYQSTAEENFLQEIKNAKSEASIYKNSLSEIGKECEMLSKMVMETKTDNQILKEELKKHSQENIKFENSISRLTEDKILLENYVRSIENERDTLEFEMRHLQREYLSLSDKICNQHNDPSKTTYISRREKFHFDNYTHEDTSSPQSRPLASDLKGYFKVKDRTLKHH

SEQ ID NO: 11469 - protein, 1810 aa, Homo sapiens
MDCPLSAPTPPPPLVRFFRAPLPACVPPTLLPVLPAALCRARVRAQEPEFSYGCAEGSCYPATGDLLIGRAQKLSVTSTCGLHKPEPYCIVSHLQEDKKCFICNSQDPYHETLNPDSHLIENVVTTFAPNRLKIWWQSENGVENVTIQLDLEAEFHFTHLIMTFKTFRPAAMLIERSSDFGKTWGVYRYFAYDCEASFPGISTGPMKKVDDIICDSRYSDIEPSTEGEVIFRALDPAFKIEDPYSPRIQNLLKITNLRIKFVKLHTLGDNLLDSRMEIREKYYYAVYDMVVRGNCFCYGHASECAPVDGFNEEVEGMVHGHCMCRHNTKGLNCELCMDFYHDLPWRPAEGRNSNACKKCNCNEHSISCHFDMAVYLATGNVSGGVCDDCQHNTMGRNCEQCKPFYYQHPERDIRDPNFCERCTCDPAGSQNEGICDSYTDFSTGLIAGQCRCKLNVEGEHCDVCKEGFYDLSSEDPFGCKSCACNPLGTIPGGNPCDSETGHCYCKRLVTGQHCDQCLPEHWGLSNDLDGCRPCDCDLGGALNNSCFAESGQCSCRPHMIGRQCNEVEPGYYFATLDHYLYEAEEANLGPGVSIVERQYIQDRIPSWTGAGFVRVPEGAYLEFFIDNIPYSMEYDILIRYEPQLPDHWEKAVITVQRPGRIPTSSRCGNTIPDDDNQVVSLSPGSRYVVLPRPVCFEKGTNYTVRLELPQYTSSDSDVESPYTLIDSLVLMPYCKSLDIFTVGGSGDGVVTNSAWETFQRYRCLENSRSVVKTPMTDVCRNIIFSISALLHQTGLACECDPQGSLSSVCDPNGGQCQCRPNVVGRTCNRCAPGTFGFGPSGCKPCECHLQGSVNAFCNPVTGQCHCFQGVYARQCDRCLPGHWGFPSCQPCQCNGHADDCDPVTGECLNCQDYTMGHNCERCLAGYYGDPIIGSGDHCRPCPCPDGPDSGRQFARSCYQDPVTLQLACVCDPGYIGSRCDDCASGYFGNPSEVGGSCQPCQCHNNIDTTDPEACDKETGRCLKCLYHTEGEHCQFCRFGYYGDALQQDCRKCVCNYLGTVQEHCNGSDCQCDKATGQCLCLPNVIGQNCDRCAPNTWQLASGTGCDPCNCNAAHSFGPSCNEFTGQCQCMPGFGGRTCSECQELFWGDPDVECRACDCDPRGIETPQCDQSTGQCVCVEGVEGPRCDKCTRGYSGVFPDCTPCHQCFALWDVIIAELTNRTHRFLEKAKALKISGVIGPYRETVDSVERKVSEIKDILAQSPAAEPLKNIGNLFEEAEKLIKDVTEMMAQVEVKLSDTTSQSNSTAKELDSLQTEAESLDNTVKELAEQLEFIKNSDIRGALDSITKYFQMSLEAEERVNASTTEPNSTVEQSALMRDRVEDVMMERESQFKEKQEEQARLLDELAGKLQSLDLSAAAEMTCGTPPGASCSETECGGPNCRTDEGERKCGGPGCGGLVTVAHNAWQKAMDLDQDVLSALAEVEQLSKMVSEAKLRADEAKQSAEDILLKTNATKEKMDKSNEELRNLIKQIRNFLTQDSADLDSIEAVANEVLKMEMPSTPQQLQNLTEDIRERVESLSQVEVILQHSAADIARAEMLLEEAKRASKSATDVKVTADMVKEALEEAEKAQVAAEKAIKQADEDIQGTQNLLTSIESETAASEETLFNASQRISELERNVEELKRKAAQNSGEAEYIEKVVYTVKQSAEDVKKTLDGELDEKYKKVENLIAKKTEESADARRKAEMLQNEAKTLLAQANSKLQLLKDLERKYEDNQRYLEDKAQELARLEGEVRSLLKDISQKVAVYSTCL

SEQ ID NO: 11470 - protein, 5121 aa, Homo sapiens
MTSRRLEESMGAVQMGLVNMFKGFQSKVLPPLSPKVVTEEEVNRMLTPSEFLKEMSLTTEQRLAKTRLMCRPQIIELLDMGETTHQKFSGIDLDQALFQPFPSEIIFQNYTPCEVYEVPLILRNNDKIPRLVKVVEESSPYFKVISPKDIGHKVAPGVPSIFRILFTPEENKDYAHTLTCVTEREKFIVPIKARGARAILDFPDKLNFSTCPVKYSTQKILLVRNIGNKNAVFHIKTCRPFSIEPAIGTLNVGESMQLEVEFEPQSVGDHSGRLIVCYDTGEKVFVSLYGAAIDMNIRLDKNSLTIEKTYISLANQRTITIHNRSNIIAHFLWKVFATQQEEDREKYRACDDLIKEEKDETDEFFEECITDPLLREHLSVLSRTFANQRRLVQGDSKLFFNNVFTVEPLEGDVWPNSSAEITVYFNPLEAKLYQQTIYCDILGREIRLPLRIKGEGMGPKIHFNFELLDIGKVFTGSAHCYEAILYNKGSIDALFNMTPPTSALGACFVFSPKEGIIEPSGVQAIQISFSSTILGNFEEEFLVNVNGSPEPVKLTIRGCVIGPTFHFNVPALHFGDVSFGFPHTLICSLNNTSLIPMTYKLRIPGDGLGHKSISYCEQHVDYKRPSWTKEEISSMKPKEFTISPDCGTIRPQGFAAIRVTLCSNTVQKYELALVVDVEGIGEEVLALLITARCVVPALHLVNTEVDFGHCFLKYPYEKTLQLANQDDLPGFYEVQPQVCEEVPTVLFSSPTPSGVISPSSTIHIPLVLETQVTGEHRSTVYISIFGSQDPPLVCHLKSAGEGPVIYVHPNQVDFGNIYVLKDSSRILNLCNQSFIPAFFQAHMAHKKSLWTIEPNEGMVPPETDVQLALTANLNDTLTFKDCVILDIENSSTYRIPVQASGTGSTIVSDKPFAPELNLGAHFSLDTHYYHFKLINKGRRIQQLFWMNDSFRPQAKLSKKGRVKKGHAHVQPQPSGSQEPRDPQSPVFHLHPASMELYPGQAIDVILEGYSATPRIVKEKLVCHAIIGAQKGKSLVMAVNITCEFVAPLIQLSTKQLIYRLEKKPNSILKPDYQPLAIKNISTLPVNLLLSTSGPFFICETDKSLLPATPEPIKLEIDEEKNLLIKFDPSYRNDLNNWVAEEILAIKYVEHPQIDSLDLRGEVHYPNLSFETKELDFGCILNDTELIRYVTITNCSPLVVKFRWFFLVNDEENQIRFVTLPKKPYSAPVSQMESIPATSEAASPPAILVTVESPEMDLNDFVKTVLVDEDARPEEKELRKTKASSVISDEIKISSTEIERIYSSQSQVEDQESLQTCEQNEMLSIGIEEVFDILPLFGVLQPHSSHQISFTFYGHANIIAQAKALCEVEEGPTYEITLKGEASLVNYSFDTKDIHYGLQLFDHVTEREITLTNMGKVGFEFKVLTDHQSSPDNLLPGVPLILPVSGFISSHQEQVLKVYYLPGVPEVFKRSFQIQIAHLDPENITLSGEGIFPQICLDLPRNLTANEKYEMFLNQARKNTDKEYNKCEMLDHFDIITEEVPEDEPAEVSAHLQMEVERLIVQSYVLEHQKTTTPDPMDDPCFSHRSRRKLAKIQLPEYILDFGYIILGEVRTHIIKIINTSHFPVSFHADKRVLHETGFSTELDRVKNLPHCETEIFEVRFDPQGANLPVGSKEVILPIKVVGGPTVHICLQAKVTIPTMTLSRGKVDFATIQCGQCLVETIQLSNHLQVPCEWFVQSQKPVDKLEKHMPKYLRQKLRAELKPKTRIFEIQPISGVLDPGEKSNVQVKFMPKEEKFYSQTLVFQIAQSAQKLTLLARGQGLEPRLEFSPSVLDLGPLLLCAPGDEAEVIVKNPCNFPIEFYSLEFDQQYLIEEKILRKLKGYDSYNTLLLPPRNPGEKLPPELYEYFKEIKKSKEEQMRAKYLENLAQENEEEDITSSDQGTSNSTKRTSLSRGISVTSNLEEWHALLVESKTYLEEEEDEESLEKIIFQTDKLQSIDSHSMEEVGEVENNPVSKAIARHLGIDISAEGRLAKNRKGIAIIIHGTPLSGKSANAVSVAKYYNAACLSIDSIVLEAVANSNNIPGIRARELCIRAAIEQSVKEGEEAAQEAAVGQNVIGQGRLSTDTLGKLASEMTLVAPEIKPGKSVRGSVVITKSKADSHGSGSQKQHHSHQSETPQISSSPLPPGPIHRWLSVSPSVGGETGLMSCVLPDELLVQILAERIQLSDCYRGVVFDGLDTLFAQNAAAALLCLLKAIGSREHIYILNMAQDYAAMKAQEKAKKEQEERKHKGALEKEKERLQNMDEEEYDALTEEEKLTFDRGIQQALRERKKREQERLAKEMQEKKLQQELERQKEEDELKRRVKKGKQGPIKEEPPMKKSQAANKQVPPLTKVDVKMETIERKISVREQTMSEKEELNKKKRNMGDVSMHGLPLVQDQEDSEGDNSKDPDKQLAPKFKTYELTLKDVQNILMYWDRKQGVQLPPAGMEEAPHEPDDQRQVPLGGRRGRKDRERERLEKERTEKERLEREKAERERLEKLRALEERSDWEGEGEEDHEGKKEKDLGVPFLDIQTPDFEGLSWKQALESDKLPKGEQILDILGLGASGPPIPPPALFSIVSYPVKRPPLTMTDDLEHFVFVIPPSEDISLDEKKEMEIESDFLATTNTTKAQEEQTSSSKGGKQKMKEKIDQVFEIQKDKRHMALNRKVLSGEPAGTISQLSDTDLDNFNGQHSQEKFTRLNHFRWIVPANGEVTLQVHFSSDEFGNFDQTFNFEILGTCCQYQLYCRGICTYPYICQDPKVVFPQRKMDMKTNEVIFKKYVMSTETYYFGPLLCGKSRDKYKSSLFPGNMETLTILNTSLMVVEASFYFQNDVKANTYFLEPNTMVLKPNEKQILNVWAYPTSVGVFEDSIVCCINDNPEPAIFQLSCQGIRPELELEPRQLHFDRLLLHRQESRVVLLRNVTLLPVAWRITSLEHLGDDFTVSLMQGTIPPEAEYGLHLYFQPTKPVNIKKAIRLEVLDAENLLGVVQIENIMVFAEAYDIALDITFPKGAEGGLDFGIVRVTEEAKQPLQLKNRGKYEIAFSFSVDSVGISTPNINSMISVQPKKGSLTPTEKPTNVQVFFHAKKEVKIEHQPVLRCQIIEPNISEGGEIIASIPIKFSANAVYSKYNITPSSVINFGALICGTRKSTTFTIENQGVTDFKFALYKLTGESPIHQKKAASHVRHARSRESESFYKTGSSRAAKFSDTIQKEVTTTGQARFAHGMFTVYPGFGSIPSGGQQVINVDCVADAMGKCEEFIAIDISGRDPAVHPAGILYTLLAEACLPAFVTENNALIFEEHQICTSANLHHILQTIESGGLFVEDENKFIFCNVLVGRQAKARFKISNVGKITCDVNIVVRPISNKPFARIVDIFEVEPSKMCIASHSHAFATVSFTPQIMQNYQCIFEATLDGLPSTLAKSRGLVFDIAGEGNLPRVTVVRPVLHNQYGNPLLLFKRLLLGHSEKLPLILKNNGVLPAQLHVDLQDELGVFSLKGRPTTAYIYITEENKPHVKAKKAHTASLVVSPGDTAEFDVVFHSQKVGRMRGIIHLSVINNQYEETSIHMVGEGYEDDITLDNIHGLVAPTSQEDISISEFTEIIEDNDMEDLVAAALVDHIQFGDCHIGHSYNASFTVTNHSQVNLIRFEWPVSATIAFSPQMGHLHPGCAKDIVVTMKSDVPINLKNMRIRCKLSRIMFQLPADQVPDWDDRMHTVKWVDVPRNMPGTFTTKRKVIETDPEPAHSVLEENYQELQLQISANVDFASYHCQARDVRFKETLVYQTRVFEFDVINSGRVQLEFSWVSEDTSKAVSFAKPDHQGSAQKDQLSQGTMHTGSTLDSTMDHWAEGSPQPFSVEPSSGIVPVGKIQKFKVKFSPLDIGDFESNLFCQIPNLPPGEQGPVLVAKGRSTLPICHFDLKDSDYISGHQRNPELRGSSGGALDPNTRVIEFTTVGIGGKNLRTFTILNPTNSTYSFCWISEEIESLQNPAAFTCLTEKGFIHPEKKAEIVFQFTPFHLGITESSWTFLIPEHNITVPFLLVGKTTEPLISLNKSHLNFSSLLIGREARETVQIINKEEQGFDFSFQDNSRYSEGFSNSLLVCPMEGWIPPLSRFPIDIFFTPKQEGDVNFNLICNVEKKVHPVTLNVKAEGYTMNVEIKCKDRTGSITLLTPNQTNIINFYEVELNECVQCEFNFINTGKFTFSFQAQLCGSKTLLQYLEFSPIDSTVDVGQSVHATLSFQPLKKCVLTDLELIIKISHGPTFMCNISGCAVSPAIHFSFTSYNFGTCFIYQAGMPPYKQTLVITNKEETPMSIDCLYTNTTHLEVNSRVDVVKPGNTLEIPITFYPRESINYQELIPFEINGLSQQTVEIKGKGTKMKILVLDPANRIVKLGAVLPGQVVKRTVSIMNNSLAQLTFNQSILFTIPELQEPKVLTLAPFHNITLKPKEVCKLEVIFAPKKRVPPFSEEVFMECMGLLRPLFLLSGCCQALEISLDQEHIPFGPVVYQTQATRRILMMNTGDVGARFKWDIKKFEPHFSISPEEGYITSGMEVSFEVTYHPTEVGKESLCKNILCYIQGGSPLSLTLSGVCVGPPAVKEVVNFTCQVRSKHTQTILLSNRTNQTWNLHPIFEGEHWEGPEFITLEAHQQNKPYEITYRPRTMNLENRKHQGTLFFPLPDGTGWLYALHGTSELPKAVANIYREVPCKTPYTELLPITNWLNKPQRFRVIVEILKPEKPDLSITMKGLDYIDVLSGSKKDYKLNFFSHKEGTYAAKVIFRNEVTNEFLYYNVSFRVIPSGIIKTIEMVTPVRQVASASIKLENPLPYSVTFSTECRMPDIALPSQFVVPANSEGTFSFEFQPLKAGETFGRLTLHNTDLGYYQYELYLKATPALPEKPVHFQTVLGSSQIILVKFINYTRQRTEYYCRTDCTDFHAEKLINAAPGGQGGTEASVEVLFEPSHLGETKGILILSSLAGGEYIIPLFGMALPPKPQGPFSIRAGYSIIIPFKNVFYHMVTFSIIVDNPAFTIRAGESVRPKKINNITVSFEGNPSGSKTPITTKLTVSCPPGEGSETGVKWVYYLKGITL

SEQ ID NO: 11471 - protein, 542 aa, Homo sapiens
MELENIVANTVLLKAREGGGGNRKGKSKKWRQMLQFPHISQCEELRLSLERDYHSLCERQPIGRLLFREFCATRPELSRCVAFLDGVAEYEVTPDDKRKACGRQLTQNFLSHTGPDLIPEVPRQLVTNCTQRLEQGPCKDLFQELTRLTHEYLSVAPFADYLDSIYFNRFLQWKWLERQPVTKNTFRQYRVLGKGGFGEVCACQVRATGKMYACKKLEKKRIKKRKGEAMALNEKQILEKVNSRFVAGFPEARAVFYAAEICCGLEDLHRERIVYRDLKPENILLDDHGHIRISDLGLAVHVPEGQTIKGRVGTVGYMAPEVVKNERYTFSPDWWALGCLLYEMIAGQSPFQQRKKKIKREEVERLVKEVPEEYSERFSPQARSLCSQLLCKDPAERLGCRGGSAREVKEHPLFKKLNFKRLGAGMLEPPFKPDPQAIYCKDVLDIEQFSTVKGVELEPTDQDFYQKFATGSVPIPWQNEMVETECFQELNVFGLDGSVPPDLDWKGQPPAPPKKGLLQRLFSRQDCCGNCSDSEEELPTRL

SEQ ID NO: 11472 - protein, 1088 aa, Homo sapiens
MPCGFSPSPVAHHLVPGPPDTPAQQLRCGWTVGGWLLSLVRGLLPCLPPGARTAEGPIMVLAGPLAVSLLLPSLTLLVSHLSSSQDVSSEPSSEQQLCALSKHPTVAFEDLQPWVSNFTYPGARDFSQLALDPSGNQLIVGARNYLFRLSLANVSLLQATEWASSEDTRRSCQSKGKTEEECQNYVRVLIVAGRKVFMCGTNAFSPMCTSRQVGNLSRTIEKINGVARCPYDPRHNSTAVISSQGELYAATVIDFSGRDPAIYRSLGSGPPLRTAQYNSKWLNEPNFVAAYDIGLFAYFFLRENAVEHDCGRTVYSRVARVCKNDVGGRFLLEDTWTTFMKARLNCSRPGEVPFYYNELQSAFHLPEQDLIYGVFTTNVNSIAASAVCAFNLSAISQAFNGPFRYQENPRAAWLPIANPIPNFQCGTLPETGPNENLTERSLQDAQRLFLMSEAVQPVTPEPCVTQDSVRFSHLVVDLVQAKDTLYHVLYIGTESGTILKALSTASRSLHGCYLEELHVLPPGRREPLRSLRILHSARALFVGLRDGVLRVPLERCAAYRSQGACLGARDPYCGWDGKQQRCSTLEDSSNMSLWTQNITACPVRNVTRDGGFGPWSPWQPCEHLDGDNSGSCLCRARSCDSPRPRCGGLDCLGPAIHIANCSRNGAWTPWSSWALCSTSCGIGFQVRQRSCSNPAPRHGGRICVGKSREERFCNENTPCPVPIFWASWGSWSKCSSNCGGGMQSRRRACENGNSCLGCGVEFKTCNPEGCPEVRRNTPWTPWLPVNVTQGGARQEQRFRFTCRAPLADPHGLQFGRRRTETRTCPADGSGSCDTDALVEVLLRSGSTSPHTVSGGWAAWGPWSSCSRDCELGFRVRKRTCTNPEPRNGGLPCVGDAAEYQDCNPQACPVRGAWSCWTSWSPCSASCGGGHYQRTRSCTSPAPSPGEDICLGLHTEEALCATQACPEGWSPWSEWSKCTDDGAQSRSRHCEELLPGSSACAGNSSQSRPCPYSEIPVILPASSMEEATDCAGFNLIHLVATGISCFLGSGLLTLAVYLSCQHCQRQSQESTLVHPATPNHLHYKGGGTP

SEQ ID NO: 11473 - protein, 349 aa, Homo sapiens
MPVERMRMRPWLEEQINSNTIPGLKWLNKEKKIFQIPWMHAARHGWDVEKDAPLFRNWAIHTGKHQPGVDKPDPKTWKANFRCAMNSLPDIEEVKDKSIKKGNNAFRVYRMLPLSERPSKKGKKPKTEKEDKVKHIKQEPVESSLGLSNGVSDLSPEYAVLTSTIKNEVDSTVNIIVVGQSHLDSNIENQEIVTNPPDICQVVEVTTESDEQPVSMSELYPLQISPVSSYAESETTDSVPSDEESAEGRPHWRKRNIEGKQYLSNMGTRGSYLLPGMASFVTSNKPDLQVTIKEESNPVPYNSSWPPFQDLPLSSSMTPASSSSRPDRETRASVIKKTSDITQARVKSC

SEQ ID NO: 11474 - protein, 851 aa, Homo sapiens
MGNRGMEDLIPLVNRLQDAFSAIGQNADLDLPQIAVVGGQSAGKSSVLENFVGRDFLPRGSGIVTRRPLVLQLVNATTEYAEFLHCKGKKFTDFEEVRLEIEAETDRVTGTNKGISPVPINLRVYSPHVLNLTLVDLPGMTKVPVGDQPPDIEFQIRDMLMQFVTKENCLILAVSPANSDLANSDALKVAKEVDPQGQRTIGVITKLDLMDEGTDARDVLENKLLPLRRGYIGVVNRSQKDIDGKKDITAALAAERKFFLSHPSYRHLADRMGTPYLQKVLNQQLTNHIRDTLPGLRNKLQSQLLSIEKEVEEYKNFRPDDPARKTKALLQMVQQFAVDFEKRIEGSGDQIDTYELSGGARINRIFHERFPFELVKMEFDEKELRREISYAIKNIHGIRTGLFTPDLAFEATVKKQVQKLKEPSIKCVDMVVSELTATIRKCSEKLQQYPRLREEMERIVTTHIREREGRTKEQVMLLIDIELAYMNTNHEDFIGFANAQQRSNQMNKKKTSGNQDEILVIRKGWLTINNIGIMKGGSKEYWFVLTAENLSWYKDDEEKEKKYMLSVDNLKLRDVEKGFMSSKHIFALFNTEQRNVYKDYRQLELACETQEEVDSWKASFLRAGVYPERVGDKEKASETEENGSDSFMHSMDPQLERQVETIRNLVDSYMAIVNKTVRDLMPKTIMHLMINNTKEFIFSELLANLYSCGDQNTLMEESAEQAQRRDEMLRMYHALKEALSIIGDINTTTVSTPMPPPVDDSWLQVQSVPAGRRSPTSSPTPQRRAPAVPPARPGSRGPAPGPPPAGSALGGAPPVPSRPGASPDPFGPPPQVPSRPNRAPPGVPRITISDP

SEQ ID NO: 11475 - protein, 823 aa, Homo sapiens
MGWVGGRRRDSASPPGRSRSAADDINPAPANMEGGGGSVAVAGLGARGSGAAAATVRELLQDGCYSDFLNEDFDVKTYTSQSIHQAVIAEQLAKLAQGISQLDRELHLQVVARHEDLLAQATGIESLEGVLQMMQTRIGALQGAVDRIKAKIVEPYNKIVARTAQLARLQVACDLLRRIIRILNLSKRLQGQLQGGSREITKAAQSLNELDYLSQGIDLSGIEVIENDLLFIARARLEVENQAKRLLEQGLETQNPTQVGTALQVFYNLGTLKDTITSVVDGYCATLEENINSALDIKVLTQPSQSAVRGGPGRSTMPTPGNTAALRASFWTNMEKLMDHIYAVCGQVQHLQKVLAKKRDPVSHICFIEEIVKDGQPEIFYTFWNSVTQALSSQFHMATNSSMFLKQAFEGEYPKLLRLYNDLWKRLQQYSQHIQGNFNASGTTDLYVDLQHMEDDAQDIFIPKKPDYDPEKALKDSLQPYEAAYLSKSLSRLFDPINLVFPPGGRNPPSSDELDGIIKTIASELNVAAVDTNLTLAVSKNVAKTIQLYSVKSEQLLSTQGDASQVIGPLTEGQRRNVAVVNSLYKLHQSVTKVVSSQSSFPLAAEQTIISALKAIHALMENAVQPLLTSVGDAIEAIIITMHQEDFSGSLSSSGKPDVPCSLYMKELQGFIARVMSDYFKHFECLDFVFDNTEAIAQRAVELFIRHASLIRPLGEGGKMRLAADFAQMELAVGPFCRRVSDLGKSYRMLRSFRPLLFQASEHVASSPALGDVIPFSIIIQFLFTRAPAELKSPFQRAEWSHTRFSQWLDDHPSEKDRLLLIR

SEQ ID NO: 11476 - protein, 1210 aa, Homo sapiens
MTLSGSRGQEEPPPSRVPRAVRVASLLSEGEELSGDDQGDEEEDDHAYEGVPNGGWHTSSLSLSLPSTIAAPHPMDGPPGGSTPVTPVIKAGWLDKNPPQGSYIYQKRWVRLDTDHLRYFDSNKDAYSKRFISVACISHVAAIGDQKFEVITNNRTFAFRAESDVERKEWMQALQQAMAEQRARARLSSAYLLGVPGSEQPDRAGSLELRGFKNKLYVAVVGDKVQLYKNLEEYHLGIGITFIDMSVGNVKEVDRRSFDLTTPYRIFSFSADSELEKEQWLEAMQGAIAEALSTSEVAERIWAAAPNRFCADCGAPQPDWASINLCVVICKRCAGEHRGLGAGVSKVRSLKMDRKVWTETLIELFLQLGNGAGNRFWAANVPPSEALQPSSSPSTRRCHLEAKYREGKYRRYHPLFGNQEELDKALCAAVTTTDLAETQALLGCGAGINCFSGDPEAPTPLALAEQAGQTLQMEFLRNNRTTEVPRLDSMKPLEKHYSVVLPTVSHSGFLYKTASAGKLLQDRRAREEFSRRWCVLGDGVLSYFENERAVTPNGEIRASEIVCLAVPPPDTHGFEHTFEVYTEGERLYLFGLESAEQAHEWVKCIAKAFVPPLAEDLLARDFERLGRLPYKAGLSLQRAQEGWFSLSGSELRAVFPEGPCEEPLQLRKLQELSIQGDSENQVLVLVERRRTLYIQGERRLDFMGWLGAIQKAAASMGDTLSEQQLGDSDIPVIVYRCVDYITQCGLTSEGIYRKCGQTSKTQRLLESLRQDARSVHLKEGEQHVDDVSSALKRFLRDLPDGLFTRAQRLTWLEASEIEDEEEKVSRYRELLVRLPPVNRATVKALISHLYCVQCFSDTNQMNVHNLAIVFGPTLFQTDGQDYKAGRVVEDLINHYVVVFSVDEEELRKQREEITAIVKMRVAGTASGTQHAGDFICTVYLEEKKAETEQHIKVPASMTAEELTLEILDRRNVGIREKDYWTCFEVNEREEAERPLHFAEKVLPILHGLGTDSHLVVKKHQAMEAMLLYLASRVGDTKHGMMKFREDRSLLGLGLPSGGFHDRYFILNSSCLRLYKEVRSQRPWSGAPETSHRPEKEWPIKSLKVYLGVKKKLRPPTCWGFTVVHETEKHEKQQWYLCCDTQMELREWFATFLFVQHDGLVWPSEPSRVSRAVPEVRLGSVSLIPLRGSENEMRRSVAAFTADPLSLLRNV

SEQ ID NO: 11477 - protein, 837 aa, Homo sapiens
MFSQQQQQQLQQQQQAPLPMAVSRGLPPQQPQQPLLNLQGTNSASLLNGSMLQRALLLQQLQGLDQFAMPPATYDTAGLTMPTATLGNLRGYGMASPGLAAPSLTPPQLATPNLQQFFPQATRQSLLGPPPVGVPMNPSQFNLSGRNPQKQARTSSSTTPNRKDSSSQTMPVEDKSDPPEGSEEAAEPRMDTPEDQDLPPCPEDIAKEKRTPAPEPEPCEASELPAKRLRSSEEPTEKEPPGQLQVKAQPQARMTVPKQTQTPDLLPEALEAQVLPRFQPRVLQVQAQVQSQTQPRIPSTDTQVQPKLQKQAQTQTSPEHLVLQQKQVQPQLQQEAEPQKQVQPQVQPQAHSQGPRQVQLQQEAEPLKQVQPQVHTQAQPSVQPQEHPPAQVSVQPPEQTHEQPHTQPQVSLLAPEQTPVVVHVCGLEMPPDAVEAGGGMEKTLPEPVGTQVSMEEIQNESACGLDVGECENRAREMPGVWGAGGSLKVTILQSSDSRAFSTVPLTPVPRPSDSVSSTPAATSTPSKQALQFFCYICKASCSSQQEFQDHMSEPQHQQRLGEIQHMSQACLLSLLPVPRDVLETEDEEPPPRRWCNTCQLYYMGDLIQHRRTQDHKIAKQSLRPFCTVCNRYFKTPRKFVEHVKSQGHKDKAKELKSLEKEIAGQDEDHFITVDAVGCFEGDEEEEEDDEDEEEIEVEEELCKQVRSRDISREEWKGSETYSPNTAYGVDFLVPVMGYICRICHKFYHSNSGAQLSHCKSLGHFENLQKYKAAKNPSPTTRPVSRRCAINARNALTALFTSSGRPPSQPNTQDKTPSKVTARPSQPPLPRRSTRLKT

SEQ ID NO: 11478 - protein, 1450 aa, Homo sapiens
MAEAGDAALSVAEWLRALHLEQYTGLFEQHGLVWATECQGLSDTRLMDMGMLLPGHRRRILAGLLRAHTSPAPAPRPTPRPVPMKRHIFRSPPVPATPPEPLPTTTEDEGLPAAPPIPPRRSCLPPTCFTTPSTAAPDPVLPPLPAKRHLAELSVPPVPPRTGPPRLLVSLPTKEEESLLPSLSSPPQPQSEEPLSTLPQGPPQPPSPPPCPPEIPPKPVRLFPEFDDSDYDEVPEEGPGAPARVMTKKEEPPPSRVPRAVRVASLLSEGEELSGDDQGDEEEDDHAYEGVPNGGWHTSSLSLSLPSTIAAPHPMDGPPGGSTPVTPVIKAGWLDKNPPQGSYIYQKRWVRLDTDHLRYFDSNKDAYSKRFISVACISHVAAIGDQKFEVITNNRTFAFRAESDVERKEWMQALQQAMAEQRARARLSSAYLLGVPGSEQPDRAGSLELRGFKNKLYVAVVGDKVQLYKNLEEYHLGIGITFIDMSVGNVKEVDRRSFDLTTPYRIFSFSADSELEKEQWLEAMQGAIAEALSTSEVAERIWAAAPNRFCADCGAPQPDWASINLCVVICKRCAGEHRGLGAGVSKVRSLKMDRKVWTETLIELFLQLGNGAGNRFWAANVPPSEALQPSSSPSTRRCHLEAKYREGKYRRYHPLFGNQEELDKALCAAVTTTDLAETQALLGCGAGINCFSGDPEAPTPLALAEQAGQTLQMEFLRNNRTTEVPRLDSMKPLEKHYSVVLPTVSHSGFLYKTASAGKLLQDRRAREEFSRRWCVLGDGVLSYFENERAVTPNGEIRASEIVCLAVPPPDTHGFEHTFEVYTEGERLYLFGLESAEQAHEWVKCIAKAFVPPLAEDLLARDFERLGRLPYKAGLSLQRAQEGWFSLSGSELRAVFPEGPCEEPLQLRKLQELSIQGDSENQVLVLVERRRTLYIQGERRLDFMGWLGAIQKAAASMGDTLSEQQLGDSDIPVIVYRCVDYITQCGLTSEGIYRKCGQTSKTQRLLESLRQDARSVHLKEGEQHVDDVSSALKRFLRDLPDGLFTRAQRLTWLEASEIEDEEEKVSRYRELLVRLPPVNRATVKALISHLYCVQCFSDTNQMNVHNLAIVFGPTLFQTDGQDYKAGRVVEDLINHYVVVFSVDEEELRKQREEITAIVKMRVAGTASGTQHAGDFICTVYLEEKKAETEQHIKVPASMTAEELTLEILDRRNVGIREKDYWTCFEVNEREEAERPLHFAEKVLPILHGLGTDSHLVVKKHQAMEAMLLYLASRVGDTKHGMMKFREDRSLLGLGLPSGGFHDRYFILNSSCLRLYKEVRSQRPWSGAPETSHRPEKEWPIKSLKVYLGVKKKLRPPTCWGFTVVHETEKHEKQQWYLCCDTQMELREWFATFLFVQHDGLVWPSEPSRVSRAVPEVRLGSVSLIPLRGSENEMRRSVAAFTADPLSLLRNV

SEQ ID NO: 11479 - protein, 768 aa, Homo sapiens
MGTKMADLDSPPKLSGVQQPSEGVGGGRCSEISAELIRSLTELQELEAVYERLCGEEKVVERELDALLEQQNTIESKMVTLHRMGPNLQLIEGDAKQLAGMITFTCNLAENVSSKVRQLDLAKNRLYQAIQRADDILDLKFCMDGVQTALRSEDYEQAAAHTHRYLCLDKSVIELSRQGKEGSMIDANLKLLQEAEQRLKAIVAEKFAIATKEGDLPQVERFFKIFPLLGLHEEGLRKFSEYLCKQVASKAEENLLMVLGTDMSDRRAAVIFADTLTLLFEGIARIVETHQPIVETYYGPGRLYTLIKYLQVECDRQVEKVVDKFIKQRDYHQQFRHVQNNLMRNSTTEKIEPRELDPILTEVTLMNARSELYLRFLKKRISSDFEVGDSMASEEVKQEHQKCLDKLLNNCLLSCTMQELIGLYVTMEEYFMRETVNKAVALDTYEKGQLTSSMVDDVFYIVKKCIGRALSSSSIDCLCAMINLATTELESDFRDVLCNKLRMGFPATTFQDIQRGVTSAVNIMHSSLQQGKFDTKGIESTDEAKMSFLSDCTKLFSQGIGGEQAQAKFDSCLSDLAAVSNKFRDLLQEGLTELNSTAIKPQVQPWINSFFSVSHNIEEEEFNDYEANDPWVQQFILNLEQQMAEFKASLSPVIYDSLTGLMTSLVAVELEKVVLKSTFNRLGGLQFDKELRSLIAYLTTVTTWTIRDKFARLSQMATILNLERVTEILDYWGPNSGPLTWRLTPAEVRQVLALRIDFRSEDIKRLRL

SEQ ID NO: 11480 - protein, 323 aa, Homo sapiens
MGLSNILFVMAFLLSGAAPLKIQAYFNETADLPCQFANSQNQSLSELVVFWQDQENLVLNEVYLGKEKFDSVHSKYMGRTSFDSDSWTLRLHNLQIKDKGLYQCIIHHKKPTGMIRIHQMNSELSVLANFSQPEIVPISNITENVYINLTCSSIHGYPEPKKMSVLLRTKNSTIEYDGVMQKSQDNVTELYDVSISLSVSFPDVTSNMTIFCILETDKTRLLSSPFSIELEDPQPPPDHIPWITAVLPTVIICVMVFCLILWKWKKKKRPRNSYKCGTNTMEREESEQTKKREKIHIPERSDEAQRVFKSSKTSSCDKSDTCF

SEQ ID NO: 11481 - protein, 1711 aa, Homo sapiens
MSGTSSPEAVKKLLENMQSDLRALSLECKKKFPPVKEAAESGIIKVKTIAARNTEILAALKENSSEVVQPFLMGCGTKEPKITQLCLAAIQRLMSHEVVSETAAGNIINMLWQLMENSLEELKLLQTVLVLLTTNTVVHDEALSKAIVLCFRLHFTKDNITNNTAAATVRQVVTVVFERMVAEDERHRDIIEQPVLVQGNSNRRSVSTLKPCAKDAYMLFQDLCQLVNADAPYWLVGMTEMTRTFGLELLESVLNDFPQVFLQHQEFSFLLKERVCPLVIKLFSPNIKFRQGSSTSSSPAPVEKPYFPICMRLLRVVSVLIKQFYSLLVTECEIFLSLLVKFLDADKPQWLRAVAVESIHRFCVQPQLLRSFCQSYDMKQHSTKVFRDIVNALGSFIQSLFLVPPTGNPATSNQAGNNNLGGSVSAPANSGMVGIGGGVTLLPAFEYRGTWIPILTITVQGSAKATYLEMLDKVEPPTIPEGYAMSVAFHCLLDLVRGITSMIEGELGELETECQTTTEEGSSPTQSTEQQDLQSTSDQMDKEIVSRAVWEEMVNACWCGLLAALSLLLDASTDEAATENILKAELTMAALCGRLGLVTSRDAFITAICKGSLPPHYALTVLNTTTAATLSNKSYSVQGQSVMMISPSSESHQQVVAVGQPLAVQPQGTVMLTSKNIQCMRTLLNLAHCHGAVLGTSWQLVLATLQHLVWILGLKPSSGGALKPGRAVEGPSTVLTTAVMTDLPVISNILSRLFESSQYLDDVSLHHLINALCSLSLEAMDMAYGNNKEPSLFAVAKLLETGLVNMHRIEILWRPLTGHLLEVCQHPNSRMREWGAEALTSLIKAGLTFNHDPPLSQNQRLQLLLLNPLKEMSNINHPDIRLKQLECVLQILQSQGDSLGPGWPLVLGVMGAIRNDQGESLIRTAFQCLQLVVTDFLPTMPCTCLQIVVDVAGSFGLHNQELNISLTSIGLLWNISDYFFQRGETIEKELNKEEAAQQKQAEEKGVVLNRPFHPAPPFDCLWLCLYAKLGELCVDPRPAVRKSAGQTLFSTIGAHGTLLQHSTWHTVIWKVLFHLLDRVRESSTTADKEKIESGGGNILIHHSRDTAEKQWAETWVLTLAGVARIFNTRRYLLQPLGDFSRAWDVLLDHIQSAALSKNNEVSLAALKSFQEILQIVSPVRDSDKPETPPVVNVPVPVLIGPISGMSRPFVRTDSIGEKLGRYSSSEPPIVTDELEDLNLWWAAWNTWYRIGSESTKPPITFDKLTFIPSQPFLTALIQIFPALYQHIKTGFNMDDLQKLGVILHSAISVPISSDASPFILPSYTEAVLTSLQEAVLTALDVLQKAICVGPENMQIMYPAIFDQLLAFVEFSCKPPQYGQLETKHIANAKYNQAEWVALNYVPFAERSLEVVVDLYQKTACHKAVVNEKVLQNIIKTLRVPLSLKYSCPSESTWKLAVSSLLRVLSIGLPVARQHASSGKFDSMWPELANTFEDFLFTKSIPPDNLSIQEFQRNENIDVEVVQLISNEILPYANFIPKEFVGQIMTMLNKGSIHSQSSSFTEAEIDIRLREEFSKMCFETLLQFSFSNKVTTPQEGYISRMALSVLLKRSQDVLHRYIEDERLSGKCPLPRQQVTEIIFVLKAVSTLIDSLKKTQPENVDGNTWAQVIALYPTLVECITCSSSEVCSALKEALVPFKDFMQPPASRVQNGES

SEQ ID NO: 11482 - protein, 1717 aa, Homo sapiens
MSGTSSPEAVKKLLENMQSDLRALSLECKKKFPPVKEAAESGIIKVKTIAARNTEILAALKENSSEVVQPFLMGCGTKEPKITQLCLAAIQRLMSHEVVSETAAGNIINMLWQLMENSLEELKLLQTVLVLLTTNTVVHDEALSKAIVLCFRLHFTKDNITNNTAAATVRQVVTVVFERMVAEDERHRDIIEQPVLVQGNSNRRSVSTLKPCAKDAYMLFQDLCQLVNADAPYWLVGMTEMTRTFGLELLESVLNDFPQVFLQHQEFSFLLKERVCPLVIKLFSPNIKFRQGSSTSSSPAPVEKPYFPICMRLLRVVSVLIKQFYSLLVTECEIFLSLLVKFLDADKPQWLRAVAVESIHRFCVQPQLLRSFCQSYDMKQHSTKVFRDIVNALGSFIQSLFLVPPTGNPATSNQAGNNNLGGSVSAPANSGMVGIGGGVTLLPAFEYRGTWIPILTITVQGSAKATYLEMLDKVEPPTIPEGYAMSVAFHCLLDLVRGITSMIEGELGELETECQTTTEEGSSPTQSTEQQDLQSTSDQMDKEIVSRAVWEEMVNACWCGLLAALSLLLDASTDEAATENILKAELTMAALCGRLGLVTSRDAFITAICKGSLPPHYALTVLNTTTAATLSNKSYSVQGQSVMMISPSSESHQQVVAVGQPLAVQPQGTVMLTSKNIQCMRTLLNLAHCHGAVLGTSWQLVLATLQHLVWILGLKPSSGGALKPGRAVEGPSTVLTTAVMTDLPVISNILSRLFESSQYLDDVSLHHLINALCSLSLEAMDMAYGNNKEPSLFAVAKLLETGLVNMHRIEILWRPLTGHLLEVCQHPNSRMREWGAEALTSLIKAGLTFNHDPPLSQNQRLQLLLLNPLKEMSNINHPDIRLKQLECVLQILQSQGDSLGPGWPLVLGVMGAIRNDQGESLIRTAFQCLQLVVTDFLPTMPCTCLQIVVDVAGSFGLHNQELNISLTSIGLLWNISDYFFQRGETIEKELNKEEAAQQKQAEEKGVVLNRPFHPAPPFDCLWLCLYAKLGELCVDPRPAVRKSAGQTLFSTIGAHGTLLQHSTWHTVIWKVLFHLLDRVRESSTTADKEKIESGGGNILIHHSRDTAEKQWAETWVLTLAGVARIFNTRRYLLQPLGDFSRAWDVLLDHIQSAALSKNNEVSLAALKSFQEILQIVSPVRDSDKPETPPVVNVPVPVLIGPISGMSRPFVRTDSIGEKLGRYSSSEPPIVTDELEDLNLWWAAWNTWYRIGSESTKPPITFDKLTFIPSQPFLTALIQIFPALYQHIKTGFNMDDLQKLGVILHSAISVPISSDASPFILPSYTEAVLTSLQEAVLTALDVLQKAICVGPENMQIMYPAIFDQLLAFVEFSCKPPQYGQLETKHIANAKYNQIQLFAPAEWVALNYVPFAERSLEVVVDLYQKTACHKAVVNEKVLQNIIKTLRVPLSLKYSCPSESTWKLAVSSLLRVLSIGLPVARQHASSGKFDSMWPELANTFEDFLFTKSIPPDNLSIQEFQRNENIDVEVVQLISNEILPYANFIPKEFVGQIMTMLNKGSIHSQSSSFTEAEIDIRLREEFSKMCFETLLQFSFSNKVTTPQEGYISRMALSVLLKRSQDVLHRYIEDERLSGKCPLPRQQVTEIIFVLKAVSTLIDSLKKTQPENVDGNTWAQVIALYPTLVECITCSSSEVCSALKEALVPFKDFMQPPASRVQNGES

SEQ ID NO: 11483 - protein, 457 aa, Homo sapiens
MAWPKLPAPWLLLCTWLPAGCLSLLVTVQHTERYVTLFASIILKCDYTTSAQLQDVVVTWRFKSFCKDPIFDYYSASYQAALSLGQDPSNDCNDNQREVRIVAQRRGQNEPVLGVDYRQRKITIQNPLARHRYMKQAQALGPQMMGKPLYWGADRSSQVSSYPMHPLLQRDLSLPSSLPQMPMTQTTNQPPIANGVLEYLEKELRNLNLAQPLPPDLKGRFGHPCSMLSSLGSEVVERRIIHLPPLIRDLSSSRRTSDSLHQQWLTPIPSRPWDLREGRSHHHYPDFHQELQDRGPKSWALERRELDPSWSGRHRSSRLNGSPIHWSDRDSLSDVPSSSEARWRPSHPPFRSRCQERPRRPSPRESTQRHGRRRRHRSYSPPLPSGLSSWSSEEDKERQPQSWRAHRRGSHSPHWPEEKPPSYRSLDITPGKNSRKKGSVERRSEKDSSHSGRSVVI

SEQ ID NO: 11484 - protein, 762 aa, Homo sapiens
MRLLLALLGVLLSVPGPPVLSLEASEEVELEPCLAPSLEQQEQELTVALGQPVRLCCGRAERGGHWYKEGSRLAPAGRVRGWRGRLEIASFLPEDAGRYLCLARGSMIVLQNLTLITGDSLTSSNDDEDPKSHRDPSNRHSYPQQAPYWTHPQRMEKKLHAVPAGNTVKFRCPAAGNPTPTIRWLKDGQAFHGENRIGGIRLRHQHWSLVMESVVPSDRGTYTCLVENAVGSIRYNYLLDVLERSPHRPILQAGLPANTTAVVGSDVELLCKVYSDAQPHIQWLKHIVINGSSFGADGFPYVQVLKTADINSSEVEVLYLRNVSAEDAGEYTCLAGNSIGLSYQSAWLTVLPGTGRIPHLTCDSLTPAGRTKSPTLQFSLESGSSGKSSSSLVRGVRLSSSGPALLAGLVSLDLPLDPLWEFPRDRLVLGKPLGEGCFGQVVRAEAFGMDPARPDQASTVAVKMLKDNASDKDLADLVSEMEVMKLIGRHKNIINLLGVCTQEGPLYVIVECAAKGNLREFLRARRPPGPDLSPDGPRSSEGPLSFPVLVSCAYQVARGMQYLESRKCIHRDLAARNVLVTEDNVMKIADFGLARGVHHIDYYKKTSNGRLPVKWMAPEALFDRVYTHQSDVWSFGILLWEIFTLGGSPYPGIPVEELFSLLREGHRMDRPPHCPPELYGLMRECWHAAPSQRPTFKQLVEALDKVLLAVSEEYLDLRLTFGPYSPSGGDASSTCSSSDSVFSHDPLPLGSSSFPFGSGVQT

SEQ ID NO: 11485 - protein, 734 aa, Homo sapiens
MRLLLALLGVLLSVPGPPVLSLEASEEVELEPCLAPSLEQQEQELTVALGQPVRLCCGRAERGGHWYKEGSRLAPAGRVRGWRGRLEIASFLPEDAGRYLCLARGSMIVLQNLTLITGDSLTSSNDDEDPKSHRDPSNRHSYPQQAPYWTHPQRMEKKLHAVPAGNTVKFRCPAAGNPTPTIRWLKDGQAFHGENRIGGIRLRHQHWSLVMESVVPSDRGTYTCLVENAVGSIRYNYLLDVLERSPHRPILQAGLPANTTAVVGSDVELLCKVYSDAQPHIQWLKHIVINGSSFGADGFPYVQVLKTADINSSEVEVLYLRNVSAEDAGEYTCLAGNSIGLSYQSAWLTVLPEEDPTWTAAAPEASSPWSQALPASQAHPWYEACVSPPAAPPCSPASLVLGKPLGEGCFGQVVRAEAFGMDPARPDQASTVAVKMLKDNASDKDLADLVSEMEVMKLIGRHKNIINLLGVCTQEGPLYVIVECAAKGNLREFLRARRPPGPDLSPDGPRSSEGPLSFPVLVSCAYQVARGMQYLESRKCIHRDLAARNVLVTEDNVMKIADFGLARGVHHIDYYKKTSNGRLPVKWMAPEALFDRVYTHQSDVWSFGILLWEIFTLGGSPYPGIPVEELFSLLREGHRMDRPPHCPPELYGLMRECWHAAPSQRPTFKQLVEALDKVLLAVSEEYLDLRLTFGPYSPSGGDASSTCSSSDSVFSHDPLPLGSSSFPFGSGVQT

SEQ ID NO: 11486 - protein, 303 aa, Homo sapiens
MKPTGTDPRILSIAAEVAKSPEQNVPVILLKLKEIINITPLGSSELKKIKQDIYCYDLIQYCLLVLSQDYSRIQGGWTTISQLTQILSHCCVGLEPGEDAEEFYNELLPSAAENFLVLGRQLQTCFINAAKAEEKDELLHFFQIVTDSLFWLLGGHVELIQNVLQSDHFLHLLQADNVQIGSAVMMMLQNILQINSGDLLRIGRKALYSILDEVIFKLFSTPSPVIRSTATKLLLLMAESHQEILILLRQSTCYKGLRRLLSKQETGTEFSQELRQLVGLLSPMVYQEVEEQIQTIKDVAGDK

SEQ ID NO: 11487 - protein, 460 aa, Homo sapiens
MHSPPRDQAAIMLWKLVENVKYEDIYEDRHDGVPSHSSRLSQLGSVSQGPYSSAPPLSHTPSSDFQPPYFPPPYQPLPYHQSQDPYSHVNDPYSLNPLHQPQQHPWGQRQRQEVGSEAGSLLPQPRAALPQLSGLDPRRDYHSVRRPDVLLHSAHHGLDAGMGDSLSLHGLGHPGMEDVQSVEDANNSGMNLLDQSVIKKVPVPPKSVTSLMMNKDGFLGGMSVNTGEVFCSVPGRLSLLSSTSKYKVTVGEVQRRLSPPECLNASLLGGVLRRAKSKNGGRSLRERLEKIGLNLPAGRRKAANVTLLTSLVEGEAVHLARDFGYICETEFPAKAVSEYLNRQHTDPSDLHSRKNMLLATKQLCKEFTDLLAQDRTPIGNSRPSPILEPGIQSCLTHFSLITHGFGAPAICAALTALQNYLTEALKGMDKMFLNNTTTNRHTSGEGPGSKTGDKEEKHRK

SEQ ID NO: 11488 - protein, 3269 aa, Homo sapiens
MLSRLSGLANVVLHELSGDDDTDQNMRAPLDPELHQESDMEFNNTTQEDVQERLAYAEQLVVELKDIIRQKDVQLQQKDEALQEERKAADNKIKKLKLHAKAKLTSLNKYIEEMKAQGGTVLPTEPQSEEQLSKHDKSSTEEEMEIEKIKHKLQEKEELISTLQAQLTQAQAEQPAQSSTEMEEFVMMKQQLQEKEEFISTLQAQLSQTQAEQAAQLSSMQQVVREKDARFETQVRLHEDELLQLVTQADVETEMQQKLRVLQRKLEEHEESLVGRAQVVDLLQQELTAAEQRNQILSQQLQQMEAEHNTLRNTVETEREESKILLEKMELEVAERKLSFHNLQEEMHHLLEQFEQAGQAQAELESRYSALEQKHKAEMEEKTSHILSLQKTGQELQSACDALKDQNSKLLQDKNEQAVQSAQTIQQLEDQLQQKSKEISQFLNRLPLQQHETASQTSFPDVYNEGTQAVTEENIASLQKRVVELENEKGALLLSSIELEELKAENEKLSSQITLLEAQNRTGEADREVSEISIVDIANKRSSSAEESGQDVLENTFSQKHKELSVLLLEMKEAQEEIAFLKLQLQGKRAEEADHEVLDQKEMKQMEGEGIAPIKMKVFLEDTGQDFPLMPNEESSLPAVEKEQASTEHQSRTSEEISLNDAGVELKSTKQDGDKSLSAVPDIGQCHQDELERLKSQILELELNFHKAQEIYEKNLDEKAKEISNLNQLIEEFKKNADNNSSAFTALSEERDQLLSQVKELSMVTELRAQVKQLEMNLAEAERQRRLDYESQTAHDNLLTEQIHSLSIEAKSKDVKIEVLQNELDDVQLQFSEQSTLIRSLQSQLQNKESEVLEGAERVRHISSKVEELSQALSQKELEITKMDQLLLEKKRDVETLQQTIEEKDQQVTEISFSMTEKMVQLNEEKFSLGVEIKTLKEQLNLLSRAEEAKKEQVEEDNEVSSGLKQNYDEMSPAGQISKEELQHEFDLLKKENEQRKRKLQAALINRKELLQRVSRLEEELANLKDESKKEIPLSETERGEVEEDKENKEYSEKCVTSKCQEIEIYLKQTISEKEVELQHIRKDLEEKLAAEEQFQALVKQMNQTLQDKTNQIDLLQAEISENQAIIQKLITSNTDASDGDSVALVKETVVISPPCTGSSEHWKPELEEKILALEKEKEQLQKKLQEALTSRKAILKKAQEKERHLREELKQQKDDYNRLQEQFDEQSKENENIGDQLRQLQIQVRESIDGKLPSTDQQESCSSTPGLEEPLFKATEQHHTQPVLESNLCPDWPSHSEDASALQGGTSVAQIKAQLKEIEAEKVELELKVSSTTSELTKKSEEVFQLQEQINKQGLEIESLKTVSHEAEVHAESLQQKLESSQLQIAGLEHLRELQPKLDELQKLISKKEEDVSYLSGQLSEKEAALTKIQTEIIEQEDLIKALHTQLEMQAKEHDERIKQLQVELCEMKQKPEEIGEESRAKQQIQRKLQAALISRKEALKENKSLQEELSLARGTIERLTKSLADVESQVSAQNKEKDTVLGRLALLQEERDKLITEMDRSLLENQSLSSSCESLKLALEGLTEDKEKLVKEIESLKSSKIAESTEWQEKHKELQKEYEILLQSYENVSNEAERIQHVVEAVRQEKQELYGKLRSTEANKKETEKQLQEAEQEMEEMKEKMRKFAKSKQQKILELEEENDRLRAEVHPAGDTAKECMETLLSSNASMKEELERVKMEYETLSKKFQSLMSEKDSLSEEVQDLKHQIEGNVSKQANLEATEKHDNQTNVTEEGTQSIPGETEEQDSLSMSTRPTCSESVPSAKSANPAVSKDFSSHDEINNYLQQIDQLKERIAGLEEEKQKNKEFSQTLENEKNTLLSQISTKDGELKMLQEEVTKMNLLNQQIQEELSRVTKLKETAEEEKDDLEERLMNQLAELNGSIGNYCQDVTDAQIKNELLESEMKNLKKCVSELEEEKQQLVKEKTKVESEIRKEYLEKIQGAQKEPGNKSHAKELQELLKEKQQEVKQLQKDCIRYQEKISALERTVKALEFVQTESQKDLEITKENLAQAVEHRKKAQAELASFKVLLDDTQSEAARVLADNLKLKKELQSNKESVKSQMKQKDEDLERRLEQAEEKHLKEKKNMQEKLDALRREKVHLEETIGEIQVTLNKKDKEVQQLQENLDSTVTQLAAFTKSMSSLQDDRDRVIDEAKKWERKFSDAIQSKEEEIRLKEDNCSVLKDQLRQMSIHMEELKINISRLEHDKQIWESKAQTEVQLQQKVCDTLQGENKELLSQLEETRHLYHSSQNELAKLESELKSLKDQLTDLSNSLEKCKEQKGNLEGIIRQQEADIQNSKFSYEQLETDLQASRELTSRLHEEINMKEQKIISLLSGKEEAIQVAIAELRQQHDKEIKELENLLSQEEEENIVLEEENKKAVDKTNQLMETLKTIKKENIQQKAQLDSFVKSMSSLQNDRDRIVGDYQQLEERHLSIILEKDQLIQEAAAENNKLKEEIRGLRSHMDDLNSENAKLDAELIQYREDLNQVITIKDSQQKQLLEVQLQQNKELENKYAKLEEKLKESEEANEDLRRSFNALQEEKQDLSKEIESLKVSISQLTRQVTALQEEGTLGLYHAQLKVKEEEVHRLSALFSSSQKRIAELEEELVCVQKEAAKKVGEIEDKLKKELKHLHHDAGIMRNETETAEERVAELARDLVEMEQKLLMVTKENKGLTAQIQSFGRSMSSLQNSRDHANEELDELKRKYDASLKELAQLKEQGLLNRERDALLSETAFSMNSTEENSLSHLEKLNQQLLSKDEQLLHLSSQLEDSYNQVQSFSKAMASLQNERDHLWNELEKFRKSEEGKQRSAAQPSTSPAEVQSLKKAMSSLQNDRDRLLKELKNLQQQYLQINQEITELHPLKAQLQEYQDKTKAFQIMQEELRQENLSWQHELHQLRMEKSSWEIHERRMKEQYLMAISDKDQQLSHLQNLIRELRSSSSQTQPLKVQYQRQASPETSASPDGSQNLVYETELLRTQLNDSLKEIHQKELRIQQLNSNFSQLLEEKNTLSIQLCDTSQSLRENQQHYGDLLNHCAVLEKQVQELQAVSKEKGPLNIDVAPGAPQEKNGVHRKSDPEELREPQQSFSEAQQQLCNTRQEVNELRKLLEEERDQRVAAENALSVAEEQIRRLEHSEWDSSRTPIIGSCGTQEQALLIDLTSNSCRRTRSGVGWKRVLRSLCHSRTRVPLLAAIYFLMIHVLLILCFTGHL

SEQ ID NO: 11489 - protein, 682 aa, Homo sapiens
MAGGPGPGEPAAPGAQHFLYEVPPWVMCRFYKVMDALEPADWCQFAALIVRDQTELRLCERSGQRTASVLWPWINRNARVADLVHILTHLQLLRARDIITAWHPPAPLPSPGTTAPRPSSIPAPAEAEAWSPRKLPSSASTFLSPAFPGSQTHSGPELGLVPSPASLWPPPPSPAPSSTKPGPESSVSLLQGARPFPFCWPLCEISRGTHNFSEELKIGEGGFGCVYRAVMRNTVYAVKRLKENADLEWTAVKQSFLTEVEQLSRFRHPNIVDFAGYCAQNGFYCLVYGFLPNGSLEDRLHCQTQACPPLSWPQRLDILLGTARAIQFLHQDSPSLIHGDIKSSNVLLDERLTPKLGDFGLARFSRFAGSSPSQSSMVARTQTVRGTLAYLPEEYIKTGRLAVDTDTFSFGVVVLETLAGQRAVKTHGARTKYLKDLVEEEAEEAGVALRSTQSTLQAGLAADAWAAPIAMQIYKKHLDPRPGPCPPELGLGLGQLACCCLHRRAKRRPPMTQENSYVSSTGRAHSGAAPWQPLAAPSGASAQAAEQLQRGPNQPVESDESLGGLSAALRSWHLTPSCPLDPAPLREAGCPQGDTAGESSWGSGPGSRPTAVEGLALGSSASSSSEPPQIIINPARQKMVQKLALYEDGALDSLQLLSSSSLPGLGLEQDRQGPEESDEFQS

SEQ ID NO: 11490 - protein, 2115 aa, Homo sapiens
MTLHATRGAALLSWVNSLHVADPVEAVLQLQDCSIFIKIIDRIHGTEEGQQILKQPVSERLDFVCSFLQKNRKHPSSPECLVSAQKVLEGSELELAKMTMLLLYHSTMSSKSPRDWEQFEYKIQAELAVILKFVLDHEDGLNLNEDLENFLQKAPVPSTCSSTFPEELSPPSHQAKREIRFLELQKVASSSSGNNFLSGSPASPMGDILQTPQFQMRRLKKQLADERSNRDELELELAENRKLLTEKDAQIAMMQQRIDRLALLNEKQAASPLEPKELEELRDKNESLTMRLHETLKQCQDLKTEKSQMDRKINQLSEENGDLSFKLREFASHLQQLQDALNELTEEHSKATQEWLEKQAQLEKELSAALQDKKCLEEKNEILQGKLSQLEEHLSQLQDNPPQEKGEVLGDVLQLETLKQEAATLAANNTQLQARVEMLETERGQQEAKLLAERGHFEEEKQQLSSLITDLQSSISNLSQAKEELEQASQAHGARLTAQVASLTSELTTLNATIQQQDQELAGLKQQAKEKQAQLAQTLQQQEQASQGLRHQVEQLSSSLKQKEQQLKEVAEKQEATRQDHAQQLATAAEEREASLRERDAALKQLEALEKEKAAKLEILQQQLQVANEARDSAQTSVTQAQREKAELSRKVEELQACVETARQEQHEAQAQVAELELQLRSEQQKATEKERVAQEKDQLQEQLQALKESLKVTKGSLEEEKRRAADALEEQQRCISELKAETRSLVEQHKRERKELEEERAGRKGLEARLQQLGEAHQAETEVLRRELAEAMAAQHTAESECEQLVKEVAAWRERYEDSQQEEAQYGAMFQEQLMTLKEECEKARQELQEAKEKVAGIESHSELQISRQQNELAELHANLARALQQVQEKEVRAQKLADDLSTLQEKMAATSKEVARLETLVRKAGEQQETASRELVKEPARAGDRQPEWLEEQQGRQFCSTQAALQAMEREAEQMGNELERLRAALMESQGQQQEERGQQEREVARLTQERGRAQADLALEKAARAELEMRLQNALNEQRVEFATLQEALAHALTEKEGKDQELAKLRGLEAAQIKELEELRQTVKQLKEQLAKKEKEHASGSGAQSEAAGRTEPTGPKLEALRAEVSKLEQQCQKQQEQADSLERSLEAERASRAERDSALETLQGQLEEKAQELGHSQSALASAQRELAAFRTKVQDHSKAEDEWKAQVARGRQEAERKNSLISSLEEEVSILNRQVLEKEGESKELKRLVMAESEKSQKLEERLRLLQAETASNSARAAERSSALREEVQSLREEAEKQRVASENLRQELTSQAERAEELGQELKAWQEKFFQKEQALSTLQLEHTSTQALVSELLPAKHLCQQLQAEQAAAEKRHREELEQSKQAAGGLRAELLRAQRELGELIPLRQKVAEQERTAQQLRAEKASYAEQLSMLKKAHGLLAEENRGLGERANLGRQFLEVELDQAREKYVQELAAVRADAETRLAEVQREAQSTARELEVMTAKYEGAKVKVLEERQRFQEERQKLTAQVEQLEVFQREQTKQVEELSKKLADSDQASKVQQQKLKAVQAQGGESQQEAQRLQAQLNELQAQLSQKEQAAEHYKLQMEKAKTHYDAKKQQNQELQEQLRSLEQLQKENKELRAEAERLGHELQQAGLKTKEAEQTCRHLTAQVRSLEAQVAHADQQLRDLGKFQVATDALKSREPQAKPQLDLSIDSLDLSCEEGTPLSITSKLPRTQPDGTSVPGEPASPISQRLPPKVESLESLYFTPIPARSQAPLESSLDSLGDVFLDSGRKTRSARRRTTQIINITMTKKLDVEEPDSANSSFYSTRSAPASQASLRATSSTQSLARLGSPDYGNSALLSLPGYRPTTRSSARRSQAGVSSGAPPGRNSFYMGTCQDEPEQLDDWNRIAELQQRNRVCPPHLKTCYPLESRPSLSLGTITDEEMKTGDPQETLRRASMQPIQIAEGTGITTRQQRKRVSLEPHQGPGTPESKKATSCFPRPMTPRDRHEGRKQSTTEAQKKAAPASTKQADRRQSMAFSILNTPKKLGNSLLRRGASKKALSKASPNTRSGTRRSPRIATTTASAATAAAIGATPRAKGKAKH

SEQ ID NO: 11491 - protein, 353 aa, Homo sapiens
MALNHTALPQDERLPHYLRDGDPFASKLSWEADLVAGFYLTIIGILSTFGNGYVLYMSSRRKKKLRPAEIMTINLAVCDLGISVVGKPFTIISCFCHRWVFGWIGCRWYGWAGFFFGCGSLITMTAVSLDRYLKICYLSYGVWLKRKHAYICLAAIWAYASFWTTMPLVGLGDYVPEPFGTSCTLDWWLAQASVGGQVFILNILFFCLLLPTAVIVFSYVKIIAKVKSSSKEVAHFDSRIHSSHVLEMKLTKVAMLICAGFLIAWIPYAVVSVWSAFGRPDSIPIQLSVVPTLLAKSAAMYNPIIYQVIDYKFACCQTGGLKATKKKSLEGFRLHTVTTVRKSSAVLEIHEEV

SEQ ID NO: 11492 - protein, 427 aa, Homo sapiens
MSKGLPARQDMEKERETLQAWKERVGQELDRVVAFWMEHSHDQEHGGFFTCLGREGRVYDDLKYVWLQGRQVWMYCRLYRTFERFRHAQLLDAAKAGGEFLLRYARVAPPGKKCAFVLTRDGRPVKVQRTIFSECFYTMAMNELWRATGEVRYQTEAVEMMDQIVHWVQEDASGLGRPQLQGAPAAEPMAVPMMLLNLVEQLGEADEELAGKYAELGDWCARRILQHVQRDGQAVLENVSEGGKELPGCLGRQQNPGHTLEAGWFLLRHCIRKGDPELRAHVIDKFLLLPFHSGWDPDHGGLFYFQDADNFCPTQLEWAMKLWWPHSEAMIAFLMGYSDSGDPVLLRLFYQVAEYTFRQFRDPEYGEWFGYLSREGKVALSIKGGPFKGCFHVPRCLAMCEEMLGALLSRPAPAPSPAPTPACRGAE

SEQ ID NO: 11493 - protein, 186 aa, Homo sapiens
MHVMAASMARGGVSARVLLQAARGTWWNRPGGTSGSGEGVALGTTRKFQATGSRPAGEEDAGGPERPGDVVNVVFVDRSGQRIPVSGRVGDNVLHLAQRHGVDLEGACEASLACSTCHVYVSEDHLDLLPPPEEREDDMLDMAPLLQENSRLGCQIVLTPELEGAEFTLPKITRNFYVDGHVPKPH

SEQ ID NO: 11494 - protein, 237 aa, Homo sapiens
MGSLFPLSLLFFLAAAYPGVGSALGRRTKRAQSPKGSPLAPSGTSVPFWVRMSPEFVAVQPGKSVQLNCSNSCPQPQNSSLRTPLRQGKTLRGPGWVSYQLLDVRAWSSLAHCLVTCAGKTRWATSRITAYKPPHSVILEPPVLKGRKYTLRCHVTQVFPVGYLVVTLRHGSRVIYSESLERFTGLDLANVTLTYEFAAGPRDFWQPVICHARLNLDGLVVRNSSAPITLMLGEAPL

SEQ ID NO: 11495 - protein, 768 aa, Homo sapiens
MAAHGKLRRERGLQAEYETQVKEMRWQLSEQLRCLELQGELRRELLQELAEFMRRRAEVELEYSRGLEKLAERFSSRGGRLGSSREHQSFRKEPSLLSPLHCWAVLLQHTRQQSRESAALSEVLAGPLAQRLSHIAEDVGRLVKKSRDLEQQLQDELLEVVSELQTVAEICVEMELRDEILPRAQNIQSRLDRQTIETEEVNKTLKATLQALLEVVASDDGDVLDSFQTSPSTESLKSTSSDPGSRQAGRRRGQQQETETFYLTKLQEYLSGRSILAKLQAKHEKLQEALQRGDKEEQEVSWTQYTQRKFQKSRQPRPSSQYNQRLFGGDMEKFIQSSGQPVPLVVESCIRFINLNGLQHEGIFRVSGAQLRVSEIRDAFERGEDPLVEGCTAHDLDSVAGVLKLYFRSLEPPLFPPDLFGELLASSELEATAERVEHVSRLLWRLPAPVLVVLRYLFTFLNHLAQYSDENMMDPYNLAVCFGPTLLPVPAGQDPVALQGRVNQLVQTLIVQPDRVFPPLTSLPGPVYEKCMAPPSASCLGDAQLESLGADNEPELEAEMPAQEDDLEGVVEAVACFAYTGRTAQELSFRRGDVLRLHERASSDWWRGEHNGMRGLIPHKYITLPAGTEKQVVGAGLQTAGESGSSPEGLLASELVHRPEPCTSPEAMGPSGHRRRCLVPASPEQHVEVDKAVAQNMDSVFKELLGKTSVRQGLGPASTTSPSPGPRSPKAPPSSRLGRNKGFSRGPGAPASPSASHPQGLDTTPKPH

SEQ ID NO: 11496 - protein, 714 aa, Homo sapiens
MDHAEENEILAATQRYYVERPIFSHPVLQERLHTKDKVPDSIADKLKQAFTCTPKKIRNIIYMFLPITKWLPAYKFKEYVLGDLVSGISTGVLQLPQGLAFAMLAAVPPIFGLYSSFYPVIMYCFLGTSRHISIGPFAVISLMIGGVAVRLVPDDIVIPGGVNATNGTEARDALRVKVAMSVTLLSGIIQFCLGVCRFGFVAIYLTEPLVRGFTTAAAVHVFTSMLKYLFGVKTKRYSGIFSVVYSTVAVLQNVKNLNVCSLGVGLMVFGLLLGGKEFNERFKEKLPAPIPLEFFAVVMGTGISAGFNLKESYNVDVVGTLPLGLLPPANPDTSLFHLVYVDAIAIAIVGFSVTISMAKTLANKHGYQVDGNQELIALGLCNSIGSLFQTFSISCSLSRSLVQEGTGGKTQLAGCLASLMILLVILATGFLFESLPQTIWLTTFVSSLFLGLDYGLITAVIIALLTVIYRTQSPSYKVLGKLPETDVYIDIDAYEEVKEIPGIKIFQINAPIYYANSDLYSNALKRKTGVNPAVIMGARRKAMRKYAKEVGNANMANATVVKATQDAEVDGEDATKPEEEDGEVKYPPIVIKSTFPEEMQRFMPPGDNVHTVILDFTQVNFIDSVGVKTLAGIVKEYGDVGIYVYLAGCSAQVVNDLTRNRFFENPALWELLFHSIHDAVLGSQLREALAEQEASAPPSQEDLEPNATPATPEA

SEQ ID NO: 11497 - protein, 707 aa, Homo sapiens
MDHAEENEILAATQRYYVERPIFSHPVLQERLHTKDKVPDSIADKLKQAFTCTPKKIRNIIYMFLPITKWLPAYKFKEYVLGDLVSGISTGVLQLPQGPFAVISLMIGGVAVRLVPDDIVIPGGVNATNGTEARDALRVKVAMSVTLLSGIIQFCLGVCRFGFVAIYLTEPLVRGFTTAAAVHVFTSMLKYLFGVKTKRYSGIFSVVYSTVAVLQNVKNLNVCSLGVGLMVFGLLLGGKEFNERFKEKLPAPIPLEFFAVVMGTGISAGFNLKESYNVDVVGTLPLGLLPPANPDTSLFHLVYVDAIAIAIVGFSVTISMAKTLANKHGYQVDGNQELIALGLCNSIGSLFQTFSISCSLSRSLVQEGTGGKTQLAGCLASLMILLVILATGFLFESLPQAVLSAIVIVNLKGMFMQFSDLPFFWRTSKIELTIWLTTFVSSLFLGLDYGLITAVIIALLTVIYRTQSPSYKVLGKLPETDVYIDIDAYEEVKEIPGIKIFQINAPIYYANSDLYSNALKRKTGVNPAVIMGARRKAMRKYAKEVGNANMANATVVKADAEVDGEDATKPEEEDGEVKYPPIVIKSTFPEEMQRFMPPGDNVHTVILDFTQVNFIDSVGVKTLAGIVKEYGDVGIYVYLAGCSAQVVNDLTRNRFFENPALWELLFHSIHDAVLGSQLREALAEQEASAPPSQEDLEPNATPATPEA

SEQ ID NO: 11498 - protein, 712 aa, Homo sapiens
MDHAEENEILAATQRYYVERPIFSHPVLQERLHTKDKVPDSIADKLKQAFTCTPKKIRNIIYMFLPITKWLPAYKFKEYVLGDLVSGISTGVLQLPQGLAFAMLAAVPPIFGLYSSFYPVIMYCFLGTSRHISIGPFAVISLMIGGVAVRLVPDDIVIPGGVNATNGTEARDALRVKVAMSVTLLSGIIQFCLGVCRFGFVAIYLTEPLVRGFTTAAAVHVFTSMLKYLFGVKTKRYSGIFSVVYSTVAVLQNVKNLNVCSLGVGLMVFGLLLGGKEFNERFKEKLPAPIPLEFFAVVMGTGISAGFNLKESYNVDVVGTLPLGLLPPANPDTSLFHLVYVDAIAIAIVGFSVTISMAKTLANKHGYQVDGNQELIALGLCNSIGSLFQTFSISCSLSRSLVQEGTGGKTQLAGCLASLMILLVILATGFLFESLPQTIWLTTFVSSLFLGLDYGLITAVIIALLTVIYRTQSPSYKVLGKLPETDVYIDIDAYEEVKEIPGIKIFQINAPIYYANSDLYSNALKRKTGVNPAVIMGARRKAMRKYAKEVGNANMANATVVKADAEVDGEDATKPEEEDGEVKYPPIVIKSTFPEEMQRFMPPGDNVHTVILDFTQVNFIDSVGVKTLAGIVKEYGDVGIYVYLAGCSAQVVNDLTRNRFFENPALWELLFHSIHDAVLGSQLREALAEQEASAPPSQEDLEPNATPATPEA

SEQ ID NO: 11499 - protein, 516 aa, Homo sapiens
MDHAEENEILAATQRYYVERPIFSHPVLQERLHTKDKVPDSIADKLKQAFTCTPKKIRNIIYMFLPITKWLPAYKFKEYVLGDLVSGISTGVLQLPQGLAFAMLAAVPPIFGLYSSFYPVIMYCFLGTSRHISIGPFAVISLMIGGVAVRLVPDDIVIPGGVNATNGTEARDALRVKVAMSVTLLSGIIQFCLGVCRFGFVAIYLTEPLVRGFTTAAAVHVFTSMLKYLFGVKTKRYSGIFSVVYSTVAVLQNVKNLNVCSLGVGLMVFGLLLGGKEFNERFKEKLPAPIPLEFFAVVMGTGISAGFNLKESYNVDVVGTLPLGLLPPANPDTSLFHLVYVDAIAIAIVGFSVTISMAKTLANKHGYQVDGNQELIALGLCNSIGSLFQTFSISCSLSRSLVQEGTGGKTQLAGCLASLMILLVILATGFLFESLPQAVLSAIVIVNLKGMFMQFSDLPFFWRTSKIELTIWLTTFVSSLFLGLDYGLITAVIIALLTVIYRTQSFHTEMTRRWRP

SEQ ID NO: 11500 - protein, 1712 aa, Homo sapiens
MERNVLTTFSQEMSQLILNEMPKAEYSSLFNDFVESEFFLIDGDSLLITCICEISFKPGQNLHFFYLVERYLVDLISKGGQFTIVFFKDAEYAYFNFPELLSLRTALILHLQKNTTIDVRTTFSRCLSKEWGSFLEESYPYFLIVADEGLNDLQTQLFNFLIIHSWARKVNVVLSSGQESDVLCLYAYLLPSMYRHQIFSWKNKQNIKDAYTTLLNQLERFKLSALAPLFGSLKWNNITEEAHKTVSLLTQVWPEGSDIRRVFCVTSCSLSLRMYHRFLGNREPSSGQETEIQQVNSNCLTLQEMEDLCKLHCLTVVFLLHLPLSQRACARVITSHWAEDMKPLLQMKKWCEYFILRNIHTFEFWNLNLIHLSDLNDELLLKNIAFYYENENVKGLHLNLGDTIMKDYEYLWNTVSKLVRDFEVGQPFPLRTTKVCFLEKKPSPIKDSSNEMVPNLGFIPTSSFVVDKFAGDILKDLPFLKSDDPIVTSLVKQKEFDELVHWHSHKPLSDDYDRSRCQFDEKSRDPRVLRSVQKYHVFQRFYGNSLETVSSKIIVTQTIKSKKDFSGPKSKKAHETKAEIIARENKKRLFAREEQKEEQKWNALSFSIEEQLKENLHSGIKSLEDFLKSCKSSCVKLQVEMVGLTACLKAWKEHCRSEEGKTTKDLSIAVQVMKRIHSLMEKYSELLQEDDRQLIARCLKYLGFDELASSLHPAQDAENDVKVKKRNKYSVGIGPARFQLQYMGHYLIRDERKDPDPRVQDFIPDTWQRELLDVVDKNESAVIVAPTSSGKTYASYYCMEKVLKESDDGVVVYVAPTKALVNQVAATVQNRFTKNLPSGEVLCGVFTREYRHDALNCQVLITVPACFEILLLAPHRQNWVKKIRYVIFDEVHCLGGEIGAEIWEHLLVMIRCPFLALSATISNPEHLTEWLQSVKWYWKQEDKIIENNTASKRHVGRQAGFPKDYLQVKQSYKVRLVLYGERYNDLEKHVCSIKHGDIHFDHFHPCAALTTDHIERYGFPPDLTLSPRESIQLYDAMFQIWKSWPRAQELCPENFIHFNNKLVIKKMDARKYEESLKAELTSWIKNGNVEQARMVLQNLSPEADLSPENMITMFPLLVEKLRKMEKLPALFFLFKLGAVENAAESVSTFLKKKQETKRPPKADKEAHVMANKLRKVKKSIEKQKIIDEKSQKKTRNVDQSLIHEAEHDNLVKCLEKNLEIPQDCTYADQKAVDTETLQKVFGRVKFERKGEELKALAERGIGYHHSAMSFKEKQLVEILFRKGYLRVVTATGTLALGVNMPCKSVVFAQNSVYLDALNYRQMSGRAGRRGQDLMGDVYFFDIPFPKIGKLIKSNVPELRGHFPLSITLVLRLMLLASKGDDPEDAKAKVLSVLKHSLLSFKQPRVMDMLKLYFLFSLQFLVKEGYLDQEGNPMGFAGLVSHLHYHEPSNLVFVSFLVNGLFHDLCQPTRKGSKHFSQDVMEKLVLVLAHLFGRRYFPPKFQDAHFEFYQSKVFLDDLPEDFSDALDEYNMKIMEDFTTFLRIVSKLADMNQEYQLPLSKIKFTGKECEDSQLVSHLMSCKEGRVAISPFVCLSGNFDDDLLRLETPNHVTLGTIGVNRSQAPVLLSQKFDNRGRKMSLNAYALDFYKHGSLIGLVQDNRMNEGDAYYLLKDFALTIKSISVSLRELCENEDDNVVLAFEQLSTTFWEKLNKV

SEQ ID NO: 11501 - protein, 488 aa, Homo sapiens
MHIQFPSKPTLPRACWEGRITAGSPGMPPDEIEIEPVRQSSDKMLYCEAESPPTVEKVKPARENSETDLEIEDDEKFFTTGQKELYLEACKLMGVVPVSYFIRNMEESYVNLNHHGLGPRGTKAIAIALVSNMAVTKLELEDNCIMEEGVLSLVEMLQENYYLQEMNISNNHLGLEGARIISDFFERNSSSIWSLELSGNDFKEDSAALLCQALSTNYQIKKLDLSHNQFSDVGGEHLGQMLAINVGLTSLDLSWNNFHTRGAVALCNGLRGNVTLTKLDLSMNGFGNEVALALGEVLRLNRCLVYLDIGGNDIGNEGASKISKGLESNESLRVLKLFLNPINMDGAILLILAIKRNPKSRMEELDISNVLVSEQFMKTLDGVYAVHPQLDVVFKAVQGLSPKKTIFLLTNPMKLIQSYADQHKITIVDFFKSLNPTGTMKMSVDEFQKVMIEQNKVPLNQYQVREVIKKLDEKTGMVNFSFLNTMKP

SEQ ID NO: 11502 - protein, 431 aa, Homo sapiens
MTSQRSPLAPLLLLSLHGVAASLEVSESPGSIQVARGQPAVLPCTFTTSAALINLNVIWMVTPLSNANQPEQVILYQGGQMFDGAPRFHGRVGFTGTMPATNVSIFINNTQLSDTGTYQCLVNNLPDIGGRNIGVTGLTVLVPPSAPHCQIQGSQDIGSDVILLCSSEEGIPRPTYLWEKLDNTLKLPPTATQDQVQGTVTIRNISALSSGLYQCVASNAIGTSTCLLDLQVISPQPRNIGLIAGAIGTGAVIIIFCIALILGAFFYWRSKNKEEEEEEIPNEIREDDLPPKCSSAKAFHTEISSSDNNTLTSSNAYNSRYWSNNPKVHRNTESVSHFSDLGQSFSFHSGNANIPSIYANGTHLVPGQHKTLVVTANRGSSPQVMSRSNGSVSRKPRPPHTHSYTISHATLERIGAVPVMVPAQSRAGSLV

SEQ ID NO: 11503 - protein, 274 aa, Homo sapiens
MTKSCSELCHPALHFLPCLGGLRKNLQRAVRPSPYSLGFLTFWISRVEKNDDDQKIEQDGIKPEDKAHKAATKIQASFRGHITRKKLKGEKKDDVQAAEAEANKKDEAPVADGVEKKGEGTTTAEAAPATGSKPDEPGKAGETPSEEKKGEGDAATEQAAPQAPASSEEKAGSAETESATKASTDNSPSSKAEDAPAKEEPKQADVPAAVTAAAATTPAAEDAAAKATAQPPTETGESSQAEENIEAVDETKPKESARQDEGKEEEPEADQEHA

SEQ ID NO: 11504 - protein, 731 aa, Homo sapiens
MLSSRWWPSSWGILGLGPRSPPRGSQLCALYAFTYTGADGQQVSLAEGDRFLLLRKTNSDWWLARRLEAPSTSRPIFVPAAYMIEESIPSQSPTTVIPGQLLWTPGPKLFHGSLEELSQALPSRAQASSEQPPPLPRKMCRSVSTDNLSPSLLKPFQEGPSGRSLSQEDLPSEASASTAGPQPLMSEPPVYCNLVDLRRCPRSPPPGPACPLLQRLDAWEQHLDPNSGRCFYINSLTGCKSWKPPRRSRSETNPGSMEGTQTLKRNNDVLQPQAKGFRSDTGTPEPLDPQGSLSLSQRTSQLDPPALQAPRPLPQLLDDPHEVEKSGLLNMTKIAQGGRKLRKNWGPSWVVLTGNSLVFYREPPPTAPSSGWGPAGSRPESSVDLRGAALAHGRHLSSRRNVLHIRTIPGHEFLLQSDHETELRAWHRALRTVIERLDRENPLELRLSGSGPAELSAGEDEEEESELVSKPLLRLSSRRSSIRGPEGTEQNRVRNKLKRLIAKRPPLQSLQERGLLRDQVFGCQLESLCQREGDTVPSFLRLCIAAVDKRGLDVDGIYRVSGNLAVVQKLRFLVDRERAVTSDGRYVFPEQPGQEGRLDLDSTEWDDIHVVTGALKLFLRELPQPLVPPLLLPHFRAALALSESEQCLSQIQELIGSMPKPNHDTLRYLLEHLCRVIAHSDKNRMTPHNLGIVFGPTLFRPEQETSDPAAHALYPGQLVQLMLTNFTSLFP

SEQ ID NO: 11505 - protein, 217 aa, Homo sapiens
MSKGRAEAAAGAAGILLRYLQEQNRPYSSQDVFGNLQREHGLGKAVVVKTLEQLAQQGKIKEKMYGKQKIYFADQDQFDMVSDADLQVLDGKIVALTAKVQSLQQSCRYMEAELKELSSALTTPEMQKEIQELKKECAGYRERLKNIKAATNHVTPEEKEQVYRERQKYCKEWRKRKRMATELSDAILEGYPKSKKQFFEEVGIETDEDYNVTLPDP

SEQ ID NO: 11506 - protein, 794 aa, Homo sapiens
MGQSGRSRHQKRARAQAQLRNLEAYAANPHSFVFTRGCTGRNIRQLSLDVRRVMEPLTASRLQVRKKNSLKDCVAVAGPLGVTHFLILSKTETNVYFKLMRLPGGPTLTFQVKKYSLVRDVVSSLRRHRMHEQQFAHPPLLVLNSFGPHGMHVKLMATMFQNLFPSINVHKVNLNTIKRCLLIDYNPDSQELDFRHYSIKVVPVGASRGMKKLLQEKFPNMSRLQDISELLATGAGLSESEAEPDGDHNITELPQAVAGRGNMRAQQSAVRLTEIGPRMTLQLIKVQEGVGEGKVMFHSFVSKTEEELQAILEAKEKKLRLKAQRQAQQAQNVQRKQEQREAHRKKSLEGMKKARVGGSDEEASGIPSRTASLELGEDDDEQEDDDIEYFCQAVGEAPSEDLFPEAKQKRLAKSPGRKRKRWEMDRGAKSCPANFLAAADDKLSGFQGDFLWPILVVEFLVAVASNGLALYRFSIRKQRPWHPAVVFSVQLAVSDLLCALTLPPLAAYLYPPKHWRYGEAACRLERFLFTCNLLGSVIFITCISLNRYLGIVHPFFARSHLRPKHAWAVSAAGWVLAALLAMPTLSFSHLKRPQQGAGNCSVARPEACIKCLGTADHGLAAYRAYSLVLAGLGCGLPLLLTLAAYGALGRAVLRSPGMTVAEKLRVAALVASGVALYASSYVPYHIMRVLNVDARRRWSTRCPSFADIAQATAALELGPYVGYQVMRGLMPLAFCVHPLLYMAAVPSLGCCCRHCPGYRDSWNPEDAKSTGQALPLNATAAPKPSEPQSRELSQ

SEQ ID NO: 11507 - protein, 750 aa, Homo sapiens
MLSSRWWPSSWGILGLGPRSPPRGSQLCALYAFTYTGADGQQVSLAEGDRFLLLRKTNSDWWLARRLEAPSTSRPIFVPAAYMIEESIPSQSPTTVIPGQLLWTPGPKLFHGSLEELSQALPSRAQASSEQPPPLPRKMCRSVSTDNLSPSLLKPFQEGPSGRSLSQEDLPSEASASTAGPQPLMSEPPVYCNLVDLRRCPRSPPPGPACPLLQRLDAWEQHLDPNSGRCFYINSLTGCKSWKPPRRSRSETNPGSMEGTQTLKRNNDVLQPQAKGFRSDTGTPEPLDPQGSLSLSQRTSQLDPPALQAPRPLPQLLDDPHEVEKSGLLNMTKIAQGGRKLRKNWGPSWVVLTGNSLVFYREPPPTAPSSGWGPAGSRPESSVDLRGAALAHGRHLSSRRNVLHIRTIPGHEFLLQSDHETELRAWHRALRTVIERLVRWVEARREAPTGRDQGSGDRENPLELRLSGSGPAELSAGEDEEEESELVSKPLLRLSSRRSSIRGPEGTEQNRVRNKLKRLIAKRPPLQSLQERGLLRDQVFGCQLESLCQREGDTVPSFLRLCIAAVDKRGLDVDGIYRVSGNLAVVQKLRFLVDRERAVTSDGRYVFPEQPGQEGRLDLDSTEWDDIHVVTGALKLFLRELPQPLVPPLLLPHFRAALALSESEQCLSQIQELIGSMPKPNHDTLRYLLEHLCRVIAHSDKNRMTPHNLGIVFGPTLFRPEQETSDPAAHALYPGQLVQLMLTNFTSLFP

SEQ ID NO: 11508 - protein, 873 aa, Homo sapiens
MFWKFDLHSSSHIDTLLEREDVTLKELMDEEDVLQECKAQNRKLIEFLLKAECLEDLVSFIIEEPPQDMDEKIRYKYPNISCELLTSDVSQMNDRLGEDESLLMKLYSFLLNDSPLNPLLASFFSKVLSILISRKPEQIVDFLKKKHDFVDLIIKHIGTSAIMDLLLRLLTCIEPPQPRQDVLNWLNEEKIIQRLVEIVHPSQEEDRHSNASQSLCEIVRLSRDQMLQIQNSTEPDPLLATLEKQEIIEQLLSNIFHKEKNESAIVSAIQILLTLLETRRPTFEGHIEICPPGMSHSACSVNKSVLEAIRGRLGSFHELLLEPPKKSVMKTTWGVLDPPVGNTRLNVIRLISSLLQTNTSSINGDLMELNSIGVILNMFFKYTWNNFLHTQVEICIALILASPFENTENATITDQDSTGDNLLLKHLFQKCQLIERILEAWEMNEKKQAEGGRRHGYMGHLTRIANCIVHSTDKGPNSALVQQLIKDLPDEVRERWETFCTSSLGETNKRNTVDLVTTCHIHSSSDDEIDFKETGFSQDSSLQQAFSDYQMQQMTSNFIDQFGFNDEKFADQDDIGNVSFDRVSDINFTLNTNESGNIALFEACCKERIQQFDDGGSDEEDIWEEKHIAFTPESQRRSSSGSTDSEESTDSEEEDGAKQDLFEPSSANTEDKMEVDLSEPPNWSANFDVPMETTHGAPLDSVGSDVWSTEEPMPTKETGWASFSEFTSSLSTKDSLRSNSPVEMETSTEPMDPLTPSAAALAVQPEAAGSVAMEASSDGEEDAESTDKVTETVMNGGMKETLSLTVDAKTETAVFKSEEGKLSTSQDAACKDAEECPETAEAKCAAPRPPSSSPEQRTGQPSAPGDTSVNGPV

SEQ ID NO: 11509 - protein, 879 aa, Homo sapiens
MFWKFDLHSSSHIDTLLEREDVTLKELMDEEDVLQECKAQNRKLIEFLLKAECLEDLVSFIIEEPPQDMDEKIRYKYPNISCELLTSDVSQMNDRLGEDESLLMKLYSFLLNDSPLNPLLASFFSKVLSILISRKPEQIVDFLKKKHDFVDLIIKHIGTSAIMDLLLRLLTCIEPPQPRQDVLNWLNEEKIIQRLVEIVHPSQEEDRHSNASQSLCEIVRLSRDQMLQIQNSTEPDPLLATLEKQEIIEQLLSNIFHKEKNESAIVSAIQILLTLLETRRPTFEGHIEICPPGMSHSACSVNKSVLEAIRGRLGSFHELLLEPPKKSVMKTTWGVLDPPVGNTRLNVIRLISSLLQTNTSSINGDLMELNSIGVILNMFFKYTWNNFLHTQVEICIALILASPFENTENATITDQDSTGDNLLLKHLFQKCQLIERILEAWEMNEKKQAEGGRRHGYMGHLTRIANCIVHSTDKGPNSALVQQLIKDLPDEVRERWETFCTSSLGETNKRNTVDLVTTCHIHSSSDDEIDFKETGFSQDSSLQQAFSDYQMQQMTSNFIDQFGFNDEKFADQDDIGNVSFDRVSDINFTLNTNESGNIALFEACCKERIQQFDDGGSDEEDIWEEKHIAFTPESQRRSSSGSTDSEESTDSEEEDGAKQDLFEPSSANTEDKMEVDLSEPPNWSANFDVPMETTHGAPLDSVGSDVWSTEEPMPTKETGWASFSEFTSSLSTKDSLRSNSPVEMETSTEPMDPLTPSAAALAVQPEAAGSVAMEASSDGEEDAESTDKVTETVMNGGMKETLSLTVDAKTETAVFKRVLKSYREEGKLSTSQDAACKDAEECPETAEAKCAAPRPPSSSPEQRTGQPSAPGDTSVNGPV

SEQ ID NO: 11510 - protein, 508 aa, Homo sapiens
MEPDSVIEDKTIELMISNGTSSVIVSRKRPSEGNYQKEKDLCIKYFDQWSESDQVEFVEHLISRMCHYQHGHINSYLKPMLQRDFITALPEQGLDHIAENILSYLDARSLCAAELVCKEWQRVISEGMLWKKLIERMVRTDPLWKGLSERRGWDQYLFKNRPTDGPPNSFYRSLYPKIIQDIETIESNWRCGRHNLQRIQCRSENSKGVYCLQYDDEKIISGLRDNSIKIWDKTSLECLKVLTGHTGSVLCLQYDERVIVTGSSDSTVRVWDVNTGEVLNTLIHHNEAVLHLRFSNGLMVTCSKDRSIAVWDMASATDITLRRVLVGHRAAVNVVDFDDKYIVSASGDRTIKVWSTSTCEFVRTLNGHKRGIACLQYRDRLVVSGSSDNTIRLWDIECGACLRVLEGHEELVRCIRFDNKRIVSGAYDGKIKVWDLQAALDPRAPASTLCLRTLVEHSGRVFRLQFDEFQIISSSHDDTILIWDFLNVPPSAQNETRSPSRTYTYISR

SEQ ID NO: 11511 - protein, 527 aa, Homo sapiens
MTCPDKPGQLINWFICSLCVPRVRKLWSSRRPRTRRNLLLGTACAIYLGFLVSQVGRASLQHGQAAEKGPHRSRDTAEPSFPEIPLDGTLAPPESQGNGSTLQPNVVYITLRSKRSKPANIRGTVKPKRRKKHAVASAAPGQEALVGPSLQPQEAAREADAVAPGYAQGANLVKIGERPWRLVRGPGVRAGGPDFLQPSSRESNIRIYSESAPSWLSKDDIRRMRLLADSAVAGLRPVSSRSGARLLVLEGGAPGAVLRCGPSPCGLLKQPLDMSEVFAFHLDRILGLNRTLPSVSRKAEFIQAAAAACLSMRLAFFIFPAWEDMRVPGKCCIGHARLTWGTYQQLLKQKCWQNGRVPKPESGCTEIHHHEWSKMALFDFLLQIYNRLDTNCCGFRPRKEDACVQNGLRPKCDDQGSAALAHIIQRKHDPRHLVFIDNKGFFDRSEDNLNFKLLEGIKEFPASAVSVLKSQHLRQKLLQSLFLDKVYWESQGGRQGIEKLIDVIEHRAKILITYINAHGVKVLPMNE

SEQ ID NO: 11512 - protein, 836 aa, Homo sapiens
MVQFSTSEFRLTPHIDNLEVANSFAVTNAFCSQFSRGVYAIFGFYDKKSVNTITSFCGTLHVSFITPSFPTDGTHPFVIQMRPDLKGALLSLIEYYQWDKFAYLYDSDRGLSTLQAVLDSAAEKKWQVTAINVGNINNDKKDEMYRSLFQDLELKKERRVILDCERDKVNDIVDQVITIGKHVKGYHYIIANLGFTDGDLLKIQFGGANVSGFQIVDYDDSLVSKFIERWSTLEEKEYPGAHTTTIKYTSALTYDAVQVMTEAFRNLRKQRIEISRRGNAGDCLANPAVPWGQGVEIERALKQVQVEGLSGNIKFDQNGKRINYTINIMELKTNGPRKIGYWSEVDKMVVTLTELPSGNDTSGLENKTVVVTTILESPYVMMKKNHEMLEGNERYEGYCVDLAAEIAKHCGFKYKLTIVGDGKYGARDADTKIWNGMVGELVYGKADIAIAPLTITLVREEVIDFSKPFMSLGISIMIKKPQKSKPGVFSFLDPLAYEIWMCIVFAYIGVSVVLFLVSRFSPYEWHTEEFEDGRETQSSESTNEFGIFNSLWFSLGAFMQQGCDISPRSLSGRIVGGVWWFFTLIIISSYTANLAAFLTVERMVSPIESAEDLSKQTEIAYGTLDSGSTKEFFRRSKIAVFDKMWTYMRSAEPSVFVRTTAEGVARVRKSKGKYAYLLESTMNEYIEQRKPCDTMKVGGNLDSKGYGIATPKGSSLRTPVNLAVLKLSEQGVLDKLKNKWWYDKGECGAKDSGSKEKTSALSLSNVAGVFYILVGGLGLAMLVALIEFCYKSRAEAKRMKVAKNAQNINPSSSQNSQNFATYKEGYNVYGIESVKI

SEQ ID NO: 11513 - protein, 639 aa, Homo sapiens
MAANVGSMFQYWKRFDLQQLQDLRKQVAPLLKSFQGEIDALSKRSKEAEAAFLNVYKRLIDVPDPVPALDLGQQLQLKVQRLHDIETENQKLRETLEEYNKEFAEVKNQEVTIKALKEKIREYEQTLKNQAETIALEKEQKLQNDFAEKERKLQETQMSTTSKLEEAEHKVQSLQTALEKTRTELFDLKTKYDEETTAKADEIEMIMTDLERANQRAEVAQREAETLREQLSSANHSLQLASQIQKAPDVAIEVLTRSSLEVELAAKEREIAQLVEDVQRLQASLTKLRENSASQISQLEQQLSAKNSTLKQLEEKLKGQADYEEVKKELNILKSMEFAPSEGAGTQDAAKPLEVLLLEKNRSLQSENAALRISNSDLSGRCAELQVRITEAVATATEQRELIARLEQDLSIIQSIQRPDAEGAAEHRLEKIPEPIKEATALFYGPAAPASGALPEGQVDSLLSIISSQRERFRARNQELEAENRLAQHTLQALQSELDSLRADNIKLFEKIKFLQSYPGRGSGSDDTELRYSSQYEERLDPFSSFSKRERQRKYLSLSPWDKATLSMGRLVLSNKMARTIGFFYTLFLHCLVFLVLYKLAWSESMERDCATFCAKKFADHLHKFHENDNGAAAGDLWQ

SEQ ID NO: 11514 - protein, 832 aa, Homo sapiens
MRGCLRLALLCALPWLLLAASPGHPAKSPRQPPAPRRDPFDAARGADFDHVYSGVVNLSTENIYSFNYTSQPDQVTAVRVYVNSSSENLNYPVLVVVRQQKEVLSWQVPLLFQGLYQRSYNYQEVSRTLCPSEATNETGPLQQLIFVDVASMAPLGAQYKLLVTKLKHFQLRTNVAFHFTASPSQPQYFLYKFPKDVDSVIIKVVSEMAYPCSVVSVQNIMCPVYDLDHNVEFNGVYQSMTKKAAITLQKKDFPGEQFFVVFVIKPEDYACGGSFFIQEKENQTWNLQRKKNLEVTIVPSIKESVYVKSSLFSVFIFLSFYLGCLLVGFVHYLRFQRKSIDGSFGSNDGSGNMVASHPIAASTPEGSNYGTIDESSSSPGRQMSSSDGGPPGQSDTDSSVEESDFDTMPDIESDKNIIRTKMFLYLSDLSRKDRRIVSKKYKIYFWNIITIAVFYALPVIQLVITYQTVVNVTGNQDICYYNFLCAHPLGVLSAFNNILSNLGHVLLGFLFLLIVLRRDILHRRALEAKDIFAVEYGIPKHFGLFYAMGIALMMEGVLSACYHVCPNYSNFQFDTSFMYMIAGLCMLKLYQTRHPDINASAYSAYASFAVVIMVTVLGVVFGKNDVWFWVIFSAIHVLASLALSTQIYYMGRFKIDVSDTDLGIFRRAAMVFYTDCIQQCSRPLYMDRMVLLVVGNLVNWSFALFGLIYRPRDFASYMLGIFICNLLLYLAFYIIMKLRSSEKVLPVPLFCIVATAVMWAAALYFFFQNLSSWEGTPAESREKNRECILLDFFDDHDIWHFLSATALFFSFLVLLTLDDDLDVVRRDQIPVF

SEQ ID NO: 11515 - protein, 432 aa, Homo sapiens
MKSTKPSLSPSKPQSSLVIPTSLFCKTFPFHFMFDKDMTILQFGNGIRRLMNRRDFQGKPNFEEYFEILTPKINQTFSGIMTMLNMQFVVRVRRWDNSVKKSSRVMDLKGQMIYIVESSAILFLGSPCVDRLEDFTGRGLYLSDIPIHNALRDVVLIGEQARAQDGLKKRLGKLKATLEQAHQALEEEKKKTVDLLCSIFPCEVAQQLWQGQVVQAKKFSNVTMLFSDIVGFTAICSQCSPLQVITMLNALYTRFDQQCGELDVYKVETIGDAYCVAGGLHKESDTHAVQIALMALKMMELSDEVMSPHGEPIKMRIGLHSGSVFAGVVGVKMPRYCLFGNNVTLANKFESCSVPRKINVSPTTYRLLKDCPGFVFTPRSREELPPNFPSEIPGICHFLDAYQQGTNSKPCFQKKDVEDGNANFLGKASGID

SEQ ID NO: 11516 - protein, 1154 aa, Homo sapiens
MGDMANSSIEFHPKPQQQRDVPQAGGFGCTLAELRTLMELRGAEALQKIEEAYGDVSGLCRRLKTSPTEGLADNTNDLEKRRQIYGQNFIPPKQPKTFLQLVWEALQDVTLIILEVAAIVSLGLSFYAPPGEESEACGNVSGGAEDEGEAEAGWIEGAAILLSVICVVLVTAFNDWSKEKQFRGLQSRIEQEQKFTVIRNGQLLQVPVAALVVGDIAQVKYGDLLPADGVLIQANDLKIDESSLTGESDHVRKSADKDPMLLSGTHVMEGSGRMVVTAVGVNSQTGIIFTLLGAGGEEEEKKDKKAKKQDGAVAMEMQPLKSAEGGEMEEREKKKANAPKKEKSVLQGKLTKLAVQIGKAGLVMSAITVIILVLYFVIETFVVEGRTWLAECTPVYVQYFVKFFIIGVTVLVVAVPEGLPLAVTISLAYSVKKMMKDNNLVRHLDACETMGNATAICSDKTGTLTTNRMTVVQSYLGDTHYKEIPAPSALTPKILDLLVHAISINSAYTTKILPPEKEGALPRQVGNKTECALLGFVLDLKRDFQPVREQIPEDKLYKVYTFNSVRKSMSTVIRMPDGGFRLFSKGASEILLKKCTNILNSNGELRGFRPRDRDDMVRKIIEPMACDGLRTICIAYRDFSAGQEPDWDNENEVVGDLTCIAVVGIEDPVRPEVPEAIRKCQRAGITVRMVTGDNINTARAIAAKCGIIQPGEDFLCLEGKEFNRRIRNEKGEIEQERLDKVWPKLRVLARSSPTDKHTLVKGIIDSTTGEQRQVVAVTGDGTNDGPALKKADVGFAMGIAGTDVAKEASDIILTDDNFTSIVKAVMWGRNVYDSISKFLQFQLTVNVVAVIVAFTGACITQDSPLKAVQMLWVNLIMDTFASLALATEPPTESLLLRKPYGRDKPLISRTMMKNILGHAVYQLAIIFTLLFVGELFFDIDSGRNAPLHSPPSEHYTIIFNTFVMMQLFNEINARKIHGERNVFDGIFSNPIFCTIVLGTFGIQIVIVQFGGKPFSCSPLSTEQWLWCLFVGVGELVWGQVIATIPTSQLKCLKEAGHGPGKDEMTDEELAEGEEEIDHAERELRRGQILWFRGLNRIQTQMEVVSTFKRSGSVQGAVRRRSSVLSQLHDVTNLSTPTHAILSAANPTSAAGSES

SEQ ID NO: 11517 - protein, 1854 aa, Homo sapiens
MKEPDDQDTDGEKSVTSKSDGKKSLRSSKSESRSPVQEDNTFLEDDTDETFTKGEGSYLEEDSDEERLEGSLSSFQYGDLQSTTVPQQTPAPAVEEAEEEVKKKISESFFYDYMELASMPFVTLDSNIPLDLLTLVHSFGYDCRKRANLQLLDDSIAIYIAGNQLIFLNLKTKEQIYLRSSSGEGIGVIGVHPHKTYFTVAEKGSFPDIIIYEYPSLRPYRVLRDGTEKGYAYVDFNYSGNLLASVGSNPDYTLTIWNWKEEQPILRTKAFSQEVFKVTFNPDKEEQLTTSGSGHIKFWEMAFTFTGLKLQGSLGRFGKTITTDIEGYMELPDGKVLSGSEWGNMLLWEGGLIKVELCRGTSKSCHNGPINQIMLYEGEVITVGSDGYVRIWDFETIDTADVIDETGLLEIEPINELQVDKNVNLFSMIKMNETGNNFWLAQDANGAIWKLDLSFSNITQDPECLFSFHSGAIEAVAVSPLTYLMATTALDCSVRIYDFASKTPLAQMKFKQGGTALVWVPRMVNFTGAQIIVGFEDGVVRILELYDPKGLTIFAGRKKILDADIQLKQVFKPHTACVTALAYERDGEILATGSKDQTVFFFEVERDYKPIGYINTPGPVCQLMWSPMSHPESTLLIICENGYILEAPLPTIKQEEDDHDVVSYEIKDMCIKCFHFSSVKSKILRLIEIEKRERQRELKEKIREERRNKLAAEMGEDGEKEFQEEEEEKEEEEEEEEPLPEIFIPSTPSPILCGFYSEPGKFWVSLGGYDSGFLYHCEFPPCDESSDFKEQKDEPIDVRYLADTEDNPIQTITFNINKVMMFCGMKNGAIRVYVLNQNDPSLTSLVDYWHFNMHDNNYGCIKSIANSFDDRFLVTAGADGNIFVFNIFSEFMLRKDMKAKVPSPRFGIETEPIPEDIEDPKAYSIENARRKREHDKLMKEVGEIKARKREQIKALRSEFCNLLEMNEKLPKHMQFKRTDFDVDSQIRAEMHRKTAFKIQQVEKELAWEKEKHELGLMKLKNRFRDPLESDTIVVHAILSDHKISSYRLVQPSKYSKFKRASQSERKPSKLDRFEKEGPGRKDSQRDAGGSVTIQEESIIEKGKKFRPKTLSEIIVENQIEKTRKLILKAERAQLKIQQRKKEWEELYKSKPGDDYEDPKDLQAIKEAQVYMGDFNLKTAPDYKIPEHMRINAAKKEEELGHLDSLVHGNKRHMNKCILSLRDLKVAVVEEIQCLVQELKNIQSTLHISKHIPIPKIPQIHPEEVPEKRFQYDEETLLNFKQQQMKSKDEKSPGVEQTGSGGPVGGFLKLSSRKDGDLTTRDSISRSSKASTFSLDIPKCLEFEKAEPTDVELEIMKRDEIKHVYMQQYLVNRIKELVVTFDAELRLLRHQKLKLDTQMKLSDLHHVTLFQEILLLKNFEKQENILQERVNSLDKEEQYMQWKINETLKEMEEKKNEITKLQEQEKALYAGFQAAIGENNKFANFLMKVLKKKIKRVKKKEVEGDADEDEESEESSEEESSLESDEDESESEDEVFDDSICPTNCDVALFELALHLREKRLDIEEALVEEKKIVDNLKKEYDTLSKKVKIVATNLNAAEEALEAYQREKQQRLNELLVVIPLKLHQIEYVVFGEIPSDLSGTLVFSNHALRRLQERIHELQEENSKQQKLNKEWRERRKQLIREKREMTKTIHKMEETVRQLMISKFGRVVNLEALQTLSVNTTLEELKIRKLRKELANAKEMKMWEEKIAQMRWELMMKTKEHTRKLYQMNDLCIEKKKLDSRLNTLQNQQGNAFQGPREADVVAREEVTELIQLQAERISALKEEIALLRRKGSLILPPIQSPREKEIQPADL

SEQ ID NO: 11518 - protein, 119 aa, Homo sapiens
MIDAATLKSRKMLEEIMKYEASILTHDSSIRYLQEIYNSNNQKIVNLKEKVAQLEAQCQEPCKDTVQIHDITGKDCQDIANKGAKQSGLYFIKPLKANQQFLVYCEIDGSGNGWTVFQK

SEQ ID NO: 11519 - protein, 381 aa, Homo sapiens
MNEKSCSFHSKEELRDGQGERLSAGYSPSYDKDKSVLAFRGIPISELKNHGILQALTTEAYEWEPRVVSTEVVRAQEEWEAVDTIQPETGSQASSEQPGQLISFSEALQHFQTVDLSPFKKRIQPTIRRTGLAALRHYLFGPPKLHQRLREERDLVLTIAQCGLDSQDPVHGRVLQTIYKKLTGSKFDCALHGNHWEDLGFQGANPATDLRGAGFLALLHLLYLVMDSKTLPMAQEIFRLSRHHIQQFPFCLMSVNITHIAIQALREECLSRECNRQQKVIPVVNSFYAATFLHLAHVWRTQRKTISDSGFVLKELEVLAKKSPRRLLKTLELYLARVSKGQASLLGAQKCYGPEAPPFKDLTFTGESDLQSHSSEGVWLI

SEQ ID NO: 11520 - protein, 346 aa, Homo sapiens
MTATLAAAADIATMVSGSSGLAAARLLSRSFLLPQNGIRHCSYTASRQHLYVDKNTKIICQGFTGKQGTFHSQQALEYGTKLVGGTTPGKGGQTHLGLPVFNTVKEAKEQTGATASVIYVPPPFAAAAINEAIEAEIPLVVCITEGIPQQDMVRVKHKLLRQEKTRLIGPNCPGVINPGECKIGIMPGHIHKKGRIGIVSRSGTLTYEAVHQTTQVGLGQSLCVGIGGDPFNGTDFIDCLEIFLNDSATEGIILIGEIGGNAEENAAEFLKQHNSGPNSKPVVSFIAGLTAPPGRRMGHAGAIIAGGKGGAKEKISALQSAGVVVSMSPAQLGTTIYKEFEKRKML

SEQ ID NO: 11521 - protein, 538 aa, Homo sapiens
MVAGWLTNYSQDSVTFEDVAVDFTQEEWTLLDQTQRNLYRDVMLENYKNLVAVDWESHINTKWSAPQQNFLQGKTSSVVEMERNHFGEELFDFNQCEKALSEHSCLKTHRRTYFRKKTCECNQCEKAFRKPSIFTLHKKTDIGEELPNCNQCETAFSQHLHLVCKKTSQNLHLVCKKTHTQEKPYKCSDCEKGLPSSSHLRECVRIYGGERPYTHKEYVETFSHSTALFVHMQTQDGEKFYECKACGKPFTESSYLTQHLRTHSRVLPIEHKKFGKAFAFSPDLAKHIRLRTRGKHYVCNECGKEFTCFSKLNIHIRVHTGEKPYECNKCGKAFTDSSGLIKHRRTHTGEKPYECKECGKAFANSSHLTVHMRTHTGEKPYQCKECGKAFINSSSFKSHMQTHPGVKPYDCQQCGKAFIRSSFLIRHLRSHSAERPFECEECGKAFRYSSHLSQHKRIHTGERPYKCQKCGQAFSISSGLTVHMRTHTGERPFECQECGKAFTRSTYLIRHLRSHSVEKPYKECGQTFSNSSCLTECV

SEQ ID NO: 11522 - protein, 1079 aa, Homo sapiens
RYTKPLTFADCISDELPLGWEEAYDPQVGDYFIDHNTKTTQIEDPRVQWRREQEHMLKDYLVVAQEALSAQKEIYQVKQQRLELAQQEYQQLHAVWEHKLGSQVSLVSGSSSSSKYDPEILKAEIATAKSRVNKLKREMVHLQHELQFKERGFQTLKKIDKKMSDAQGSYKLDEAQAVLRETKAIKKAITCGEKEKQDLIKSLAMLKDGFRTDRGSHSDLWSSSSSLESSSFPLPKQYLDVSSQTDISGSFGINSNNQLAEKVRLRLRYEEAKRRIANLKIQLAKLDSEAWPGVLDSERDRLILINEKEELLKEMRFISPRKWTQGEVEQLEMARKRLEKDLQAARDTQSKALTERLKLNSKRNQLVRELEEATRQVATLHSQLKSLSSSMQSLSSGSSPGSLTSSRGSLVASSLDSSTSASFTDLYYDPFEQLDSELQSKVEFLLLEGATGFRPSGCITTIHEDEVAKTQKAEGGGRLQALRSLSGTPKSMTSLSPRSSLSSPSPPCSPLMADPLLAGDAFLNSLEFEDPELSATLCELSLGNSAQERYRLEEPGTEGKQLGQAVNTAQGCGLKVACVSAAVSDESVAGDSGVYEASVQRLGASEAAAFDSDESEAVGATRIQIALKYDEKNKQFAILIIQLSNLSALLQQQDQKVNIRVAVLPCSESTTCLFRTRPLDASDTLVFNEVFWVSMSYPALHQKTLRVDVCTTDRSHLEECLGGAQISLAEVCRSGERSTRWYNLLSYKYLKKQSRELKPVGVMAPASGPASTDAVSALLEQTAVELEKRQEGRSSTQTLEDSWRYEETSENEAVAEEEEEEVEEEEGEEDVFTEKASPDMDGYPALKVDKETNTETPAPSPTVVRPKDRRVGTPSQGPFLRGSTIIRSKTFSPGPQSQYVCRLNRSDSDSSTLSKKPPFVRNSLERRSVRMKRPSPPPQPSSVKSLRSERLIRTSLDLELDLQATRTWHSQLTQEISVLKELKEQLEQAKSHGEKELPQWLREDERFRLLLRMLEKRMDRAEHKGELQTDKMMRAAAKDVHRLRGQSCKEPPEVQSFREKMAFFTRPRMNIPALSADDV

SEQ ID NO: 11523 - protein, 154 aa, Homo sapiens
MLNNWDKWMAKKHKKIRLRCQKGIPPSLRGRAWQYLSGGKVKLQQNPGKFDELDMSPGDPKWLDVIERDLHRQFPFHEMFVSRGGHGQQDLFRVLKAYTLYRPEEGYCQAQAPIAAVLLMHMPAEQAFWCLVQICEKYLPGYYSEKLEAIQLDG

SEQ ID NO: 11524 - protein, 725 aa, Homo sapiens
MSFPKAPLKRFNDPSGCAPSPGAYDVKTLEVLKGPVSFQKSQRFKQQKESKQNLNVDKDTTLPASARKVKSSESKKESQKNDKDLKILEKEIRVLLQERGAQDRRIQDLETELEKMEARLNAALREKTSLSANNATLEKQLIELTRTNELLKSKFSENGNQKNLRILSLELMKLRNKRETKMRGMMAKQEGMEMKLQVTQRSLEESQGKIAQLEGKLVSIEKEKIDEKSETEKLLEYIEEISCASDQVEKYKLDIAQLEENLKEKNDEILSLKQSLEENIVILSKQVEDLNVKCQLLEKEKEDHVNRNREHNENLNAEMQNLKQKFILEQQEREKLQQKELQIDSLLQQEKELSSSLHQKLCSFQEEMVKEKNLFEEELKQTLDELDKLQQKEEQAERLVKQLEEEAKSRAEELKLLEEKLKGKEAELEKSSAAHTQATLLLQEKYDSMVQSLEDVTAQFESYKALTASEIEDLKLENSSLQEKAAKAGKNAEDVQHQILATESSNQEYVRMLLDLQTKSALKETEIKEITVSFLQKITDLQNQLKQQEEDFRKQLEDEEGRKAEKENTTAELTEEINKWRLLYEELYNKTKPFQLQLDAFEVEKQALLNEHGAAQEQLNKIRDSYAKLLGHQNLKQKIKHVVKLKDENSQLKSEVSKLRCQLAKKKQSETKLQEELNKVLGIKHFDPSKAFHHESKENFALKTPLKEGNTNCYRAPMECQESWK

SEQ ID NO: 11525 - protein, 1237 aa, Homo sapiens
MEEEDTKREVPKEDGVGDVQHFDSSKIMEEHSYIQKELDLQNGSLEEDSVVHSVENDSQNMMESLSPKKYSSSLRFKANGDYSGSYLTLSQPVPAKRSPSPLGTSVRSSPSLAKIQGSKQFSYDGTDKNIPMKPPTPLLNTTSSLSGYPLGRADFDHYTGRDSERALRLSEKPPYSKYSSRHKSHDNVYSLGGLEGRKASGSLLAMWNGSSLSDAGPPPISRSGAASMPSSPKQARKMSIQDSLALQPKLTRHKELASENINLRTRKYSSSSLSHMGAYSRSLPRLYRATENQLTPLSLPPRNSLGNSKRTKLGEKDLPHSVIDNDNYLNFSSLSSGALPYKTSASEGNPYVSSTLSVPASPRVARKMLLASTSSCASDDFDQASYVGTNPSHSLLAGESDRVFATRRNFSCGSVEFDEADLESLRQASGTPQPALRERKSSISSISGRDDLMDYHRRQREERLREQEMERLERQRLETILSLCAEYTKPDSRLSTGTTVEDVQKINKELEKLQLSDEESVFEEALMSPDTRYRCHRKDSLPDADLASCGSLSQSSASFFTPRSTRNDELLSDLTRTPPPPSSTFPKASSESSYLSILPKTPEGISEEQRSQELAAMEETRIVILNNLEELKQKIKDINDQMDESFRELDMECALLDGEQKSETTELMKEKEILDHLNRKIAELEKNIVGEKTKDADLLDVESKHFEDLEFQQLEHESRLDEEKENLTQQLLREVAEYQRNIVSRKEKISALKKQANHIVQQAQREQDHFVKEKNNLIMMLQREKENLCNLEKKYSSLSGGKGFPVNPNTLKEGYISVNEINEPCGNSTNLSPSTQFPADADAVATEPATAVLASQPQSKEHFRSLEERKKQHKEGLYLSDTLPRKKTTSSISPHFSSATMGRSITPKAHLPLGQSNSCGSVLPPSLAAMAKDSESRRMLRGYNHQQMSEGHRQKSEFYNRTASESNVYLNSFHYPDHSYKDQAFDTLSLDSSDSMETSISACSPDNISSASTSNIARIEEMERLLKQAHAEKTRLLESREREMEAKKRALEEEKRRREILEKRLQEETSQRQKLIEKEVKIRERQRAQARPLTRYLPVRKEDFDLRSHVETAGHNIDTCYHVSITEKTCRGFLIKMGGKIKTWKKRWFVFDRNKRTFSYYADKHETKLKGVIYFQAIEEVYYDHLKNANKSPNPLLTFSVKTHDRIYYMVAPSPEAMRIWMDVIVTGAEGYTHFLL

SEQ ID NO: 11526 - protein, 1253 aa, Homo sapiens
MEEHSYIQKELDLQNGSLEEDSVVHSVENDSQNMMESLSPKKYSSSLRFKANGDYSGSYLTLSQPVPAKRSPSPLGTSVRSSPSLAKIQGSKQFSYDGTDKNIPMKPPTPLLNTTSSLSGYPLGRADFDHYTGRDSERALRLSEKPPYSKYSSRHKSHDNVYSLGGLEGRKASGSLLAMWNGSSLSDAGPPPISRSGAASMPSSPKQARKMSIQDSLALQPKLTRHKELASENINLRTRKYSSSSLSHMGAYSRSLPRLYRATENQLTPLSLPPRNSLGNSKRTKLGEKDLPHSVIDNDNYLNFSSLSSGALPYKTSASEGNPYVSSTLSVPASPRVARKMLLASTSSCASDDFDQASYVGTNPSHSLLAGESDRVFATRRNFSCGSVEFDEADLESLRQASGTPQPALRERKSSISSISGRDDLMDYHRRQREERLREQEMERLERQRLETILSLCAEYTKPDSRLSTGTTVEDVQKINKELEKLQLSDEESVFEEALMSPDTRYRCHRKDSLPDADLASCGSLSQSSASFFTPRSTRNDELLSDLTRTPPPPSSTFPKASSESSYLSILPKTPEGISEEQRSQELAAMEETRIVILNNLEELKQKIKDINDQMDESFRELDMECALLDGEQKSETTELMKEKEILDHLNRKIAELEKNIVGEKTKEKVKLDAEREKLERLQELYSEQKTQLDNCPESMREQLQQQLKRDADLLDVESKHFEDLEFQQLEHESRLDEEKENLTQQLLREVAEYQRNIVSRKEKISALKKQANHIVQQAQREQDHFVKEKNNLIMMLQREKENLCNLEKKYSSLSGGKGFPVNPNTLKEGYISVNEINEPCGNSTNLSPSTQFPADADAVATEPATAVLASQPQSKEHFRSLEERKKQHKEGLYLSDTLPRKKTTSSISPHFSSATMGRSITPKAHLPLGQSNSCGSVLPPSLAAMAKDSESRRMLRGYNHQQMSEGHRQKSEFYNRTASESNVYLNSFHYPDHSYKDQAFDTLSLDSSDSMETSISACSPDNISSASTSNIARIEEMERLLKQAHAEKTRLLESREREMEAKKRALEEEKRRREILEKRLQEETSQRQKLIEKEVKIRERQRAQARPLTRYLPVRKEDFDLRSHVETAGHNIDTCYHVSITEKTCRGFLIKMGGKIKTWKKRWFVFDRNKRTFSYYADKHETKLKGVIYFQAIEEVYYDHLKNANKSPNPLLTFSVKTHDRIYYMVAPSPEAMRIWMDVIVTGAEGYTHFLL

SEQ ID NO: 11527 - protein, 608 aa, Homo sapiens
MRPVSVWQWSPWGLLLCLLCSSCLGSPSPSTGPEKKAGSQGLRFRLAGFPRKPYEGRVEIQRAGEWGTICDDDFTLQAAHILCRELGFTEATGWTHSAKYGPGTGRIWLDNLSCSGTEQSVTECASRGWGNSDCTHDEDAGVICKDQRLPGFSDSNVIEARVRLKGGAHPGEGRVEVLKASTWGTVCDRKWDLHAASVVCRELGFGSAREALSGARMGQGMGAIHLSEVRCSGQELSLWKCPHKNITAEDCSHSQDAGVRCNLPYTGAETRIRLSGGRSQHEGRVEVQIGGPGPLRWGLICGDDWGTLEAMVACRQLGLGYANHGLQETWYWDSGNITEVVMSGVRCTGTELSLDQCAHHGTHITCKRTGTRFTAGVICSETASDLLLHSALVQETAYIEDRPLHMLYCAAEENCLASSARSANWPYGHRRLLRFSSQIHNLGRADFRPKAGRHSWVWHECHGHYHSMDIFTHYDILTPNGTKVAEGHKASFCLEDTECQEDVSKRYECANFGEQGITVGCWDLYRHDIDCQWIDITDVKPGNYILQVVINPNFEVAESDFTNNAMKCNCKYDGHRIWVHNCHIGDAFSEEANRRFERYPGQTSNQII

SEQ ID NO: 11528 - protein, 594 aa, Homo sapiens
MRPKRLGRCCAGSRLGPGDPAALTCAPSPSASPAPEPSAQPQARGTGQRVGSRATSGSQFLSEARTGARPASEAGAKAGARRPSAFSAIQGDVRSMPDNSDAPWTRFVFQGPFGSRATGRGTGKAAGIWKTPAAYVGRRPGVSGPERAAFIRELEEALCPNLPPPVKKITQEDVKVMLYLLEELLPPVWESVTYGMVLQRERDLNTAARIGQSLVKQNSVLMEENSKLEALLGSAKEEILYLRHQVNLRDELLQLYSDSDEEDEDEEEEEEEKEAEEEQEEEEAEEDLQCAHPCDAPKLISQEALLHQHHCPQLEALQEKLRLLEEENHQLREEASQLDTLEDEEQMLILECVEQFSEASQQMAELSEVLVLRLENYERQQQEVARLQAQVLKLQQRCRMETLPGFQETLAEELRTSLRRMISDPVYFMERNYEMPRGDTSSLRYDFRYSEDREQVRGFEAEEGLMLAADIMRGEDFTPAEEFVPQEELGAAKKVPAEEGVMEEAELVSEETEGWEEVELELDEATRMNVVTSALEASGLGPSHLDMNYVLQQLANWQDAHYRRQLRWKMLQKGECPHGALPAASRTSCRSSCR

SEQ ID NO: 11529 - protein, 421 aa, Homo sapiens
MAVDVAEYHLSVIKSPPGWEVGVYAAGALALLGIAAVSLWKLWTSGSFPSPSPFPNYDYRYLQQKYGESCAEAREKRVPAWNAQRASTRGPPSRKGSLSIEDTFESISELGPLELMGRELDLAPYGTLRKSQSADSLNSISSVSNTFGQDFTLGQVEVSMEYDTASHTLNVAVMQGKDLLEREEASFESCFMRVSLLPDEQIVGISRIQRNAYSIFFDEKFSIPLDPTALEEKSLRFSVFGIDEDERNVSTGVVELKLSVLDLPLQPFSGWLYLQDQNKAADAVGEILLSLSYLPTAERLTVVVVKAKNLIWTNDKTTADPFVKVYLLQDGRKMSKKKTAVKRDDPNPVFNEAMIFSVPAIVLQDLSLRVTVAESSSDGRGDNVGHVIIGPSASGMGTTHWNQMLATLRRPVSMWHAVRRN

SEQ ID NO: 11530 - protein, 418 aa, Homo sapiens
MAPPLLLLLLASGAAACPLPCVCQNLSESLSTLCAHRGLLFVPPNVDRRTVELRLADNFIQALGPPDFRNMTGLVDLTLSRNAITRIGARAFGDLESLRSLHLDGNRLVELGTGSLRGPVNLQHLILSGNQLGRIAPGAFDDFLESLEDLDLSYNNLRQVPWAGIGAMPALHTLNLDHNLIDALPPGAFAQLGQLSRLDLTSNRLATLAPDPLFSRGRDAEASPAPLVLSFSGNPLHCNCELLWLRRLARPDDLETCASPPGLAGRYFWAVPEGEFSCEPPLIARHTQRLWVLEGQRATLRCRALGDPAPTMHWVGPDDRLVGNSSRARAFPNGTLEIGVTGAGDAGGYTCIATNPAGEATARVELRVLALPHGGNSRPGAAAWPGSPSLVFILSTSGSPVYLEGQGALSSVLASRPG

SEQ ID NO: 11531 - protein, 1178 aa, Homo sapiens
MLKFRTVHGGLRLLGIRRTSTAPAASPNVRRLEYKPIKKVMVANRGEIAIRVFRACTELGIRTVAIYSEQDTGQMHRQKADEAYLIGRGLAPVQAYLHIPDIIKVAKENNVDAVHPGYGFLSERADFAQACQDAGVRFIGPSPEVVRKMGDKVEARAIAIAAGVPVVPGTDAPITSLHEAHEFSNTYGFPIIFKAAYGGGGRGMRVVHSYEELEENYTRAYSEALAAFGNGALFVEKFIEKPRHIEVQILGDQYGNILHLYERDCSIQRRHQKVVEIAPAAHLDPQLRTRLTSDSVKLAKQVGYENAGTVEFLVDRHGKHYFIEVNSRLQVEHTVTEEITDVDLVHAQIHVAEGRSLPDLGLRQENIRINGCAIQCRVTTEDPARSFQPDTGRIEVFRSGEGMGIRLDNASAFQGAVISPHYDSLLVKVIAHGKDHPTAATKMSRALAEFRVRGVKTNIAFLQNVLNNQQFLAGTVDTQFIDENPELFQLRPAQNRAQKLLHYLGHVMVNGPTTPIPVKASPSPTDPVVPAVPIGPPPAGFRDILLREGPEGFARAVRNHPGLLLMDTTFRDAHQSLLATRVRTHDLKKIAPYVAHNFSKLFSMENWGGATFDVAMRFLYECPWRRLQELRELIPNIPFQMLLRGANAVGYTNYPDNVVFKFCEVAKENGMDVFRVFDSLNYLPNMLLGMEAAGSAGGVVEAAISYTGDVADPSRTKYSLQYYMGLAEELVRAGTHILCIKDMAGLLKPTACTMLVSSLRDRFPDLPLHIHTHDTSGAGVAAMLACAQAGADVVDVAADSMSGMTSQPSMGALVACTRGTPLDTEVPMERVFDYSEYWEGARGLYAAFDCTATMKSGNSDVYENEIPGGQYTNLHFQAHSMGLGSKFKEVKKAYVEANQMLGDLIKVTPSSKIVGDLAQFMVQNGLSRAEAEAQAEELSFPRSVVEFLQGYIGVPHGGFPEPFRSKVLKDLPRVEGRPGASLPPLDLQALEKELVDRHGEEVTPEDVLSAAMYPDVFAHFKDFTATFGPLDSLNTRLFLQGPKIAEEFEVELERGKTLHIKALAVSDLNRAGQRQVFFELNGQLRSILVKDTQAMKEMHFHPKALKDVKGQIGAPMPGKVIDIKVVAGAKVAKGQPLCVLSAMKMETVVTSPMEGTVRKVHVTKDMTLEGDDLILEIE

SEQ ID NO: 11532 - protein, 627 aa, Homo sapiens
MCVPRSGLILSCICLYCGVLLPVLLPNLPFLTCLSMSTLESVTYLPEKGLYCQRLPSSRTHGGTESLKGKNTENMGFYGTLKMIFYKMKRKLDHGSEVRSFSLGKKPCKVSEYTSTTGLVPCSATPTTFGDLRAANGQGQQRRRITSVQPPTGLQEWLKMFQSWSGPEKLLALDELIDSCEPTQVKHMMQVIEPQFQRDFISLLPKELALYVLSFLEPKDLLQAAQTCRYWRILAEDNLLWREKCKEEGIDEPLHIKRRKVIKPGFIHSPWKSAYIRQHRIDTNWRRGELKSPKVLKGHDDHVITCLQFCGNRIVSGSDDNTLKVWSAVTGKCLRTLVGHTGGVWSSQMRDNIIISGSTDRTLKVWNAETGECIHTLYGHTSTVRCMHLHEKRVVSGSRDATLRVWDIETGQCLHVLMGHVAAVRCVQYDGRRVVSGAYDFMVKVWDPETETCLHTLQGHTNRVYSLQFDGIHVVSGSLDTSIRVWDVETGNCIHTLTGHQSLTSGMELKDNILVSGNADSTVKIWDIKTGQCLQTLQGPNKHQSAVTCLQFNKNFVITSSDDGTVKLWDLKTGEFIRNLVTLESGGSGGVVWRIRASNTKLVCAVGSRNGTEETKLLVLDFDVDMK

SEQ ID NO: 11533 - protein, 368 aa, Homo sapiens
MSGAPTAGAALMLCAATAVLLSAQGGPVQSKSPRFASWDEMNVLAHGLLQLGQGLREHAERTRSQLSALERRLSACGSACQGTEGSTDLPLAPESRVDPEVLHSLQTQLKAQNSRIQQLFHKVAQQQRHLEKQHLRIQHLQSQFGLLDHKHLDHEVAKPARRKRLPEMAQPVDPAHNVSRLHHGGWTVIQRRHDGSVDFNRPWEAYKAGFGDPHGEFWLGLEKVHSITGDRNSRLAVQLRDWDGNAELLQFSVHLGGEDTAYSLQLTAPVAGQLGATTVPPSGLSVPFSTWDQDHDLRRDKNCAKSLSGGWWFGTCSHSNLNGQYFRSIPQQRQKLKKGIFWKTWRGRYYPLQATTMLIQPMAAEAAS

SEQ ID NO: 11534 - protein, 750 aa, Homo sapiens
MAQASRSGSLPPLVIVPPLRAQPGGTGEEQWERSRTGGLRWEVHCWPSGTSGGTPWWPTPADVSEDYEADAAAWRRGPAGGGPIPPALQRLRAVLLRLHREREQLLQARDCAYHLQSAVRLMKTLSPGSPSGGPSPLPQWCRDLQLHPSQGAVLRIGPGETLEPLLLARPIGLAAQCLEAVIEMQLRALGREPASPGLSSQLAELLFALPAYHTLQRKALSHVPGAARPFPTSRVLRLLTGERGCQVASRLDEALQGSALRDQLRRRCQEEGDLLPGLLGLVGGVAGSASCGLGLGGAGALWSQYWTLLWAACAQSLDLNLGPWRDPRATAQQLSQALGQASLPQECEKELASLCHRLLHQSLIWSWDQGFCQALGSALGGQSSLPTSSGTAELLQQLFPPLLDALREPRLRRIFCQPADPAPVALGLCTLQTTLLWFLGRAQQYLAAWDPASFLLLIQKDLPPLLHEAEALYSLASEESLALEVEQQLGLEIQKLTAQIQLLPEESLSVFSQECHKQAMQGFKLYMPRGRYWRLRLCPEPPSAPSEYAGLVVRTVLEPVLQGLQGLPPQAQAPALGQALTAIVGAWLDHILTHGIRFSLQGALQLKQDFGVVRELLEEEQWSLSPDLRQTLLMLSIFQQLDGALLCLLQQPLPKSQVHRRPPCCCACQEVQTTKLPSSCLNSLESLEPPLQPGTSPAQTGQLQSTLGGRGPSPEGYLVGNQQAWLALRQHQRPRWHLPFFSCLGTSPES

SEQ ID NO: 11535 - protein, 303 aa, Homo sapiens
MARASSGNGSEEAWGALRAPQQQSPAASSLEGAIWRRAGTQTRALDAILYHPQQSHLLRELCPGVNNQPYLCESGHCCGETGCCTYYYELWWFWLLWTVLILFSCCCAFRHRRAKLRLQQQQRQREINLLAYHGACHGAGPFPTGSLLDLRFLSTFKPPAYEDVVHRPGTPPPPYTVAPGRPLTASSEQTCCSSSSSCPAHFEGTNVEGVSSHQSAPPHQEGEPGAGVTPASTPPSCRYRRLTGDSGIELCPCPASGEGEPVKEVRVSATLPDLEDYSPCALPPESVPQIFPMGLSSSEGDIP

SEQ ID NO: 11536 - protein, 156 aa, Homo sapiens
MRLRMELGAPEEMGQVPPLDSRPSSPALYFTHDASLVHKSPDPFGAVAAQKFSLAHSMLAISGHLDSDDDSGSGSLVGIDNKIEQAMDLVKSHLMFAVREEVEVLKEQIRELAERNAALEQENGLLRALASPEQLAQLPSSGVPRLGPPAPNGPSV

SEQ ID NO: 11537 - protein, 446 aa, Homo sapiens
MAAASSSDSDACGAESNEANSKWLDAHYDPMANIHTFSACLALADLHGDGEYKLVVGDLGPGGQQPRLKVLKGPLVMTESPLPALPAAAATFLMEQHEPRTPALALASGPCVYVYKNLRPYFKFSLPQLPPNPLEQDLWNQAKEDRIDPLTLKEMLESIRETAEEPLSIQSLRFLQLELSEMEAFVNQHKSNSIKRQTVITTMTTLKKNLADEDAVSCLVLGTENKELLVLDPEAFTILAKDAVTSLCFGRYGREDNTLIMTTRGGGLIIKILKRTAVFVEGGSEVGPPPAQAMKLNVPRKTRLYVDQTLREREAGTAMHRAFQTDLYLLRLRAARAYLQALESSLSPLSTTAREPLKLHAVVQGLGPTFKLTLHLQNTSTTRPVLGLLVCFLYNEALYSLPRAFFKVPLLVPGLNYPLETFVESLSNKGISDIIKVGPALVPRGR

SEQ ID NO: 11538 - protein, 175 aa, Homo sapiens
MGRPLLLPLLPLLLPPAFLQPSGSTGSGPSYLYGVTQPKHLSASMGGSVEIPFSFYYPWELATAPDVRISWRRGHFHRQSFYSTRPPSIHKDYVNRLFLNWTEGQKSGFLRISNLQKQDQSVYFCRVELDTRSSGRQQWQSIEGTKLSITQGNPSKTQRSHMRISGMKDKIQIPS

SEQ ID NO: 11539 - protein, 1271 aa, Homo sapiens
MAQSKRHVYSRTPSGSRMSAEASARPLRVGSRVEVIGKGHRGTVAYVGATLFATGKWVGVILDEAKGKNDGTVQGRKYFTCDEGHGIFVRQSQIQVFEDGADTTSPETPDSSASKVLKREGTDTTAKTSKLAPTARKTTTRRPKPTRPASTGVAGASSSLGPSGSASAGELSSSEPSTPAQTPLAAPIIPTPVLTSPGAVPPLPSPSKEEEGLRAQVRDLEEKLETLRLKRAEDKAKLKELEKHKIQLEQVQEWKSKMQEQQADLQRRLKEARKEAKEALEAKERYMEEMADTADAIEMATLDKEMAEERAESLQQEVEALKERVDELTTDLEILKAEIEEKGSDGAASSYQLKQLEEQNARLKDALVRMRDLSSSEKQEHVKLQKLMEKKNQELEVVRQQRERLQEELSQAESTIDELKEQVDAALGAEEMVEMLTDRNLNLEEKVRELRETVGDLEAMNEMNDELQENARETELELREQLDMAGARVREAQKRVEAAQETVADYQQTIKKYRQLTAHLQDVNRELTNQQEASVERQQQPPPETFDFKIKFAETKAHAKAIEMELRQMEVAQANRHMSLLTAFMPDSFLRPGGDHDCVLVLLLMPRLICKAELIRKQAQEKFELSENCSERPGLRGAAGEQLSFAAGLVYSLSLLQATLHRYEHALSQCSVDVYKKVGSLYPEMSAHERSLDFLIELLHKDQLDETVNVEPLTKAIKYYQHLYSIHLAEQPEDCTMQLADHIKFTQSALDCMSVEVGRLRAFLQGGQEATDIALLLRDLETSCSDIRQFCKKIRRRMPGTDAPGIPAALAFGPQVSDTLLDCRKHLTWVVAVLQEVAAAAAQLIAPLAENEGLLVAALEELAFKASEQIYGTPSSSPYECLRQSCNILISTMNKLATAMQEGEYDAERPPSKPPPVELRAAALRAEITDAEGLGLKLEDRETVIKELKKSLKIKGEELSEANVRLSLLEKKLDSAAKDADERIEKVQTRLEETQALLRKKEKEFEETMDALQADIDQLEAEKAELKQRLNSQSKRTIEGLRGPPPSGIATLVSGIAGEEQQRGAIPGQAPGSVPGPGLVKDSPLLLQQISAMRLHISQLQHENSILKGAQMKASLASLPPLHVAKLSHEGPGSELPAGALYRKTSQLLETLNQLSTHTHVVDITRTSPAAKSPSAQLMEQVAQLKSLSDTVEKLKDEVLKETVSQRPGATVPTDFATFPSSAFLRAKEEQQDDTVYMGKVTFSCAAGFGQRHRLVLTQEQLHQLHSRLIS

SEQ ID NO: 11540 - protein, 1121 aa, Homo sapiens
MKVKEEKAGVGKLDHTNHRRRFPDQKECPPIHIGLPVPTYPQRKTDQKGHLSGLQKVHWGLRPDQPQQELTGPGSGASSQDSSMDLISRTRSPAAEQLQDILGEEDEAPNPTLFTEMDTLQHDGDQMEWKESARWIKFEEKVEEGGERWSKPHVSTLSLHSLFELRTCLQTGTVLLDLDSGSLPQIIDDVIEKQIEDGLLRPELRERVSYVLLRRHRHQTKKPIHRSLADIGKSVSTTNRSPARSPGAGPSLHHSTEDLRMRQSANYGRLCHAQSRSMNDISLTPNTDQRKNKFMKKIPKDSEASNVLVGEVDFLDQPFIAFVRLIQSAMLGGVTEVPVPTRFLFILLGPSGRAKSYNEIGRAIATLMVDDLFSDVAYKARNREDLIAGIDEFLDEVIVLPPGEWDPNIRIEPPKKVPSADKRKSVFSLAELGQMNGSVGGGGGAPGGGNGGGGGGGSGGGAGSGGAGGTSSGDDGEMPAMHEIGEELIWTGRFFGGLCLDIKRKLPWFPSDFYDGFHIQSISAILFIYLGCITNAITFGGLLGDATDNYQGVMESFLGTAMAGSLFCLFSGQPLIILSSTGPILIFEKLLFDFSKGNGLDYMEFRLWIGLHSAVQCLILVATDASFIIKYITRFTEEGFSTLISFIFIYDAIKKMIGAFKYYPINMDFKPNFITTYKCECVAPDTVNTTVFNASAPLAPDTNASLYNLLNLTALDWSLLSKKECLSYGGRLLGNSCKFIPDLALMSFILFFGTYSMTLTLKKFKFSRYFPTKVRALVADFSIVFSILMFCGIDACFGLETPKLHVPSVIKPTRPDRGWFVAPFGKNPWWVYPASILPALLVTILIFMDQQITAVIVNRKENKLKKAAGYHLDLFWVGILMALCSFMGLPWYVAATVISIAHIDSLKMETETSAPGEQPQFLGVREQRVTGIIVFILTGISVFLAPILKCIPLPVLYGVFLYMGVASLNGIQFWERCKLFLMPAKHQPDHAFLRHVPLRRIHLFTLVQILCLAVLWILKSTVAAIIFPVMILGLIIVRRLLDFIFSQHDLAWIDNILPEKEKKETDKKRKRKKGAHEDCDEEPQFPPPSVIKIPMESVQSDPQNGIHCIARKRSSSWSYSL

SEQ ID NO: 11541 - protein, 1152 aa, Homo sapiens
MAVRKKDGGPNVKYYEAADTVTQFDNVRLWLGKNYKKYIQAEPPTNKSLSSLVVQLLQFQEEVFGKHVSNAPLTKLPIKCFLDFKAGGSLCHILAAAYKFKSDQGWRRYDFQNPSRMDRNVEMFMTIEKSLVQNNCLSRPNIFLCPEIEPKLLGKLKDIIKRHQGTVTEDKNNASHVVYPVPGNLEEEEWVRPVMKRDKQVLLHWGYYPDSYDTWIPASEIEASVEDAPTPEKPRKVHAKWILDTDTFNEWMNEEDYEVNDDKNPVSRRKKISAKTLTDEVNSPDSDRRDKKGGNYKKRKRSPSPSPTPEAKKKNAKKGPSTPYTKSKRGHREEEQEDLTKDMDEPSPVPNVEEVTLPKTVNTKKDSESAPVKGGTMTDLDEQEDESMETTGKDEDENSTGNKGEQTKNPDLHEDNVTEQTHHIIIPSYAAWFDYNSVHAIERRALPEFFNGKNKSKTPEIYLAYRNFMIDTYRLNPQEYLTSTACRRNLAGDVCAIMRVHAFLEQWGLINYQVDAESRPTPMGPPPTSHFHVLADTPSGLVPLQPKTPQGRQVDADTKAGRKGKELDDLVPETAKGKPELQTSASQQMLNFPDKGKEKPTDMQNFGLRTDMYTKKNVPSKSKAAASATREWTEQETLLLLEALEMYKDDWNKVSEHVGSRTQDECILHFLRLPIEDPYLEDSEASLGPLAYQPIPFSQSGNPVMSTVAFLASVVDPRVASAAAKSALEEFSKMKEEVPTALVEAHVRKVEEAAKVTGKADPAFGLESSGIAGTTSDEPERIEESGNDEARVEGQATDEKKEPKEPREGGGAIEEEAKEKTSEAPKKDEEKGKEGDSEKESEKSDGDPIVDPEKEKEPKEGQEEVLKEVVESEGERKTKVERDIGEGNLSTAAAAALAAAAVKAKHLAAVEERKIKSLVALLVETQMKKLEIKLRHFEELETIMDREREALEYQRQQLLADRQAFHMEQLKYAEMRARQQHFQQMHQQQQQPPPALPPGSQPIPPTGAAGPPAVHGLAVAPASVVPAPAGSGAPPGSLGPSEQIGQAGSTAGPQQQQPAGAPQPGAVPPGVPPPGPHGPSPFPNQQTPPSMMPGAVPGSGHPGVAAQSPAIVAAVQGNLLPSASPLPDPGTPLPPDPTAPSPGTVTPVPPPQ

SEQ ID NO: 11542 - protein, 982 aa, Homo sapiens [sequence omitted]

SEQ ID NO: 11543 - protein, 884 aa, Homo sapiens
MPAERPAGSGGSEAPAMVEQLDTAVITPAMLEEEEQLEAAGLERERKMLEKARMSWDRESTEIRYRRLQHLLEKSNIYSKFLLTKMEQQQLEEQKKKEKLERKKESLKVKKGKNSIDASEEKPVMRKKRGREDESYNISEVMSKEEILSVAKKNKKENEDENSSSTNLCVEDLQKNKDSNSIIKDRLSETVRQNTKFFFDPVRKCNGQPVPFQQPKHFTGGVMRWYQVEGMEWLRMLWENGINGILADEMGLGKTVQCIATIALMIQRGVPGPFLVCGPLSTLPNWMAEFKRFTPDIPTMLYHGTQEERQKLVRNIYKRKGTLQIHPVVITSFEIAMRDRNALQHCYWKYLIVDEGHRIKNMKCRLIRELKRFNADNKLLLTGTPLQNNLSELWSLLNFLLPDVFDDLKSFESWFDITSLSETAEDIIAKEREQNVLHMLHQERIPRMYVSEFTDEGFFEGKLPSRKDLYDIRPYENTYLLKLHTNFEILTPFLLRRLKSDVALEVPPKREVVVYAPLSKKQEIFYTAIVNRTIANMFGSSEKETIELSPTGRPKRRTRKSINYSKIDDFPNELEKLISQIQPEVDRERAVVEVNIPVESEVNLKLQNIMMLLRKCCNHPYLIEYPIDPVTQEFKIDEELVTNSGKFLILDRMLPELKKRGHKVLLFSQMTSMLDILMDYCHLRDFNFSRLDGSMSYSEREKNMHSFNTDPEVFIFLVSTRAGGLGINLTAADTVIIYDSDWNPQSDLQAQDRCHRIGQTKPVVVYRLVTANTIDQKIVERAAAKRKLEKLIIHKNHFKGGQSGLNLSKNFLDPKELMELLKSRDYEREIKGSREKVISDKDLELLLDRSDLIDQMNASGPIKEKMGIFKILENSEDSSPECLF

SEQ ID NO: 11544 - protein, 740 aa, Homo sapiens
MPAERPAGSGGSEAPAMVEQLDTAVITPAMLEEEEQLEAAGLERERKMLEKARMSWDRESTEIRYRRLQHLLEKSNIYSKFLLTKMEQQQLEEQKKKEKLERKKESLKVKKGKNSIDASEEKPVMRKKRGREDESYNISEVMSKEEILSVAKKNKKENEDENSSSTNLCVEDLQKNKDSNSIIKDRLSETVRQNTKFFFDPVRKCNGQPVPFQQPKHFTGGVMRWYQVEGMEWLRMLWENGINGILADEMGLGKTVQCIATIALMIQRGVPGPFLVCGPLSTLPNWMAEFKRFTPDIPTMLYHGTQEERQKLVRNIYKRKGTLQIHPVVITSFEIAMRDRNALQILTPFLLRRLKSDVALEVPPKREVVVYAPLSKKQEIFYTAIVNRTIANMFGSSEKETIELSPTGRPKRRTRKSINYSKIDDFPNELEKLISQIQPEVDRERAVVEVNIPVESEVNLKLQNIMMLLRKCCNHPYLIEYPIDPVTQEFKIDEELVTNSGKFLILDRMLPELKKRGHKVLLFSQMTSMLDILMDYCHLRDFNFSRLDGSMSYSEREKNMHSFNTDPEVFIFLVSTRAGGLGINLTAADTVIIYDSDWNPQSDLQAQDRCHRIGQTKPVVVYRLVTANTIDQKIVERAAAKRKLEKLIIHKNHFKGGQSGLNLSKNFLDPKELMELLKSRDYEREIKGSREKVISDKDLELLLDRSDLIDQMNASGPIKEKMGIFKILENSEDSSPECLF

SEQ ID NO: 11545 - protein, 1104 aa, Homo sapiens
MERSPGEGPSPSPMDQPSAPSDPTDQPPAAHAKPDPGSGGQPAGPGAAGEALAVLTSFGRRLLVLIPVYLAGAVGLSVGFVLFGLALYLGWRRVRDEKERSLRAARQLLDDEEQLTAKTLYMSHRELPAWVSFPDVEKAEWLNKIVAQVWPFLGQYMEKLLAETVAPAVRGSNPHLQTFTFTRVELGEKPLRIIGVKVHPGQRKEQILLDLNISYVGDVQIDVEVKKYFCKAGVKGMQLHGVLRVILEPLIGDLPFVGAVSMFFIRRPTLDINWTGMTNLLDIPGLSSLSDTMIMDSIAAFLVLPNRLLVPLVPDLQDVAQLRSPLPRGIIRIHLLAARGLSSKDKYVKGLIEGKSDPYALVRLGTQTFCSRVIDEELNPQWGETYEVMVHEVPGQEIEVEVFDKDPDKDDFLGRMKLDVGKVLQASVLDDWFPLQGGQGQVHLRLEWLSLLSDAEKLEQVLQWNWGVSSRPDPPSAAILVVYLDRAQDLPLKKGNKEPNPMVQLSIQDVTQESKAVYSTNCPVWEEAFRFFLQDPQSQELDVQVKDDSRALTLGALTLPLARLLTAPELILDQWFQLSSSGPNSRLYMKLVMRILYLDSSEICFPTVPGCPGAWDVDSENPQRGSSVDAPPRPCHTTPDSQFGTEHVLRIHVLEAQDLIAKDRFLGGLVKGKSDPYVKLKLAGRSFRSHVVREDLNPRWNEVFEVIVTSVPGQELEVEVFDKDLDKDDFLGRCKVRLTTVLNSGFLDEWLTLEDVPSGRLHLRLERLTPRPTAAELEEVLQVNSLIQTQKSAELAAALLSIYMERAEDLPLRKGTKHLSPYATLTVGDSSHKTKTISQTSAPVWDESASFLIRKPHTESLELQVRGEGTGVLGSLSLPLSELLVADQLCLDRWFTLSSGQGQVLLRAQLGILVSQHSGVEAHSHSYSHSSSSLSEEPELSGGPPHITSSAPELRQRLTHVDSPLEAPAGPLGQVKLTLWYYSEERKLVSIVHGCRSLRQNGRDPPDPYVSLLLLPDKNRGTKRRTSQKKRTLSPEFNERFEWELPLDEAQRRKLDVSVKSNSSFMSRERELLGKVQLDLAETDLSQGVARWYDLMDNKDKGSS

SEQ ID NO: 11546 - protein, 618 aa, Homo sapiens
MGVGRQQRGPFQGVRVKNSVKELLLHIRSHKQKASGQAVDDFKTQGVNIEQFRELKNTVSYSGKRKGPDSLSDGPACKRPALLHSQFLTPPQTPTPGESMEDVHLNEPKQESSADLLQNIINIKNECSPVSLNTVQVSWLNPVVVPQSSPAEQCQDFHGGQVFSPPQKCQPFQVRGSQQMIDQASLYQYSPQNQHVEQQPHYTHKPTLEYSPFPIPPQSPAYEPNLFDGPESQFCPNQSLVSLLGDQRESENIANPMQTSSSVQQQNDAHLHSFSMMPSSACEAMVGHEMASDSSNTSLPFSNMGNPMNTTQLGKSLFQWQVEQEESKLANISQDQFLSKDADGDTFLHIAVAQGRRALSYVLARKMNALHMLDIKEHNGQSAFQVAVAANQHLIVQDLVNIGAQVNTTDCWGRTPLHVCAEKGHSQVLQAIQKGAVGSNQFVDLEATNYDGLTPLHCAVIAHNAVVHELQRNQQPHSPEVQELLLKNKSLVDTIKCLIQMGAAVEAKDRKSGRTALHLAAEEANLELIRLFLELPSCLSFVNAKAYNGNTALHVAASLQYRLTQLDAVRLLMRKGADPSTRNLENEQPVHLVPDGPVGEQIRRILKGKSIQQRAPPY

SEQ ID NO: 11547 - protein, 807 aa, Homo sapiens
MVPAWLWLLCVSVPQALPKAQPAELSVEVPENYGGNFPLYLTKLPLPREGAEGQIVLSGDSGKATEGPFAMDPDSGFLLVTRALDREEQAEYQLQVTLEMQDGHVLWGPQPVLVHVKDENDQVPHFSQAIYRARLSRGTRPGIPFLFLEASDRDEPGTANSDLRFHILSQAPAQPSPDMFQLEPRLGALALSPKGSTSLDHALERTYQLLVQVKDMGDQASGHQATATVEVSIIESTWVSLEPIHLAENLKVLYPHHMAQVHWSGGDVHYHLESHPPGPFEVNAEGNLYVTRELDREAQAEYLLQVRAQNSHGEDYAAPLELHVLVMDENDNVPICPPRDPTVSIPELSPPGTEVTRLSAEDADAPGSPNSHVVYQLLSPEPEDGVEGRAFQVDPTSGSVTLGVLPLRAGQNILLLVLAMDLAGAEGGFSSTCEVEVAVTDINDHAPEFITSQIGPISLPEDVEPGTLVAMLTAIDADLEPAFRLMDFAIERGDTEGTFGLDWEPDSGHVRLRLCKNLSYEAAPSHEVVVVVQSVAKLVGPGPGPGATATVTVLVERVMPPPKLDQESYEASVPISAPAGSFLLTIQPSDPISRTLRFSLVNDSEGWLCIEKFSGEVHTAQSLQGAQPGDTYTVLVEAQDTALTLAPVPSQYLCTPRQDHGLIVSGPSKDPDLASGHGPYSFTLGPNPTVQRDWRLQTLNGSHAYLTLALHWVEPREHIIPVVVSHNAQMWQLLVRVIVCRCNVEGQCMRKVGRMKGMPTKLSAVGILVGTLVAIGIFLILIFTHWTMSRKKDPDQPADSVPLKATV

SEQ ID NO: 11548 - protein, 521 aa, Homo sapiens
MSQIRKLDEDASPNEEKGDVPKDTLDDLFPNEDEQSPAPSPGGGDVSGQHGGYEIPARLRTLHNLVIQYASQGRYEVAVPLCKQALEDLEKTSGHDHPDVATMLNILALVYRDQNKYKEAAHLLNDALAIREKTLGKDHPAVAATLNNLAVLYGKRGKYKEAEPLCKRALEIREKVLGKFHPDVAKQLSNLALLCQNQGKAEEVEYYYRRALEIYATRLGPDDPNVAKTKNNLASCYLKQGKYQDAETLYKEILTRAHEKEFGSVNGDNKPIWMHAEEREESKDKRRDSAPYGEYGSWYKACKVDSPTVNTTLRSLGALYRRQGKLEAAHTLEDCASRNRKQGLDPASQTKVVELLKDGSGRRGDRRSSRDMAGGAGPRSESDLEDVGPTAEWNGDGSGSLRRSGSFGKLRDALRRSSEMLVKKLQGGTPQEPPNPRMKRASSLNFLNKSVEEPTQVGAGGCLGTGQLRPGLHACCQASLQHASSSSNSSWLCLRPTLGWTTGRHEGNPASPGGGRVNGQC

SEQ ID NO: 11549 - protein, 545 aa, Homo sapiens
MAMMVFPREEKLSQDEIVLGTKAVIQGLETLRGEHRALLAPLVAPEAGEAEPGSQERCILLRRSLEAIELGLGEAQEEKGDVPKDTLDDLFPNEDEQSPAPSPGGGDVSGQHGGYEIPARLRTLHNLVIQYASQGRYEVAVPLCKQALEDLEKTSGHDHPDVATMLNILALVYRDQNKYKEAAHLLNDALAIREKTLGKDHPAVAATLNNLAVLYGKRGKYKEAEPLCKRALEIREKVLGKFHPDVAKQLSNLALLCQNQGKAEEVEYYYRRALEIYATRLGPDDPNVAKTKNNLASCYLKQGKYQDAETLYKEILTRAHEKEFGSVNGDNKPIWMHAEEREESKDKRRDSAPYGEYGSWYKACKVDSPTVNTTLRSLGALYRRQGKLEAAHTLEDCASRNRKQGLDPASQTKVVELLKDGSGRRGDRRSSRDMAGGAGPRSESDLEDVGPTAEWNGDGSGSLRRSGSFGKLRDALRRSSEMLVKKLQGGTPQEPPNPRMKRASSLNFLNKSVEEPTQPGGTGLSDSRTLSSSSMDLSRRSSLVG

SEQ ID NO: 11550 - protein, 457 aa, Homo sapiens
MYESVEVGGPTPNPFLVVDFYNQNRACLLPEKGLPAPGPYSTPLRTPLWNGSNHSIETQSSSSEEIVPSPPSPPPLPRIYKPCFVCQDKSSGYHYGVSACEGCKGFFRRSIQKNMVYTCHRDKNCIINKVTRNRCQYCRLQKCFEVGMSKESVRNDRNKKKKEVPKPECSESYTLTPEVGELIEKVRKAHQETFPALCQLGKYTTNNSSEQRVSLDIDLWDKFSELSTKCIIKTVEFAKQLPGFTTLTIADQITLLKAACLDILILRICTRYTPEQDTMTFSDGLTLNRTQMHNAGFGPLTDLVFAFANQLLPLEMDDAETGLLSAICLICGDRQDLEQPDRVDMLQEPLLEALKVYVRKRRPSRPHMFPKMLMKITDLRSISAKGAERVITLKMEIPGSMPPLIQEMLENSEGLDTLSGQPGGGGRDGGGLAPPPGSCSPSLSPSSNRSSPATHSP

SEQ ID NO: 11551 - protein, 1412 aa, Homo sapiens
MVKLDIHTLAHHLKQERLYVNSEKQLIQRLNADVLKTAEKLYRTAWIAKQQRINLDRLIITSAEASPAECCQHAKILEDTQFVDGYKQLGFQETAYGEFLSRLRENPRLIASSLVAGEKLNQENTQSVIYTVFTSLYGNCIMQEDESYLLQVLRYLIEFELKESDNPRRLLRRGTCAFSILFKLFSEGLFSAKLFLTATLHEPIMQLLVEDEDHLETDPNKLIERFSPSQQEKLFGEKGSDRFRQKVQEMVESNEAKLVALVNKFIGYLKQNTYCFPHSLRWIVSQMYKTLSCVDRLEVGEVRAMCTDLLLACFICPAVVNPEQYGIISDAPINEVARFNLMQVGRLLQQLAMTGSEEGDPRTKSSLGKFDKSCVAAFLDVVIGGRAVETPPLSSVNLLEGLSRTVVYITYSQLITLVNFMKSVMSGDQLREDRMALDNLLANLPPAKPGKSSSLEMTPYNTPQLSPATTPANKKNRLPIATRSRSRTNMLMDLHMDHEGSSQETIQEVQPEEVLVISLGTGPQLTPGMMSENEVLNMQLSDGGQGDVPVDENKLHGPSNRSNSVSSLDLEGESVSELGAGPSGSNGVEALQLLEHEQATTQDNLDDKLRKFEIRDMMGLTDDRDISETVSETWSTDVLGSDFDPNIDEDRLQEIAGAAAENMLGSLLCLPGSGSVLLDPCTGSTISETTSEAWSVEVLPSDSEAPDLKQEERLQELESCSGLGSTSDDTDVREVSSRPSTPGLSVVSGISATSEDIPNKIEDLRSECSSDFGGKDSVTSPDMDEITHGAHQLTSPPSQSESLLAMFDPLSSHEGASAVVRPKVHYARPSHPPPDPPILEGAVGGNEARLPNFGSHVLTPAEMEAFKQRHSYPERLVRSRSSDIVSSVRRPMSDPSWNRRPGNEERELPPAAAIGATSLVAAPHSSSSSPSKDSSRGETEERKDSDDEKSDRNRPWWRKRFVSAMPKDDPSPRLSAQAQVAEDILDKYRNAIKRTSPSDGAMANYESTEVMGDGESAHDSPRDEALQNISADDLPDSASQAAHPQDSAFSYRDAKKKLRLALCSADSVAFPVLTHSTRNGLPDHTDPEDNEIVCFLKVQIAEAINLQDKNLMAQLQETMRCVCRFDNRTCRKLLASIAEDYRKRAPYIAYLTRCRQGLQTTQAHLERLLQRVLRDKEVANRYFTTVCVRLLLESKEKKIREFIQDFQKLTAADDKTAQVEDFLQFLYGAMAQDVIWQNASEEQLQDAQLAIERSVMNRIFKLAFYPNQDGDILRDQVLHEHIQRLSKVVTANHRALQIPEVYLREAPWPSAQSEIRTISAYKTPRDKVQCILRMCSTIMNLLSLANEDSVPGADDFVPVLVFVLIKANPPCLLSTVQYISSFYASCLSGEESYWWMQFTAAVEFIKTIDDRK

SEQ ID NO: 11552 - protein, 478 aa, Homo sapiens
MMSQTMTQAGVSFRHSVRAAQCHTRVPNTWPRATRPYASCRRSPRLRGRWPGSAGQGAGGRAPRAGWRAGDVTGSAIETQSSSSEEIVPSPPSPPPLPRIYKPCFVCQDKSSGYHYGVSACEGCKGFFRRSIQKNMVYTCHRDKNCIINKVTRNRCQYCRLQKCFEVGMSKESVRNDRNKKKKEVPKPECSESYTLTPEVGELIEKVRKAHQETFPALCQLGKYTTNNSSEQRVSLDIDLWDKFSELSTKCIIKTVEFAKQLPGFTTLTIADQITLLKAACLDILILRICTRYTPEQDTMTFSDGLTLNRTQMHNAGFGPLTDLVFAFANQLLPLEMDDAETGLLSAICLICGDRQDLEQPDRVDMLQEPLLEALKVYVRKRRPSRPHMFPKMLMKITDLRSISAKGAERVITLKMEIPGSMPPLIQEMLENSEGLDTLSGQPGGGGRDGGGLAPPPGSCSPSLSPSSNRSSPATHSP

SEQ ID NO: 11553 - protein, 423 aa, Homo sapiens
MQRVNMIMAESPGLITICLLGYLLSAECTVFLDHENANKILNRPKRYNSGKLEEFVQGNLERECMEEKCSFEEAREVFENTERTTEFWKQYVDVTCNIKNGRCEQFCKNSADNKVVCSCTEGYRLAENQKSCEPAVPFPCGRVSVSQTSKLTRAETVFPDVDYVNSTEAETILDNITQSTQSFNDFTRVVGGEDAKPGQFPWQVVLNGKVDAFCGGSIVNEKWIVTAAHCVETGVKITVVAGEHNIEETEHTEQKRNVIRIIPHHNYNAAINKYNHDIALLELDEPLVLNSYVTPICIADKEYTNIFLKFGSGYVSGWGRVFHKGRSALVLQYLRVPLVDRATCLRSTKFTIYNNMFCAGFHEGGRDSCQGDSGGPHVTEVEGTSFLTGIISWGEECAMKGKYGIYTKVSRYVNWIKEKTKLT

SEQ ID NO: 11554 - protein, 886 aa, Homo sapiens
MLNAKPEDVHVQSPLSKFRSSERWTLPLQWERSLRNKVISLDHKNKKHIRGCPVTSKSSPERGSQRSKTVDDNSAKQTAHNKEKRRKDDGISLLISDTQPEDLNSGSRGCDHLEQESRNKDVKYSDSKVELTLISRKTKRRLRNNLPDSQYCTSLDKSTEQTKKQEDDSTISTEFEKPSENYHQDPKLPEEITTKPTKSDFTKLSSLNSQELTLSNATKSASAGSTTETVENSNSIDIVGISSLVEKDENELNTIEKPILRGHNEGNQSLISAEPIVVSSDEEGPVEHKSSEILKLQSKQDRETTNENESTSESALLELPLITCESVQMSSELCPYNPVMENISSIMPSNEMDLQLDFIFTSVYIGKIKGASKGCVTITKKYIKIPFQVSLNEISLLVDTTHLKRFGLWKSKDDNHSKRSHAILFFWVSSDYLQEIQTQLEHSVLSQQSKSSEFIFLELHNPVSQREELKLKDIMTEISIISGELELSYPLSWVQAFPLFQNLSSKESSFIHYYCVSTCSFPAGVAVAEEMKLKSVSQPSNTDAAKPTYTFLQKQSSGCYSLSITSNPDEEWREVRHTGLVQKLIVYPPPPTKGGLGVTNEDLECLEEGEFLNDVIIDFYLKYLILEKASDELVERSHIFSSFFYKCLTRKENNLTEDNPNLSMAQRRHKRVRTWTRHINIFNKDYIFVPVNESSHWYLAVICFPWLEEAVYEDFPQTVSQQSQAQQSQNDNKTIDNDLRTTSTLSLSAEDSQSTESNMSVPKKMCKRPCILILDSLKAASVQNTVQNLREYLEVEWEVKLKTHRQFSKTNMVDLCPKVPKQDNSSDCGVYLLQYVESFFKDPIVNFELPIHLEKWFPRHVIKTKREDIRELILKLHLQQQKGSSS

SEQ ID NO: 11555 - protein, 985 aa, Homo sapiens
MDKRKLGRRPSSSEIITEGKRKKSSSDLSEIRKMLNAKPEDVHVQSPLSKFRSSERWTLPLQWERSLRNKVISLDHKNKKHIRGCPVTSKSSPERQLKVMLTNVLWTDLGRKFRKTLPRNDANLCDANKVQSDSLPSTSVDSLETCQKLEPLRQSLNLSERGSQRSKTVDDNSAKQTAHNKEKRRKDDGISLLISDTQPEDLNSGSRGCDHLEQESRNKDVKYSDSKVELTLISRKTKRRLRNNLPDSQYCTSLDKSTEQTKKQEDDSTISTEFEKPSENYHQDPKLPEEITTKPTKSDFTKLSSLNSQELTLSNATKSASAGSTTETVENSNSIDIVGISSLVEKDENELNTIEKPILRGHNEGNQSLISAEPIVVSSDEEGPVEHKSSEILKLQSKQDRETTNENESTSESALLELPLITCESVQMSSELCPYNPVMENISSIMPSNEMDLQLDFIFTSVYIGKIKGASKGCVTITKKYIKIPFQVSLNEISLLVDTTHLKRFGLWKSKDDNHSKRSHAILFFWVSSDYLQEIQTQLEHSVLSQQSKSSEFIFLELHNPVSQREELKLKDIMTEISIISGELELSYPLSWVQAFPLFQNLSSKESSFIHYYCVSTCSFPAGVAVAEEMKLKSVSQPSNTDAAKPTYTFLQKQSSGCYSLSITSNPDEEWREVRHTGLVQKLIVYPPPPTKGGLGVTNEDLECLEEGEFLNDVIIDFYLKYLILEKASDELVERSHIFSSFFYKCLTRKENNLTEDNPNLSMAQRRHKRVRTWTRHINIFNKDYIFVPVNESSHWYLAVICFPWLEEAVYEDFPQTVSQQSQAQQSQNDNKTIDNDLRTTSTLSLSAEDSQSTESNMSVPKKMCKRPCILILDSLKAASVQNTVQNLREYLEVEWEVKLKTHRQFSKTNMVDLCPKVPKQDNSSDCGVYLLQYVESFFKDPIVNFELPIHLEKWFPRHVIKTKREDIRELILKLHLQQQKGSSS

SEQ ID NO: 11556 - protein, 1050 aa, Homo sapiens
MDKRKLGRRPSSSEIITEGKRKKSSSDLSEIRKMLNAKPEDVHVQSPLSKFRSSERWTLPLQWERSLRNKVISLDHKNKKHIRGCPVTSKSSPERQLKVMLTNVLWTDLGRKFRKTLPRNDANLCDANKVQSDSLPSTSVDSLETCQKLEPLRQSLNLSERIPRVILTNVLGTELGRKYIRTPPVTEGSLSDTDNLQSEQLSSSSDGSLESYQNLNPHKSCYLSERGSQRSKTVDDNSAKQTAHNKEKRRKDDGISLLISDTQPEDLNSGSRGCDHLEQESRNKDVKYSDSKVELTLISRKTKRRLRNNLPDSQYCTSLDKSTEQTKKQEDDSTISTEFEKPSENYHQDPKLPEEITTKPTKSDFTKLSSLNSQELTLSNATKSASAGSTTETVENSNSIDIVGISSLVEKDENELNTIEKPILRGHNEGNQSLISAEPIVVSSDEEGPVEHKSSEILKLQSKQDRETTNENESTSESALLELPLITCESVQMSSELCPYNPVMENISSIMPSNEMDLQLDFIFTSVYIGKIKGASKGCVTITKKYIKIPFQVSLNEISLLVDTTHLKRFGLWKSKDDNHSKRSHAILFFWVSSDYLQEIQTQLEHSVLSQQSKSSEFIFLELHNPVSQREELKLKDIMTEISIISGELELSYPLSWVQAFPLFQNLSSKESSFIHYYCVSTCSFPAGVAVAEEMKLKSVSQPSNTDAAKPTYTFLQKQSSGCYSLSITSNPDEEWREVRHTGLVQKLIVYPPPPTKGGLGVTNEDLECLEEGEFLNDVIIDFYLKYLILEKASDELVERSHIFSSFFYKCLTRKENNLTEDNPNLSMAQRRHKRVRTWTRHINIFNKDYIFVPVNESSHWYLAVICFPWLEEAVYEDFPQTVSQQSQAQQSQNDNKTIDNDLRTTSTLSLSAEDSQSTESNMSVPKKMCKRPCILILDSLKAASVQNTVQNLREYLEVEWEVKLKTHRQFSKTNMVDLCPKVPKQDNSSDCGVYLLQYVESFFKDPIVNFELPIHLEKWFPRHVIKTKREDIRELILKLHLQQQKGSSS

SEQ ID NO: 11557 - protein, 182 aa, Homo sapiens
MPIPPPPPPPPGPPPPPTFHQANTEQPKLSRDEQRGRGALLQDICKGTKLKKVTNINDRSAPILETPPPPPPVIRNGARDAPPPPPPYRMHGSEPPSRGKPPPPPSRTPAGPPPPPPPPLRNGHRDSITTVRSFLDDFESKYSFHPVEDFPAPEEYKHFQRIYPSKTNRAARGAPPLPPILR

SEQ ID NO: 11558 - protein, 1478 aa, Homo sapiens
MVKLDIHTLAHHLKQERLYVNSEKQLIQRLNADVLKTAEKLYRTAWIAKQQRINLDRLIITSAEASPAECCQHAKILEDTQFVDGYKQLGFQETAYGEFLSRLRENPRLIASSLVAGEKLNQENTQSVIYTVFTSLYGNCIMQEDESYLLQVLRYLIEFELKESDNPRRLLRRGTCAFSILFKLFSEGLFSAKLFLTATLHEPIMQLLVEDEDHLETDPNKLIERFSPSQQEKLFGEKGSDRFRQKVQEMVESNEAKLVALVNKFIGYLKQNTYCFPHSLRWIVSQMYKTLSCVDRLEVGEVRAMCTDLLLACFICPAVVNPEQYGIISDAPINEVARFNLMQVGRLLQQLAMTGSEEGDPRTKSSLGKFDKSCVAAFLDVVIGGRAVETPPLSSVNLLEGLSRTVVYITYSQLITLVNFMKSVMSGDQLREDRMALDNLLANLPPAKPGKSSSLEMTPYNTPQLSPATTPANKKNRLPIATRSRSRTNMLMDLHMDHEGSSQETIQEVQPEEVLVISLGTGPQLTPGMMSENEVLNMQLSDGGQGDVPVDENKLHGKPDKTLRFSLCSDNLEGISEGPSNRSNSVSSLDLEGESVSELGAGPSGSNGVEALQLLEHEQATTQDNLDDKLRKFEIRDMMGLTDDRDISETVSETWSTDVLGSDFDPNIDEDRLQEIAGAAAENMLGSLLCLPGSGSVLLDPCTGSTISETTSEAWSVEVLPSDSEAPDLKQEERLQELESCSGLGSTSDDTDVREVSSRPSTPGLSVVSGISATSEDIPNKIEDLRSECSSDFGGKDSVTSPDMDEITHGAHQLTSPPSQSESLLAMFDPLSSHEGASAVVRPKVHYARPSHPPPDPPILEGAVGGNEARLPNFGSHVLTPAEMEAFKQRHSYPERLVRSRSSDIVSSVRRPMSDPSWNRRPGNEERELPPAAAIGATSLVAAPHSSSSSPSKDSSRGETEERKDSDDEKSDRNRPWWRKRFVSAMPKAPIPFRKKEKQEKDKDDLGPDRFSTLTDDPSPRLSAQAQVAEDILDKYRNAIKRTSPSDGAMANYESTGDNHDRDLSSKLLYHSDKEVMGDGESAHDSPRDEALQNISADDLPDSASQAAHPQDSAFSYRDAKKKLRLALCSADSVAFPVLTHSTRNGLPDHTDPEDNEIVCFLKVQIAEAINLQDKNLMAQLQETMRCVCRFDNRTCRKLLASIAEDYRKRAPYIAYLTRCRQGLQTTQAHLERLLQRVLRDKEVANRYFTTVCVRLLLESKEKKIREFIQDFQKLTAADDKTAQVEDFLQFLYGAMAQDVIWQNASEEQLQDAQLAIERSVMNRIFKLAFYPNQDGDILRDQVLHEHIQRLSKVVTANHRALQIPEVYLREAPWPSAQSEIRTISAYKTPRDKVQCILRMCSTIMNLLSLANEDSVPGADDFVPVLVFVLIKANPPCLLSTVQYISSFYASCLSGEESYWWMQFTAAVEFIKTIDDRK

SEQ ID NO: 11559 - protein, 1487 aa, Homo sapiens
MVKLDIHTLAHHLKQERLYVNSEKQLIQRLNADVLKTAEKLYRTAWIAKQQRINLDRLIITSAEASPAECCQHAKILEDTQFVDGYKQLGFQETAYGEFLSRLRENPRLIASSLVAGEKLNQENTQSVIYTVFTSLYGNCIMQEDESYLLQVLRYLIEFELKESDNPRRLLRRGTCAFSILFKLFSEGLFSAKLFLTATLHEPIMQLLVEDEDHLETDPNKLIERFSPSQQEKLFGEKGSDRFRQKVQEMVESNEAKLVALVNKFIGYLKQNTYCFPHSLRWIVSQMYKTLSCVDRLEVGEVRAMCTDLLLACFICPAVVNPEQYGIISDAPINEVARFNLMQVGRLLQQLAMTGSEEGDPRTKSSLGKFDKSCVAAFLDVVIGGRAVETPPLSSVNLLEGLSRTVVYITYSQLITLVNFMKSVMSGDQLREDRMALDNLLANLPPAKPGKSSSLEMTPYNTPQLSPATTPANKKNRLPIATRSRSRTNMLMDLHMDHEGSSQETIQEVQPEEVLVISLGTGPQLTPGMMSENEVLNMQLSDGGQGDVPVDENKLHGKPDKTLRFSLCSDNLEGISEGPSNRSNSVSSLDLEGESVSELGAGPSGSNGVEALQLLEHEQATTQDNLDDKLRKFEIRDMMGLTDDRDISETVSETWSTDVLGSDFDPNIDEDRLQEIAGAAAENMLGSLLCLPGSGSVLLDPCTGSTISETTSEAWSVEVLPSDSEAPDLKQEERLQELESCSGLGSTSDDTDVREVSSRPSTPGLSVVSGISATSEDIPNKIEDLRSECSSDFGGKDSVTSPDMDEITHDFLYILQPKQHFQHIEAEADMRIQLSSSAHQLTSPPSQSESLLAMFDPLSSHEGASAVVRPKVHYARPSHPPPDPPILEGAVGGNEARLPNFGSHVLTPAEMEAFKQRHSYPERLVRSRSSDIVSSVRRPMSDPSWNRRPGNEERELPPAAAIGATSLVAAPHSSSSSPSKDSSRGETEERKDSDDEKSDRNRPWWRKRFVSAMPKAPIPFRKKEKQEKDKDDLGPDRFSTLTDDPSPRLSAQAQVAEDILDKYRNAIKRTSPSDGAMANYESTEVMGDGESAHDSPRDEALQNISADDLPDSASQAAHPQDSAFSYRDAKKKLRLALCSADSVAFPVLTHSTRNGLPDHTDPEDNEIVCFLKVQIAEAINLQDKNLMAQLQETMRCVCRFDNRTCRKLLASIAEDYRKRAPYIAYLTRCRQGLQTTQAHLERLLQRVLRDKEVANRYFTTVCVRLLLESKEKKIREFIQDFQKLTAADDKTAQVEDFLQFLYGAMAQDVIWQNASEEQLQDAQLAIERSVMNRIFKLAFYPNQDGDILRDQVLHEHIQRLSKVVTANHRALQIPEVYLREAPWPSAQSEIRTISAYKTPRDKVQCILRMCSTIMNLLSLANEDSVPGADDFVPVLVFVLIKANPPCLLSTVQYISSFYASCLSGEESYWWMQFTAAVEFIKTIDDRK

SEQ ID NO: 11560 - protein, 2081 aa, Homo sapiens
MLCCLLVRASNLPSAKKDRRSDPVASLTFRGVKKRTKVIKNSVNPVWNEGFEWDLKGIPLDQGSELHVVVKDHETMGRNRFLGEAKVPLREVLATPSLSASFNAPLLDTKKQPTGASLVLQVSYTPLPGAVPLFPPPTPLEPSPTLPDLDVVADTGGEEDTEDQGLTGDEAEPFLDQSGGPGAPTTPRKLPSRPPPHYPGIKRKRSAPTSRKLLSDKPQDFQIRVQVIEGRQLPGVNIKPVVKVTAAGQTKRTRIHKGNSPLFNETLFFNLFDSPGELFDEPIFITVVDSRSLRTDALLGEFRMDVGTIYREPRHAYLRKWLLLSDPDDFSAGARGYLKTSLCVLGPGDEAPLERKDPSEDKEDIESNLLRPTGVALRGAHFCLKVFRAEDLPQMDDAVMDNVKQIFGFESNKKNLVDPFVEVSFAGKMLCSKILEKTANPQWNQNITLPAMFPSMCEKMRIRIIDWDRLTHNDIVATTYLSMSKISAPGGEIEEEPAGAVKPSKASDLDDYLGFLPTFGPCYINLYGSPREFTGFPDPYTELNTGKGEGVAYRGRLLLSLETKLVEHSEQKVEDLPADDILRVEKYLRRRKYSLFAAFYSATMLQDVDDAIQFEVSIGNYGNKFDMTCLPLASTTQYSRAVFDGCHYYYLPWGNVKPVVVLSSYWEDISHRIETQNQLLGIADRLEAGLEQVHLALKAQCSTEDVDSLVAQLTDELIAGCSQPLGDIHETPSATHLDQYLYQLRTHHLSQITEAALALKLGHSELPAALEQAEDWLLRLRALAEEPQNSLPDIVIWMLQGDKRVAYQRVPAHQVLFSRRGANYCGKNCGKLQTIFLKYPMEKVPGARMPVQIRVKLWFGLSVDEKEFNQFAEGKLSVFAETYENETKLALVGNWGTTGLTYPKFSDVTGKIKLPKDSFRPSAGWTWAGDWFVCPEKTLLHDMDAGHLSFVEEVFENQTRLPGGQWIYMSDNYTDVNGEKVLPKDDIECPLGWKWEDEEWSTDLNRAVDEQGWEYSITIPPERKPKHWVPAEKMYYTHRRRRWVRLRRRDLSQMEALKRHRQAEAEGEGWEYASLFGWKFHLEYRKTDAFRRRRWRRRMEPLEKTGPAAVFALEGALGGVMDDKSEDSMSVSTLSFGVNRPTISCIFDYGNRYHLRCYMYQARDLAAMDKDSFSDPYAIVSFLHQSQKTVVVKNTLNPTWDQTLIFYEIEIFGEPATVAEQPPSIVVELYDHDTYGADEFMGRCICQPSLERMPRLAWFPLTRGSQPSGELLASFELIQREKPAIHHIPGFEVQETSRILDESEDTDLPYPPPQREANIYMVPQNIKPALQRTAIEILAWGLRNMKSYQLANISSPSLVVECGGQTVQSCVIRNLRKNPNFDICTLFMEVMLPREELYCPPITVKVIDNRQFGRRPVVGQCTIRSLESFLCDPYSAESPSPQGGPDDVSLLSPGEDVLIDIDDKEPLIPIQEEEFIDWWSKFFASIGEREKCGSYLEKDFDTLKVYDTQLENVEAFEGLSDFCNTFKLYRGKTQEETEDPSVIGEFKGLFKIYPLPEDPAIPMPPRQFHQLAAQGPQECLVRIYIVRAFGLQPKDPNGKCDPYIKISIGKKSVSDQDNYIPCTLEPVFGKMFELTCTLPLEKDLKITLYDYDLLSKDEKIGETVVDLENRLLSKFGARCGLPQTYCVSGPNQWRDQLRPSQLLHLFCQQHRVKAPVYRTDRVMFQDKEYSIEEIEAGRIPNPHLGPVEERLALHVLQQQGLVPEHVESRPLYSPLQPDIEQGKLQMWVDLFPKALGRPGPPFNITPRRARRFFLRCIIWNTRDVILDDLSLTGEKMSDIYVKGWMIGFEEHKQKTDVHYRSLGGEGNFNWRFIFPFDYLPAEQVCTIAKKDAFWRLDKTESKIPARVVFQIWDNDKFSFDDFLGSLQLDLNRMPKPAKTAKKCSLDQLDDAFHPEWFVSLFEQKTVKGWWPCVAEEGEKKILAGKLEMTLEIVAESEHEERPAGQGRDEPNMNPKLEDPRRPDTSFLWFTSPYKTMKFILWRRFRWAIILFIILFILLLFLAIFIYAFPNYAAMKLVKPFS

SEQ ID NO: 11561 - protein, 387 aa, Homo sapiens
MSDSKEPRVQQLGLLEEDPTTNFQFQQIHGHKSSTGCLGHGALVLQLLSFMLLAGVLPRLSKVPSSLSQEQSEQDAIYQNLTQLKAAVGELSEKSKLQEIYQELTQLKAAVGELPEKSKLQEIYQELTRLKAAVGELPEKSKLQEIYQELTRLKAAVGELPEKSKLQEIYQELTRLKAAVGELPEKSKLQEIYQELTELKAAVGELPEKSKLQEIYQELTQLKAAVGELPDQSKQQQIYQELTDLKTAFERLCRHCPKDWTFFQGNCYFMSNSQRNWHDSVTACQEVRAQLVVIKTAEEQNFLQLQTSRSNRFSWMGLSDLNQEGTWQWVDGSPLSPSFQRYWNSGEPNNSGNEDCAEFSGSGWNDNRCDVDNYWICKKPAACFRDE

SEQ ID NO: 11562 - protein, 1014 aa, Homo sapiens
MSFSLAPFLSPQSWPPPLPPAQSEIMKVVNLKQAILQAWKERWSDYQWAINMKKFFPKGATWDILNLADALLEQAMIGPSPNPLILSYLKYAISSQMVSYSSVLTAISKFDDFSRDLCVQALLDIMDMFCDRLSCHGKAEECIGLCRALLSALHWLLRCTAASAERLREGLEAGTPAAGEKQLAMCLQRLEKTLSSTKNRALLHIAKLEEASSWTAIEHSLLKLGEILANLSNPQLRSQAEQCGTLIRSIPTMLSVHAEQMHKTGFPTVHAVILLEGTMNLTGETQSLVEQLTMVKRMQHIPTPLFVLEIWKACFVGLIESPEGTEELKWTAFTFLKIPQVLVKLKKYSHGDKDFTEDVNCAFEFLLKLTPLLDKADQRCNCDCTNFLLQECGKQGLLSEASVNNLMAKRKADREHAPQQKSGENANIQPNIQLILRAEPTVTNILKTMDADHSKSPEGLLGVLGHMLSGKSLDLLLAAAAATGKLKSFARKFINLNEFTTYGSEESTKPASVRALLFDISFLMLCHVAQTYGSEVILSESRTGAEVPFFETWMQTCMPEEGKILNPDHPCFRPDSTKVESLVALLNNSSEMKLVQMKWHEACLSISAAILEILNAWENGVLAFESIQKITDNIKGKVCSLAVCAVAWLVAHVRMLGLDEREKSLQMIRQLAGPLFSENTLQFYNERVVIMNSILERMCADVLQQTATQIKFPSTGVDTMPYWNLLPPKRPIKEVLTDIFAKVLEKGWVDSRSIHIFDTLLHMGGVYWFCNNLIKELLKETRKEHTLRAVELLYSIFCLDMQQVTLVLLGHILPGLLTDSSKWHSLMDPPGTALAKLAVWCALSSYSSHKGQASTRQKKRHREDIEDYISLFPLDDVQPSKLMRLLSSNEDDANILSSPTDRSMSSSLSASQLHTVNMRDPLNRVLANLFLLISSILGSRTAGPHTQFVQWFMEECVDCLEQGGRGSVLQFMPFTTVSELVKVSAMSSPKVVLAITDLSLPLGRQVAAKAIAAL

SEQ ID NO: 11563 - protein, 989 aa, Homo sapiens
MKVVNLKQAILQAWKERWSDYQWAINMKKFFPKGATWDILNLADALLEQAMIGPSPNPLILSYLKYAISSQMVSYSSVLTAISKFDDFSRDLCVQALLDIMDMFCDRLSCHGKAEECIGLCRALLSALHWLLRCTAASAERLREGLEAGTPAAGEKQLAMCLQRLEKTLSSTKNRALLHIAKLEEASSWTAIEHSLLKLGEILANLSNPQLRSQAEQCGTLIRSIPTMLSVHAEQMHKTGFPTVHAVILLEGTMNLTGETQSLVEQLTMVKRMQHIPTPLFVLEIWKACFVGLIESPEGTEELKWTAFTFLKIPQVLVKLKKYSHGDKDFTEDVNCAFEFLLKLTPLLDKADQRCNCDCTNFLLQECGKQGLLSEASVNNLMAKRKADREHAPQQKSGENANIQPNIQLILRAEPTVTNILKTMDADHSKSPEGLLGVLGHMLSGKSLDLLLAAAAATGKLKSFARKFINLNEFTTYGSEESTKPASVRALLFDISFLMLCHVAQTYGSEVILSESRTGAEVPFFETWMQTCMPEEGKILNPDHPCFRPDSTKVESLVALLNNSSEMKLVQMKWHEACLSISAAILEILNAWENGVLAFESIQKITDNIKGKVCSLAVCAVAWLVAHVRMLGLDEREKSLQMIRQLAGPLFSENTLQFYNERVVIMNSILERMCADVLQQTATQIKFPSTGVDTMPYWNLLPPKRPIKEVLTDIFAKVLEKGWVDSRSIHIFDTLLHMGGVYWFCNNLIKELLKETRKEHTLRAVELLYSIFCLDMQQVTLVLLGHILPGLLTDSSKWHSLMDPPGTALAKLAVWCALSSYSSHKGQASTRQKKRHREDIEDYISLFPLDDVQPSKLMRLLSSNEDDANILSSPTDRSMSSSLSASQLHTVNMRDPLNRVLANLFLLISSILGSRTAGPHTQFVQWFMEECVDCLEQGGRGSVLQFMPFTTVSELVKVSAMSSPKVVLAITDLSLPLGRQVAAKAIAAL

SEQ ID NO: 11564 - protein, 2875 aa, Homo sapiens
MKEHIIYQKLYGLILMSSFIFLSVVPENMTIQEKSTTVSQQIDMTTPSQITGVKPQNTAHSSTLLSQSIPIFATDYTTISYSNTTSPPLETMTAQKILKTLVDETATFAVDVLSTSSAISLPTQSISIDNTTNSMKKTKSPSSESTKTTKMVEAMATEIFQPPTPSNFLSTSRFTKNSVVSTTSAIKSQSAVTKTTSLFSTIESTSMSTTPCLKQKSTNTGALPISTAGQEFIESTAAGTVPWFTVEKTSPASTHVGTASSFPPEPVLISTAAPVDSVFPRNQTAFPLATTDMKIAFTVHSLTLPTRLIETTPAPRTAETELTSTNFQDVSLPRVEDAMSTSMSKETSSKTFSFLTSFSFTGTESVQTVIDAEATRTALTPEITLASTVAETMLSSTITGRVYTQNTPTADGHLLTLMSTRSASTSKAPESGPTSTTDEAAHLFSSNETIWTSRPDQALLASMNTTTILTFVPNENFTSAFHENTTYTEYLSATTNITPLKASPEGKGTTANDATTARYTTAVSKLTSPWFANFSIVSGTTSITNMPEFKLTTLLLKTIPMSTKPANELPLTPRETVVPSVDIISTLACIQPNFSTEESASETTQTEINGAIVFGGTTTPVPKSATTQRLNATVTRKEATSHYLMRKSTIAAVAEVSPFSTMLEVTDESAQRVTASVTVSSFPDIEKLSTPLDNKTATTEVRESWLLTKLVKTTPRSSYNEMTEMFNFNHTYVAHWTSETSEGISAGSPTSGSTHIFGEPLGASTTRISETSFSTTPTDRTATSLSDGILPPQPTAAHSSATPVPVTHMFSLPVNGSSVVAEETEVTMSEPSTLARAFSTSVLSDVSNLSSTTMTTALVPPLDQTASTTIVIVPTHGDLIRTTSEATVISVRKTSMAVPSLTETPFHSLRLSTPVTAKAETTLFSTSVDTVTPSTHTLVCSKPPPDNIPPASSTHVISTTSTPEATQPISQVEETSTYALSFPYTFSGGGVVASLATGTTETSVVDETTPSHISANKLTTSVNSHISSSATYRVHTPVSIQLVTSTSVLSSDKDQMTISLGKTPRTMEVTEMSPSKNSFISYSRGTPSLEMTDTGFPETTKISSHQTHSPSEIPLGTPSDGNLASSPTSGSTQITPTLTSSNTVGVHIPEMSTSLGKTALPSQALTITTFLCPEKESTSALPAYTPRTVEMIVNSTYVTHSVSYGQDTSFVDTTTSSSTRISNPMDINTTFSHLHSLRTQPEVTSVASFISESTQTFPESLSLSTAGLYNDGFTVLSDRITTAFSVPNVPTMLPRESSMATSTPIYQMSSLPVNVTAFTSKKVSDTPPIVITKSSKTMHPGCLKSPCTATSGPMSEMSSIPVNNSAFTPATVSSDTSTRVGLFSTLLSSVTPRTTMTMQTSTLDVTPVIYAGATSKNKMVSSAFTTEMIEAPSRITPTTFLSPTEPTLPFVKTVPTTIMAGIVTPFVGTTAFSPLSSKSTGAISSIPKTTFSPFLSATQQSSQADEATTLGILSGITNRSLSTVNSGTGVALTDTYSRITVPENMLSPTHADSLHTSFNIQVSPSLTSFKSASGPTKNVKTTTNCFSSNTRKMTSLLEKTSLTNYATSLNTPVSYPPWTPSSATLPSLTSFVYSPHSTEAEISTPKTSPPPTSQMVEFPVLGTRMTSSNTQPLLMTSWNIPTAEGSQFPISTTINVPTSNEMETETLHLVPGPLSTFTASQTGLVSKDVMAMSSIPMSGILPNHGLSENPSLSTSLRAITSTLADVKHTFEKMTTSVTPGTTLPSILSGATSGSVISKSPILTWLLSSLPSGSPPATVSNAPHVMTSSTVEVSKSTFLTSDMISAHPFTNLTTLPSATMSTILTRTIPTPTLGGITTGFPTSLPMSINVTDDIVYISTHPEASSRTTITANPRTVSHPSSFSRKTMSPSTTDHTLSVGAMPLPSSTITSSWNRIPTASSPSTLIIPKPTLDSLLNIMTTTSTVPGASFPLISTGVTYPFTATVSSPISSFFETTWLDSTPSFLSTEASTSPTATKSTVSFYNVEMSFSVFVEEPRIPITSVINEFTENSLNSIFQNSEFSLATLETQIKSRDISEEEMVMDRAILEQREGQEMATISYVPYSCVCQVIIKASSSLASSELMRKIKSKIHGNFTHGNFTQDQLTLLVNCEHVAVKKLEPGNCKADETASKYKGTYKWLLTNPTETAQTRCIKNEDGNATRFCSISINTGKSQWEKPKFKQCKLLQELPDKIVDLANITISDENAEDVAEHILNLINESPALGKEETKIIVSKISDISQCDEISMNLTHVMLQIINVVLEKQNNSASDLHEISNEILRIIERTGHKMEFSGQIANLTVAGLALAVLRGDHTFDGMAFSIHSYEEGTDPEIFLGNVPVGGILASIYLPKSLTERIPLSNLQTILFNFFGQTSLFKTKNVTKALTTYVVSASISDDMFIQNLADPVVITLQHIGGNQNYGQVHCAFWDFENNNGLGGWNSSGCKVKETNVNYTICQCDHLTHFGVLMDLSRSTVDSVNEQILALITYTGCGISSIFLGVAVVTYIAFHKLRKDYPAKILINLCTALLMLNLVFLINSWLSSFQKVGVCITAAVALHYFLLVSFTWMGLEAVHMYLALVKVFNIYIPNYILKFCLVGWGIPAIMVAITVSVKKDLYGTLSPTTPFCWIKDDSIFYISVVAYFCLIFLMNLSMFCTVLVQLNSVKSQIQKTRRKMILHDLKGTMSLTFLLGLTWGFAFFAWGPMRNFFLYLFAIFNTLQGFFIFVFHCVMKESVREQWQIHLCCGWLRLDNSSDGSSRCQIKVGYKQEGLKKIFEHKLLTPSLKSTATSSTFKSLGSAQGTPSEISFPNDDFDKDPYCSSP

SEQ ID NO: 11565 - protein, 699 aa, Homo sapiens
MAEGEDVPPLPTSSGDGWEKDLEEALEAGGCDLETLRNIIQGRPLPADLRAKVWKIALNVAGKGDSLASWDGILDLPEQNTIHKDCLQFIDQLSVPEEKAAELLLDIESVITFYCKSRNIKYSTSLSWIHLLKPLVHLQLPRSDLYNCFYAIMNKYIPRDCSQKGRPFHLFRLLIQYHEPELCSYLDTKKITPDSYALNWLGSLFACYCSTEVTQAIWDGYLQQADPFFIYFLMLIILVNAKEVILTQESDSKEEVIKFLENTPSSLNIEDIEDLFSLAQYYCSKTPASFRKDNHHLFGSTLLGIKDDDADLSQALCLAISVSEILQANQLQGEGVRFFVVDCRPAEQYNAGHLSTAFHLDSDLMLQNPSEFAQSVKSLLEAQKQSIESGSIAGGEHLCFMGSGREEEDMYMNMVLAHFLQKNKEYVSIASGGFMALQQHLADINVDGPENGYGHWIASTSGSRSSINSVDGESPNGSSDRGMKSLVNKMTVALKTKSVNVREKVISFIENTSTPVDRMSFNLPWPDRSCTERHVSSSDRVGKPYRGVKPVFSIGDEEEYDTDEIDSSSMSDDDRKEVVNIQTWINKPDVKHHFPCKEVKESGHMFPSHLLVTATHMYCLREIVSRKGLAYIQSRQALNSVVKITSKKKHPELITFKYGNSSASGIEILAIERYLIPNAGDATKAIKQQIMKVLDALES

SEQ ID NO: 11566 - protein, 693 aa, Homo sapiens
MKENYCLQAALVCLGMLCHSHAFAPERRGHLRPSFHGHHEKGKEGQVLQRSKRGWVWNQFFVIEEYTGPDPVLVGRLHSDIDSGDGNIKYILSGEGAGTIFVIDDKSGNIHATKTLDREERAQYTLMAQAVDRDTNRPLEPPSEFIVKVQDINDNPPEFLHETYHANVPERSNVGTSVIQVTASDADDPTYGNSAKLVYSILEGQPYFSVEAQTGIIRTALPNMDREAKEEYHVVIQAKDMGGHMGGLSGTTKVTITLTDVNDNPPKFPQSVYQMSVSEAAVPGEEVGRVKAKDPDIGENGLVTYNIVDGDGMESFEITTDYETQEGVIKLKKPVDFETKRAYSLKVEAANVHIDPKFISNGPFKDTVTVKISVEDADEPPMFLAPSYIHEVQENAAAGTVVGRVHAKDPDAANSPIRYSIDRHTDLDRFFTINPEDGFIKTTKPLDREETAWLNITVFAAEIHNRHQEAKVPVAIRVLDVNDNAPKFAAPYEGFICESDQTKPLSNQPIVTISADDKDDTANGPRFIFSLPPEIIHNPNFTVRDNRDNTAGVYARRGGFSRQKQDLYLLPIVISDGGIPPMSSTNTLTIKVCGCDVNGALLSCNAEAYILNAGLSTGALIAILACIVILLGCPSLMEPPSPREDMRLLYLGFQLMLFSYVKVNRRFCLLGVFIKLPFLYVVATESPTTLTSL

SEQ ID NO: 11567 - protein, 331 aa, Homo sapiens
MRGYLVAIFLSAVFLYYVLHCILWGTNVYWVAPVEMKRRNKIQPCLSKPAFASLLRFHQFHPFLCAADFRKIASLYGSDKFDLPYGMRTSAEYFRLALSKLQSCDLFDEFDNIPCKKCVVVGNGGVLKNKTLGEKIDSYDVIIRMNNGPVLGHEEEVGRRTTFRLFYPESVFSDPIHNDPNTTVILTAFKPHDLRWLLELLMGDKINTNGFWKKPALNLIYKPYQIRILDPFIIRTAAYELLHFPKVFPKNQKPKHPTTGIIAITLAFYICHEVHLAGFKYNFSDLKSPLHYYGNATMSLMNKNAYHNVTAEQLFLKDIIEKNLVINLTQD

SEQ ID NO: 11568 - protein, 394 aa, Homo sapiens
MFSVFEEITRIVVKEMDAGGDMIAVRSLVDADRFRCFHLVGEKRTFFGCRHYTTGLTLMDILDTDGDKWLDELDSGLQGQKAEFQILDNVDSTGELIVRLPKEITISGSFQGFHHQKIKISENRISQQYLATLENRKLKRELPFSFRSINTRENLYLVTETLETVKEETLKSDRQYKFWSQISQGHLSYKHKGQREVTIPPNRVLSYRVKQLVFPNKETMRKSLGSEDSRNMKEKLEDMESVLKDLTEEKRKDVLNSLAKCLGKEDIRQDLEQRVSEVLISGELHMEDPDKPLLSSLFNAAGVLVEARAKAILDFLDALLELSEEQQFVAEALEKGTLPLLKDQVKSVMEQNWDELASSPPDMDYDPEARILCALYVVVSILLELAEGPTSVSS

SEQ ID NO: 11569 - protein, 1828 aa, Homo sapiens
MMRNKDKSQEEDSSLHSNASSHSASEEASGSDSGSQSESEQGSDPGSGHGSESNSSSESSESQSESESESAGSKSQPVLPEAKEKPASKKERIADVKKMWEEYPDVYGVRRSNRSRQEPSRFNIKEEASSGSESGSPKRRGQRQLKKQEKWKQEPSEDEQEQGTSAESEPEQKKVKARRPVPRRTVPKPRVKKQPKTQRGKRKKQDSSDEDDDDDEAPKRQTRRRAAKNVSYKEDDDFETDSDDLIEMTGEGVDEQQDNSETIEKVLDSRLGKKGATGASTTVYAIEANGDPSGDFDTEKDEGEIQYLIKWKGWSYIHSTWESEESLQQQKVKGLKKLENFKKKEDEIKQWLGKVSPEDVEYFNCQQELASELNKQYQIVERVIAVKTSKSTLGQTDFPAHSRKPAPSNEPEYLCKWMGLPYSECSWEDEALIGKKFQNCIDSFHSRNNSKTIPTRECKALKQRPRFVALKKQPAYLGGENLELRDYQLEGLNWLAHSWCKNNSVILADEMGLGKTIQTISFLSYLFHQHQLYGPFLIVVPLSTLTSWQREFEIWAPEINVVVYIGDLMSRNTIREYEWIHSQTKRLKFNALITTYEILLKDKTVLGSINWAFLGVDEAHRLKNDDSLLYKTLIDFKSNHRLLITGTPLQNSLKELWSLLHFIMPEKFEFWEDFEEDHGKGRENGYQSLHKVLEPFLLRRVKKDVEKSLPAKVEQILRVEMSALQKQYYKWILTRNYKALAKGTRGSTSGFLNIVMELKKCCNHCYLIKPPEENERENGQEILLSLIRSSGKLILLDKLLTRLRERGNRVLIFSQMVRMLDILAEYLTIKHYPFQRLDGSIKGEIRKQALDHFNADGSEDFCFLLSTRAGGLGINLASADTVVIFDSDWNPQNDLQAQARAHRIGQKKQVNIYRLVTKGTVEEEIIERAKKKMVLDHLVIQRMDTTGRTILENNSGRSNSNPFNKEELTAILKFGAEDLFKELEGEESEPQEMDIDEILRLAETRENEVSTSATDELLSQFKVANFATMEDEEELEERPHKDWDEIIPEEQRKKVEEEERQKELEEIYMLPRIRSSTKKAQTNDSDSDTESKRQAQRSSASESETEDSDDDKKPKRRGRPRSVRKDLVEGFTDAEIRRFIKAYKKFGLPLERLECIARDAELVDKSVADLKRLGELIHNSCVSAMQEYEEQLKENASEGKGPGKRRGPTIKISGVQVNVKSIIQHEEEFEMLHKSIPVDPEEKKKYCLTCRVKAAHFDVEWGVEDDSRLLLGIYEHGYGNWELIKTDPELKLTDKILPVETDKKPQGKQLQTRADYLLKLLRKGLEKKGAVTGGEEAKLKKRKPRVKKENKVPRLKEEHGIELSSPRHSDNPSEEGEVKDDGLEKSPMKKKQKKKENKENKEKQMSSRKDKEGDKERKKSKDKKEKPKSGDAKSSSKSKRSQGPVHITAGSEPVPIGEDEDDDLDQETFSICKERMRPVKKALKQLDKPDKGLNVQEQLEHTRNCLLKIGDRIAECLKAYSDQEHIKLWRRNLWIFVSKFTEFDARKLHKLYKMAHKKRSQEEEEQKKKDDVTGGKKPFRPEASGSSRDSLISQSHTSHNLHPQKPHLPASHGPQMHGHPRDNYNHPNKRHFSNADRGDWQRERKFNYGGGNNNPPWGSDRHHQYEQHWYKDHHYGDRRHMDAHRSGSYRPNNMSRKRPYDQYSSDRDHRGHRDYYDRHHHDSKRRRSDEFRPQNYHQQDFRRMSDHRPAMGYHGQGPSDHYRSFHTDKLGEYKQPLPPLHPAVSDPRSPPSQKSPHDSKSPLDHRSPLERSLEQKNNPDYNWNVRKT

SEQ ID NO: 11570 - protein, 428 aa, Homo sapiens
MFSLMASCCGWFKRWREPVRKVTLLMVGLDNAGKTATAKGIQGEYPEDVAPTVGFSKINLRQGKFEVTIFDLGGGIRIRGIWKNYYAESYGVIFVVDSSDEERMEETKEAMSEMLRHPRISGKPILVLANKQDKEGALGEADVIECLSLEKLVNEHKCLCQIEPCSAISGYGKKIDKSIKKGLYWLLHVIARDFDALNERIQKETTEQRALEEQEKQERAERVRKLREERKQNEQEQAELDGTSGLAELDPEPTNPFQPIASVIIENEGKLEREKKNQKMEKDSDGCHLKHKMEHEQIETQGQVNHNGQKNNEFGLVENYKEALTQQLKNEDETDRPSLESANGKKKTKKLRMKRNHRVEPLNIDDCAPESPTPPPPPPPVGWGTPKVTRLPKLEPLGETHHNDFYRKPLPPLAVPQRPNSDAHDVIS

SEQ ID NO: 11571 - protein, 1042 aa, Homo sapiens
MPMWAGGVGSPRRGMAPASTDDLFARKLRQPARPPLTPHTFEPRPVRGPLLRSGSDAGEARPPTPASPRARAHSHEEASRPAATSTRLFTDPLALLGLPAEEPEPAFPPVLEPRWFAHYDVQSLLFDWAPRSQGMGSHSEASSGTLASAEDQAASSDLLHGAPGFVCELGGEGELGLGGPASPPVPPALPNAAVSILEEPQNRTSAYSLEHADLGAGYYRKYFYGKEHQNFFGMDESLGPVAVSLRREEKEGSGGGTLHSYRVIVRTTQLRTLRGTISEDALPPGPPRGLSPRKLLEHVAPQLSPSCLRLGSASPKVPRTLLTLDEQVLSFQRKVGILYCRAGQGSEEEMYNNQEAGPAFMQFLTLLGDVVRLKGFESYRAQLDTKTDSTGTHSLYTTYQDHEIMFHVSTMLPYTPNNQQQLLRKRHIGNDIVTIVFQEPGSKPFCPTTIRSHFQHVFLVVRAHTPCTPHTTYRVAVSRTQDTPAFGPALPAGGGPFAANADFRAFLLAKALNGEQAAGHARQFHAMATRTRQQYLQDLATNEVTTTSLDSASRFGLPSLGGRRRAAPRGPGAELQAAGSLVWGVRAAPGARVAAGAQASGPEGIEVPCLLGISAEALVLVAPRDGRVVFNCACRDVLAWTFSEQQLDLYHGRGEAITLRFDGSPGQAVGEVVARLQLVSRGCETRELALPRDGQGRLGFEVDAEGFVTHVERFTFAETAGLRPGARLLRVCGQTLPSLRPEAAAQLLRSAPKVCVTVLPPDESGRPRRSFSELYTLSLQEPSRRGAPDPVQDEVQGVTLLPTTKQLLHLCLQDGGSPPGPGDLAEERTEFLHSQNSLSPRSSLSDEAPVLPNTTPDLLLATTAKPSVPSADSETPLTQDRPGSPSGSEDKGNPAPELRASFLPRTLSLRNSISRIMSEAGSGTLEDEWQAISEIASTCNTILESLSREGQPIPESGDPKGTPKSDAEPEPGNLSEKVSHLESMLRKLQEDLQKEKADRAALEEEVRSLRHNNRRLQAESESAATRLLLASKQLGSPTADLA

SEQ ID NO: 11572 - protein, 604 aa, Homo sapiens [sequence omitted]

SEQ ID NO: 11573 - protein, 396 aa, Homo sapiens
MSIVTVQLGQCGNQIGFEVFDALLSDSHSSQGLCSMRENEAYQASCKERFFSEEENGVPIARAVLVDMEPKVINQMLSKAAQSGQWKYGQHACFCQKQGSGNNWAYGYSVHGPRHEESIMNIIRKEVEKCDSFSGFFIIMSMAGGTGSGLGAFVTQNLEDQYSNSLKMNQIIWPYGTGEVIVQNYNSILTLSHLYRSSDALLLHENDAIHKICAKLMNIKQISFSDINQVLAHQLGSVFQPTYSAESSFHYRRNPLGDLMEHLVPHPEFKMLSVRNIPHMSENSLAYTTFTWAGLLKHLRQMLISNAKMEEGIDRHVWPPLSGLPPLSKMSLNKDLHFNTSIANLVILRGKDVQSADVGKKFRAYIHQYTKFGIEEEDFLDSFTSLEQVVASYCNL

SEQ ID NO: 11574 - protein, 929 aa, Homo sapiens
MLGPHLPPPPLAPSEGRPTPCAFQIPDGSYRCLALEAEESSGEEGLQGEVGPTDLEEDEGVSRSGDDSACRVTQGTPQLPKALGIQPPSCSREEQGASQHDDRASQDWDVVKAGQMMTASPSPGPGPRVAQKPALGRSTSLTEKDLKEAKARSQQIAAQLTTPPSSNSRGVQLFNRRRQRVNEFTLESHGQRGQKPSQESLRVLPSSLPGHAPGLSLSSTSLPEPGPPRHPSPQSPDRGVPGHSMEGYSEEASLLRHLEKVASEEEEVPLVVYLKENAALLTANGLHLSQNREAQQSSPAPPPAEVHSPAADVNQNLASPSATLTTPTSNSSHNPPATDVNQNPPATVVPQSLPLSSIQQNSSEAQLPSNGTGPASKPSTLCADGQPQAPAEEVRCSTLLIDKVSTPATTTSTFSREATLIPSSRPPASDFMSSSLLIDIQPNTLVVSADQEMSGRAAATTPTKVYSEVHFTLAKPPSVVNRTARPFGIQAPGGTSQMERSPMLERRHFGEKAPAPQPPSLPDRSPRPQRHIMSRSPMVERRMMGQRSPASERRPLGNFTAPPTYTETLSTAPLASWVRSPPSYSVLYPSSDPKSSHLKGQAVPASKTGILEESMARRGSRKSMFTFVEKPKVTPNPDLLDLVQTADEKRRQRDQGEVGVEEEPFALGAEASNFQQEPAPRDRASPAAAEEVVPEWASCLKSPRIQAKPKPKPNQNLSEASGKGAELYARRQSRMEKYVIESSSHTPELARCPSPTMSLPSSWKYPTNAPGAFRVASRSPARTPPASLYHGYLPENGVLRPEPTKQPPYQLRPSLFVLSPIKEPAKVSPRAASPAKPSSLDLVPNLPKGALPPSPALPRPSRSSPGLYTSPGQDSLQPTAVSPPYGGDISPVSPSRAWSPRAKQAPRPSFSTRNAGIEAQVWKPSFCFK

SEQ ID NO: 11575 - protein, 620 aa, Homo sapiens
MRRSEVLAEESIVCLQKALNHLREIWELIGIPEDQRLQRTEVVKKHIKELLDMMIAEEESLKERLIKSISVCQKELNTLCSELHVEPFQEEGETTILQLEKDLRTQVELMRKQKKERKQELKLLQEQDQELCEILCMPHYDIDSASVPSLEELNQFRQHVTTLRETKASRREEFVSIKRQIILCMEALDHTPDTSFERDVVCEDEDAFCLSLENIATLQKLLRQLEMQKSQNEAVCEGLRTQIRELWDRLQIPEEEREAVATIMSGSKAKVRKALQLEVDRLEELKMQNMKKVIEAIRVELVQYWDQCFYSQEQRQAFAPFCAEDYTESLLQLHDAEIVRLKNYYEVHKELFEGVQKWEETWRLFLEFERKASDPNRFTNRGGNLLKEEKQRAKLQKMLPKLEEELKARIELWEQEHSKAFMVNGQKFMEYVAEQWEMHRLEKERAKQERQLKNKKQTETEMLYGSAPRTPSKRRGLAPNTPGKARKLNTTTMSNATANSSIRPIFGGTVYHSPVSRLPPSGSKPVAASTCSGKKTPRTGRHGANKENLELNGSILSGGYPGSAPLQRNFSINSVASTYSEFAKDPSLSDSSTVGLQRELSKASKSDATSGILNSTNIQS

SEQ ID NO: 11576 - protein, 688 aa, Homo sapiens
MDRCKHVGRLRLAQDHSILNPQKWCCLECATTESVWACLKCSHVACGRYIEDHALKHFEETGHPLAMEVRDLYVFCYLCKDYVLNDNPEGDLKLLRSSLLAVRGQKQDTPVRRGRTLRSMASGEDVVLPQRAPQGQPQMLTALWYRRQRLLARTLRLWFEKSSRGQAKLEQRRQEEALERKKEEARRRRREVKRRLLEELASTPPRKSARLLLHTPRDAGPAASRPAALPTSRRVPAATLKLRRQPAMAPGVTGLRNLGNTCYMNSILQVLSHLQKFRECFLNLDPSKTEHLFPKATNGKTQLSGKPTNSSATELSLRNDRAEACEREGFCWNGRASISRSLELIQNKEPSSKHISLCRELHTLFRVMWSGKWALVSPFAMLHSVWSLIPAFRGYDQQDAQEFLCELLHKVQQELESEGTTRRILIPFSQRKLTKQVLKVVNTIFHGQLLSQVTCISCNYKSNTIEPFWDLSLEFPERYHCIEKGFVPLNQTECLLTEMLAKFTETEALEGRIYACDQCNSKRRKSNPKPLVLSEARKQLMIYRLPQVLRLHLKRFRWSGRNHREKIGVHVVFDQVLTMEPYCCRDMLSSLDKETFAYDLSAVVMHHGKGFGSGHYTAYCYNTEGGFWVHCNDSKLNVCSVEEVCKTQAYILFYTQRTVQGNARISETHLQAQVQSSNNDEGRPQTFS

SEQ ID NO: 11577 - protein, 309 aa, Homo sapiens
MKNRTMFGEFILLGLTNQPELQVMIFIFLFLTYMLSILGNLTIITLTLLDPHLQTPMYFFLRNFSFLEISFTSIFIPRFLTSMTTGNKVISFAGCLTQYFFAIFLGATEFYLLASMSYDRYVAICKPLHYLTIMSSRVCIQLVFCSWLGGFLAILPPIILMTQVDFCVSNILNHYYCDYGPLVELACSDTSLLELMVILLAVVTLMVTLVLVTLSYTYIIRTILRIPSAQQRTKAFSTCSSHMIVISLSYGSCMFMYINPSAKEGGAFNKGIAVLITSVTPLLNPFIYTLRNQQVKQAFKDSVKKIVKL

SEQ ID NO: 11578 - protein, 312 aa, Homo sapiens
MSPQGPAVLSLGSLCLDTNQAPNWTGLQTLLQQLPPQDIDERYCLALGEEERAELQLFCARRKQEALGQGVARLVLPKLEGHTCEKCRELLKPGEYGVFAARAGEQRCWHQPCFACQACGQALINLIYFYHDGQLYCGRHHAELLRPRCPACDQLIFSWRCTEAEGQRWHENHFCCQDCAGPLGGGRYALPGGSPCCPSCFENRYSDAGSSWAGALEGQAFLGAPPPHPPDPSLGARSSHRASLAGAFQGPPEPTPRRGRGCGARLPPRRGRRTPSGGGGGPWRGLSAAAAARTAQGLGGAGGWASPPLAAV

SEQ ID NO: 11579 - protein, 404 aa, Homo sapiens
MATQAKRPRVAGPVDGGDLDPVACFLSWCRRVGLELSPKVAVSRQGTVAGYGMVARESVQAGELLFVVPRAALLSQHTCSIGGLLERERVALQSQSGWVPLLLALLHELQAPASRWRPYFALWPELGRLEHPMFCLRVRSLELYHQLVALVMAYSFQEPLEEEEDEKEPNSPVMVPAADILNHLANHNANLEYSANCLRMVATQPIPKGHEIFNTYGQMANWQLIHMYGFVEPYPDNTDDTADIQMVTVREAALQGTKTEAERHLVYERWDFLCKLEMVGEEGAFVIGREEVLTEEELTTTLKVLCMPAEEFRELKDQDGGGDDKREEGSLTITNIPKLKASWRQLLQNSVLLTLQTYATDLKTDQGLLSNKEVYAKLSWREQQALQVRYGQKMILHQLLELTS

SEQ ID NO: 11580 - protein, 958 aa, Homo sapiens
MAEARKRRELLPLIYHHLLRAGYVRAAREVKEQSGQKCFLAQPVTLLDIYTHWQQTSELGRKRKAEEDAALQAKKTRVSDPISTSESSEEEEEAEAETAKATPRLASTNSSVLGADLPSSMKEKAKAETEKAGKTGNSMPHPATGKTVANLLSGKSPRKSAEPSANTTLVSETEEEGSVPAFGAAAKPGMVSAGQADSSSEDTSSSSDETDVEGKPSVKPAQVKASSVSTKESPARKAAPAPGKVGDVTPQVKGGALPPAKRAKKPEEESESSEEGSESEEEAPAGTRSQVKASEKILQVRAASAPAKGTPGKGATPAPPGKAGAVASQTKAGKPEEDSESSSEESSDSEEETPAAKALLQAKASGKTSQVGAASAPAKESPRKGAAPAPPGKTGPAVAKAQAGKREEDSQSSSEESDSEEEAPAQAKPSGKAPQVRAASAPAKESPRKGAAPAPPRKTGPAAAQVQVGKQEEDSRSSSEESDSDREALAAMNAAQVKPLGKSPQVKPASTMGMGPLGKGAGPVPPGKVGPATPSAQVGKWEEDSESSSEESSDSSDGEVPTAVAPAQEKSLGNILQAKPTSSPAKGPPQKAGPVAVQVKAEKPMDNSESSEESSDSADSEEAPAAMTAAQAKPALKIPQTKACPKKTNTTASAKVAPVRVGTQAPRKAGTATSPAGSSPAVAGGTQRPAEDSSSSEESDSEEEKTGLAVTVGQAKSVGKGLQVKAASVPVKGSLGQGTAPVLPGKTGPTVTQVKAEKQEDSESSEEESDSEEAAASPAQVKTSVKKTQAKANPAAARAPSAKGTISAPGKVVTAAAQAKQRSPSKVKPPVRNPQNSTVLARGPASVPSVGKAVATAAQAQTGPEEDSGSSEEESDSEEEAETLAQVKPSGKTHQIRAALAPAKESPRKGAAPTPPGKTGPSAAQAGKQDDSGSSSEESDSDGEAPAAVTSAQDQESS

SEQ ID NO: 11581 - protein, 929 aa, Homo sapiens
MTASSVEQLRKEGNELFKCGDYGGALAAYTQALGLDATPQDQAVLHRNRAACHLKLEDYDKAETEASKAIEKDGGDVKALYRRSQALEKLGRLDQAVLDLQRCVSLEPKNKVFQEALRNIGGQIQEKVRYMSSTDAKVEQMFQILLDPEEKGTEKKQKASQNLVVLAREDAGAEKIFRSNGVQLLQRLLDMGETDLMLAALRTLVGICSEHQSRTVATLSILGTRRVVSILGVESQAVSLAACHLLQVMFDALKEGVKKGFRGKEGAIIVDPARELKVLISNLLDLLTEVGVSGQGRDNALTLLIKAVPRKSLKDPNNSLTLWVIDQGLKKILEVGGSLQDPPGELAVTANSRMSASILLSKLFDDLKCDAERENFHRLCENYIKSWFEGQGLAGKLRAIQTVSCLLQGPCDAGNRALELSGVMESVIALCASEQEEEQLVAVEALIHAAGKAKRASFITANGVSLLKDLYKCSEKDSIRIRALVGLCKLGSAGGTDFSMKQFAEGSTLKLAKQCRKWLCNDQIDAGTRRWAVEGLAYLTFDADVKEEFVEDAAALKALFQLSRLEERSVLFAVASALVNCTNSYDYEEPDPKMVELAKYAKQHVPEQHPKDKPSFVRARVKKLLAAGVVSAMVCMVKTESPVLTSSCRELLSRVFLALVEEVEDRGTVVAQGGGRALIPLALEGTDVGQTKAAQALAKLTITSNPEMTFPGERIYEVVRPLVSLLHLNCSGLQNFEALMALTNLAGISERLRQKILKEKAVPMIEGYMFEEHEMIRRAATECMCNLAMSKEVQDLFEAQGNDRLKLLVLYSGEDDELLQRAAAGGLAMLTSMRPTLCSRIPQVTTHWLEILQALLLSSNQELQHRGAVVVLNMVEASREIASTLMESEMMEILSVLAKGDHSPVTRAAAACLDKAVEYGLIQPNQDGE

SEQ ID NO: 11582 - protein, 556 aa, Homo sapiens
MKAQGETEESEKLSKMSSLLERLHAKFNQNRPWSETIKLVRQVMEKRVVMSSGGHQHLVSCLETLQKALKVTSLPAMTDRLESIARQNGLGSHLSASGTECYITSDMFYVEVQLDPAGQLCDVKVAHHGENPVSCPELVQQLREKNFDEFSKHLKGLVNLYNLPGDNKLKTKMYLALQSLEQDLSKMAIMYWKATNAGPLDKILHGSVGYLTPRSGGHLMNLKYYVSPSDLLDDKTASPIILHENNVSRSLGMNASVTIEGTSAVYKLPIAPLIMGSHPVDNKWTPSFSSITSANSVDLPACFFLKFPQPIPVSRAFVQKLQNCTGIPLFETQPTYAPLYELITQFELSKDPDPIPLNHNMRFYAALPGQQHCYFLNKDAPLPDGRSLQGTLVSKITFQHPGRVPLILNLIRHQVAYNTLIGSCVKRTILKEDSPGLLQFEVCPLSESRFSVSFQHPVNDSLVCVVMDVQDSTHVSCKLYKGLSDALICTDDFIAKVVQRCMSIPVTMRAIRRKAETIQADTPALSLIAETVEDMVKKNLPPASSPGSKNPELGSG

SEQ ID NO: 11583 - protein, 404 aa, Homo sapiens
MRRDVNGVTKSRFEMFSNSDEAVINKKLPKELLLRIFSFLDVVTLCRCAQVSRAWNVLALDGSNWQRIDLFDFQRDIEGRVVENISKRCGGFLRKLSLRGCLGVGDNALRTFAQNCRNIEVLNLNGCTKTTDAEGCPLLEQLNISWCDQVTKDGIQALVRGCGGLKALFLKGCTQLEDEALKYIGAHCPELVTLNLQTCLQITDEGLITICRGCHKLQSLCASGCSNITDAILNALGQNCPRLRILEVARCSQLTDVGFTTLARNCHELEKMDLEECVQITDSTLIQLSIHCPRLQVLSLSHCELITDDGIRHLGNGACAHDQLEVIELDNCPLITDASLEHLKSCHSLERIELYDCQQITRAGIKRLRTHLPNIKVHAYFAPVTPPPSVGGSRQRFCRCCIIL

SEQ ID NO: 11584 - protein, 598 aa, Homo sapiens
MVQKTSMSRGPYPPSQEIPMEVFDPSPQGKYSKRKGRFKRSDGSTSSDTTSNSFVRQGSAESYTSRPSDSDVSLEEDREALRKEAERQALAQLEKAKTKPVAFAVRTNVGYNPSPGDEVPVQGVAITFEPKDFLHIKEKYNNDWWIGRLVKEGCEVGFIPSPVKLDSLRLLQEQKLRQNRLGSSKSGDNSSSSLGDVVTGTRRPTPPASAKQKQKSTEHVPPYDVVPSMRPIILVGPSLKGYEVTDMMQKALFDFLKHRFDGRISITRVTADISLAKRSVLNNPSKHIIIERSNTRSSLAEVQSEIERIFELARTLQLVALDADTINHPAQLSKTSLAPIIVYIKITSPKVLQRLIKSRGKSQSKHLNVQIAASEKLAQCPPEMFDIILDENQLEDACEHLAEYLEAYWKATHPPSSTPPNPLLNRTMATAALAASPAPVSNLQGPYLASGDQPLERATGEHASMHEYPGELGQPPGLYPSSHPPGRAGTLRALSRQDTFDADTPGSRNSAYTELGDSCVDMETDPSEGPGLGDPAGGGTPPARQGSWEDEEEDYEEELTDNRNRGRNKARYCAEGGGPVLGRNKNELEGWGRGVYIR

SEQ ID NO: 11585 - protein, 366 aa, Homo sapiens
MQPPLDLKQILPFPLEPAPTLGLFSNYSTMDPVQKAVLSHTFGGPLLKTKRPVISCNICQIRFNSQSQAEAHYKGNRHARRVKGIEAAKTRGREPGVREPGDPAPPGSTPTNGDGVAPRPVSMENGLGPAPGSPEKQPGSPSPPSIPETGQGVTKGEGGTPAPASLPGGSKEEEEKAKRLLYCALCKVAVNSLSQLEAHNKGTKHKTILEARSGLGPIKAYPRLGPPTPGEPEAPAQDRTFHCEICNVKVNSEVQLKQHISSRRHRDGVAGKPNPLLSRHKKSRGAGELAGTLTFSKELPKSLAGGLLPSPLAVAAVMAAAAGSPLSLRPAPAAPLLQGPPITHPLLHPAPGPIRTAHGPILFSPY

SEQ ID NO: 11586 - protein, 1017 aa, Homo sapiens
MAGNDCGALLDEELSSFFLNYLADTQGGGSGEEQLYADFPELDLSQLDASDFDSATCFGELQWCPENSETEPNQYSPDDSELFQIDSENEALLAELTKTLDDIPEDDVGLAAFPALDGGDALSCTSASPAPSSAPPSPAPEKPSAPAPEVDELSLLQKLLLATSYPTSSSDTQKEGTAWRQAGLRSKSQRPCVKADSTQDKKAPMMQSQSRSCTELHKHLTSAQCCLQDRGLQPPCLQSPRLPAKEDKEPGEDCPSPQPAPASPRDSLALGRADPGAPVSQEDMQAMVQLIRYMHTYCLPQRKLPPQTPEPLPKACSNPSQQVRSRPWSRHHSKASWAEFSILRELLAQDVLCDVSKPYRLATPVYASLTPRSRPRPPKDSQASPGRPSSVEEVRIAASPKSTGPRPSLRPLRLEVKREVRRPARLQQQEEEDEEEEEEEEEEEKEEEEEWGRKRPGRGLPWTKLGRKLESSVCPVRRSRRLNPELGPWLTFADEPLVPSEPQGALPSLCLAPKAYDVERELGSPTDEDSGQDQQLLRGPQIPALESPCESGCGDMDEDPSCPQLPPRDSPRCLMLALSQSDPTFGKKSFEQTLTVELCGTAGLTPPTTPPYKPTEEDPFKPDIKHSLGKEIALSLPSPEGLSLKATPGAAHKLPKKHPERSELLSHLRHATAQPASQAGQKRPFSCSFGDHDYCQVLRPEGVLQRKVLRSWEPSGVHLEDWPQQGAPWAEAQAPGREEDRSCDAGAPPKDSTLLRDHEIRASLTKHFGLLETALEEEDLASCKSPEYDTVFEDSSSSSGESSFLPEEEEEEGEEEEEDDEEEDSGVSPTCSDHCPYQSPPSKANRQLCSRSRSSSGSSPCHSWSPATRRNFRCESRGPCSDRTPSIRHARKRREKAIGEGRVVYIQNLSSDMSSRELKRRFEVFGEIEECEVLTRNRRGEKYGFITYRCSEHAALSLTKGAALRKRNEPSFQLSYGGLRHFCWPRYTDYGKPLKPSHSLVRLKAWEAVPSLNKTQS

SEQ ID NO: 11587 - protein, 4983 aa, Homo sapiens
MDLAPDRATGRPWLPLHTLSVSQLLRVFWLLSLLPGQAWVHGAEPRQVFQVLEEQPPGTLVGTIQTRPGFTYRLSESHALFAINSSTGALYTTSTIDRESLPSDVINLVVLSSAPTYPTEVRVLVRDLNDNAPVFPDPSIVVTFKEDSSSGRQVILDTATDSDIGSNGVDHRSYRIIRGNEAGRFRLDITLNPSGEGAFLHLVSKGGLDREVTPQYQLLVEVEDKGEPKRRGYLQVNVTVQDINDNPPVFGSSHYQAGVPEDAVVGSSVLQVAAADADEGTNADIRYRLQDEGTPFQMDPETGLITVREPLDFEARRQYSLTVQAMDRGVPSLTGRAEALIQLLDVNDNDPVVKFRYFPATSRYASVDENAQVGTVVALLTVTDADSPAANGNISVQILGGNEQRHFEVQSSKVPNLSLIKVASALDRERIPSYNLTVSVSDNYGAPPGAAVQARSSVASLVIFVNDINDHPPVFSQQVYRVNLSEEAPPGSYVSGISATDGDSGLNANLRYSIVSGNGLGWFHISEHSGLVTTGSSGGLDRELASQIVLNISARDQGVHPKVSYAQLVVTLLDVNDEKPVFSQPEGYDVSVVENAPTGTELLMLRATDGDLGDNGTVRFSLQEAETDRRSFRLDPVSGRLSTISSLDREEQAFYSLLVLATDLGSPPQSSMARINVSLLDINDNSPVFYPVQYFAHIKENEPGGSYITTVSATDPDLGTNGTVKYSISAGDRSRFQVNAQSGVISTRMALDREEKTAYQLQIVATDGGNLQSPNQAIVTITVLDTQDNPPVFSQVAYSFVVFENVALGYHVGSVSASTMDLNSNISYLITTGDQKGMFAINQVTGQLTTANVIDREEQSFYQLKVVASGGTVTGDTMVNITVKDLNDNSPHFLQAIESVNVVENWQAGHSIFQAKAVDPDEGVNGMVLYSLKQNPKNLFAINEKNGTISLLGPLDVHAGSYQIEILASDMGVPQLSSSVILTVYVHDVNDNSPVFDQLSYEVTLSESEPVNSRFFKVQASDKDSGANGEIAYTIAEGNTGDAFGIFPDGQLYIKSELDRELQDRYVLMVVASDRAVEPLSATVNVTVILEDVNDNRPLFNSTNYTFYFEEEQRAGSFVGKVSAVDKDFGPNGEVRYSFEMVQPDFELHAISGEITNTHQFDRESLMRRRGTAVFSFTVIATDQGIPQPLKDQATVHVYMKDINDNAPKFLKDFYQATISESAANLTQVLRVSASDVDEGNNGLIHYSIIKGNEERQFAIDSTSGQVTLIGKLDYEATPAYSLVIQAVDSGTIPLNSTCTLNIDILDENDNTPSFPKSTLFVDVLENMRIGELVSSVTATDSDSGDNADLYYSITGTNNHGTFSISPNTGSIFLAKKLDFETQSLYKLNITAKDQGRPPRSSTMSVVIHVRDFNDNPPSFPPGDIFKSIVENIPIGTSVISVTAHDPDADINGQLSYTIIQQMPRGNHFTIDEVKGTIYTNAEIDREFANLFELTVKANDQAVPIETRRYALKNVTILVTDLNDNVPMFISQNALAADPSAVIGSVLTTIMAADPDEGANGEIEYEIINGDTDTFIVDRYSGDLRVASALVPSQLIYNLIVSATDLGPERRKSTTELTIILQGLDGPVFTQPKYITILKEGEPIGTNVISIEAASPRGSEAPVEYYIVSVRCEEKTVGRLFTIGRHTGIIQTAAILDREQGACLYLVDVYAIEKSTAFPRTQRAEVEITLQDINDNPPVFPTDMLDLTVEENIGDGSKIMQLTAMDADEGANALVTYTIISGADDSFRIDPESGDLIATRRLDRERRSKYSLLVRADDGLQSSDMRINITVSDVNDHTPKFSRPVYSFDIPEDTIPGSLVAAILATDDDSGVNGEITYIVNEDDEDGIFFLNPITGVFNLTRLLDYEVQQYYILTVRAEDGGGQFTTIRVYFNILDVNDNPPIFSLNSYSTSLMENLPVGSTVLVFNVTDADDGINSQLTYSIASGDSLGQFTVDKNGVLKVLKALDRESQSFYNLVVQVHDLPQIPASRFTSTAQVSIILLDVNDNPPTFLSPKLTYIPENTPIDTVVFKAQATDPDSGPNSYIEYTLLNPLGNKFSIGTIDGEVRLTGELDREEVSNYTLTVVATDKGQPSLSSSTEVVVMVLDINDNNPIFAQALYKVEINENTLTGTDIIQVFAADGDEGTNGQVRYGIVNGNTNQEFRIDSVTGAITVAKPLDREKTPTYHLTVQATDRGSTPRTDTSTVSIVLLDINDFVPVFELSPYSVNVPENLGTLPRTILQVVARDDDRGSNSKLSYVLFGGNEDNAFTLSASGELGVTQSLDRETKERFVLMITATDSGSPALTGTGTINVIVDDVNDNVPTFASKAYFTTIPEDAPTGTDVLLVNASDADASKNAVISYRIIGGNSQFTINPSTGQIITSALLDRETKDNYTLVVVCSDAGSPEPLSSSTSVLVTVTDVNDNPPRFQHHPYVTHIPSPTLPGSFVFAVTVTDADIGPNSELHYSLSGRNSEKFHIDPLRGAIMAAGPLNGASEVTFSVHVKDGGSFPKTDSTTVTVRFVNKADFPKVRAKEQTFMFPENQPVSSLVTTITGSSLRGEPMSYYIASGNLGNTFQIDQLTGQVSISQPLDFEKIQKYVVWIEARDGGFPPFSSYEKLDITVLDVNDNAPIFKEDPFISEILENLSPRKILTVSAMDKDSGPNGQLDYEIVNGNMENSFSINHATGEIRSVRPLDREKVSHYVLTIKSSDKGSPSQSTSVKVMINILDENDNAPRFSQIFSAHVPENSPLGYTVTRVTTSDEDIGINAISRYSIMDASLPFTINPSTGDIVISRPLNREDTDRYRIRVSAHDSGWTVSTDVTIFVTDINDNAPRFSRTSYYLDCPELTEIGSKVTQVFATDPDEGSNGQVFYFIKSQSEYFRINATTGEIFNKQILKYQNVTGFSNVNINRHSFIVTSSDRGKPSLISETTVTINIVDSNDNAPQFLKSKYFTPVTKNVKVGTKLIRVTAIDDKDFGLNSEVEYFISNDNHLGKFKLDNDTGWISVASSLISDLNQNFFITVTAKDKGNPPLSSQATVHITVTEENYHTPEFSQSHMSATIPESHSIGSIVRTVSARDRDAAMNGLIKYSISSGNEEGIFAINSSTGILTLAKALDYELCQKHEMTISAIDGGWVARTGYCSVTVNVIDVNDNSPVFLSDDYFPTVLENAPSGTTVIHLNATDADSGTNAVIAYTVQSSDSDLFVIDPNTGVITTQGFLDFETKQSYHLTVKAFNVPDEERCSFATVNIQLKGTNEYVPRFVSKLYYFEISEAAPKGTIVGEVFASDRDLGTDGEVHYLIFGNSRKKGFQINKKTGQIYVSGILDREKEERVSLKVLAKNFGSIRGADIDEVTVNVTVLDANDPPIFTLNIYSVQISEGVPIGTHVTFVSAFDSDSIPSWSRFSYFIGSGNENGAFSINPQTGQITVTAELDRETLPIYNLSVLAVDSGTPSATGSASLLVTLEDINDNGPMLTVSEGEVMENKRPGTLVMTLQSTDPDLPPNQGPFTYYLLSTGPATSYFSLSTAGVLSTTREIDREQIADFYLSVVTKDSGVPQMSSTGTVHITVIDQNDNPSQSRTVEIFVNYYGNLFPGGILGSVKPQDPDVLDSFHCSLTSGVTSLFSIPGGTCDLNSQPRSTDGTFDLTVLSNDGVHSTVTSNIRVFFAGFSNATVDNSILLRLGVPTVKDFLTNHYLHFLRIASSQLTGLGTAVQLYSAYEENNRTFLLAAVKRNHNQYVNPSGVATFFESIKEILLRQSGVKVESVDHDSCVHGPCQNGGSCLRRLAVSSVLKSRESLPVIIVANEPLQPFLCKCLPGYAGSWCEIDIDECLPSPCHSGGTCHNLVGGFSCSCPDGFTGRACERDINECLQSPCKNGAICQNFPGSFNCVCKTGYTGKMCESSVNYCECNPCFNGGSCQSGVDSYYCHCPFGVFGKHCELNSYGFEELSYMEFPSLDPNNNYIYVKFATIKSHALLLYNYDNQTGDRAEFLALEIAEERLRFSYNLGSGTYKLTTMKKVSDGHFHTVIARRAGMAASLTVDSCSENQEPGYCTVSNVAVSDDWTLDVQPNRVTVGGIRSLEPILQRRGHVESHDFVGCIMEFAVNGRPLEPSQALAAQGILDQCPRLEGACTRSPCQHGGTCMDYWSWQQCHCKEGLTGKYCEKSVTPDTALSLEGKGRLDYHMSQNEKREYLLRQSLRGAMLEPFGVNSLEVKFRTRSENGVLIHIQESSNYTTVKIKNGKVYFTSDAGIAGKVERNIPEVYVADGHWHTFLIGKNGTATVLSVDRIYNRDIIHPTQDFGGLDVLTISLGGIPPNQAHRDAQTAGFDGCIASMWYGGESLPFSGKHSLASISKTDPSVKIGCRGPNICASNPCWGDLLCINQWYAYRCVPPGDCASHPCQNGGSCEPGLHSGFTCSCPDSHTGRTCEMVVACLGVLCPQGKVCKAGSPAGHVCVLSQGPEEISLPLWAVPAIVGSCATVLALLVLSLILCNQCRGKKAKNPKEEKKPKEKKKKGSENVAFDDPDNIPPYGDDMTVRKQPEGNPKPDIIERENPYLIYDETDIPHNSETIPSAPLASPEQEIEHYDIDNASSIAPSDADIIQHYKQFRSHTPKFSIQRHSPLGFARQSPMPLGASSLTYQPSYGQGLRTSSLSHSACPTPNPLSRHSPAPFSKSSTFYRNSPARELHLPIRDGNTLEMHGDTCQPGIFNYATRLGRRSKSPQAMASHGSRPGSRLKQPIGQIPLESSPPVGLSIEEVERLNTPRPRNPSICSADHGRSSSEEDCRRPLSRTRNPADGIPAPESSSDSDSHESFTCSEMEYDREKPMVYTSRMPKLSQVNESDADDEDNYGARLKPRRYHGRRAEGGPVGTQAAAPGTADNTLPMKLGQQAGTFNWDNLLNWGPGFGHYVDVFKDLASLPEKAAANEEGKAGTTKPVPKDGEAEQYV

SEQ ID NO: 11588 - protein, 419 aa, Homo sapiens
MLEMLEYNHYQVQTHLENPTKYHIQQAQRQQVKQYLSTTLANKHANQVLSLPCPNQPGDHVMPPVPGSSAPNSPMAMLTLNSNCEKEGFYKFEEQNRAESECPGMNTHSRASCMQMDDVIDDIISLESSYNEEILGLMDPALQMANTLPVSGNLIDLYGNQGLPPPGLTISNSCPANLPNIKRELTACIFPTESEARALAKERQKKDNHNLIERRRRFNINDRIKELGTLIPKSNDPDMRWNKGTILKASVDYIRKLQREQQRAKELENRQKKLEHANRHLLLRIQELEMQARAHGLSLIPSTGLCSPDLVNRIIKQEPVLENCSQDLLQHHADLTCTTTLDLTDGTITFNNNLGTGTEANQAYSVPTKMGSKLEDILMDDTLSPVGVTDPLLSSVSPGASKTSSRRSSMSMEETEHTC

SEQ ID NO: 11589 - protein, 345 aa, Homo sapiens
MLAANPGKTPISLLQEYGTRIGKTPVYDLLKAEGQAHQPNFTFRVTVGDTSCTGQGPSKKAAKHKAAEVALKHLKGGSMLEPALEDSSSFSPLDSSLPEDIPVFTAAAAATPVPSVVLTRSPPMELQPPVSPQQSECNPVGALQELVVQKGWRLPEYTVTQESGPAHRKEFTMTCRVERFIEIGSGTSKKLAKRNAAAKMLLRVHTVPLDARDGNEVEPDDDHFSIGVGSRLDGLRNRGPGCTWDSLRNSVGEKILSLRSCSLGSLGALGPACCRVLSELSEEQAFHVSYLDIEELSLSGLCQCLVELSTQPATVCHGSATTREAARGEAARRALQYLKIMAGSK

SEQ ID NO: 11590 - protein, 272 aa, Homo sapiens
MSGCRVFIGRLNPAAREKDVERFFKGYGRIRDIDLKRGFGFVEFEDPRDADDAVYELDGKELCSERVTIEHARARSRGGRGRGRYSDRFSSRRPRNDRRNAPPVRTENRLIVENLSSRVSWQDLKDFMRQAGEVTFADAHRPKLNEGVVEFASYGDLKNAIEKLSGKEINGRKIKLIEGSKRHSRSRSRSRSRTRSSSRSRSRSRSRSRKSYSRSRSRSRSRSRSKSRSVSRSPVPEKSQKRGSSSRSKSPASVDRQRSRSRSRSRSVDSGN

SEQ ID NO: 11591 - protein, 1113 aa, Homo sapiens
MGPRKKSVKTCIMNNEIPEEMTADETKDYMNQLSHEVLCHIFRYLPLQDIMCMECLSRKLKEAVTLYLRVVRVVDLCAGRWWEYMPSGFTDASFLTLLKKMPDVEQLYGLHPRYLERRRVRGHEAFSIPGVLEALQACPNLVGVETSHLELVESIWTYMPHVHILGKFRNRNGAFPIPPENKLKIPIGAKIQTLHLVGVNVPEIPCIPMLRHLYMKWVRLTKPQPFKDFLCISLRTFVMRNCAGPTNSLKYVPLVTGLASARNLEHLEMVRVPFLGGLIQHVVEDSWRSGGFRNLHTIVLGACKNALEVDLGYLIITAARRLHEVRIQPSLTKDGVFSALKMAELEFPQFETLHLGYVDEFLLQSRMANADLVKYGLADVVENPGIITDIGMKAVNEVFSCIKYLAIYNCPHLHNPYNWISDHSRWTRLVDINLVRCHALKLDSFGQFIELLPSLEFISLDQMFREPPKGCARVGLSAGTGIGVSSALVSNQNSNNDDNNAQNNNANIHDNNHHHPDDSDEENDFRQDLQPGEQQFAADALNEMEDIVQEDGEVVAESGNNTPAHSQAIIPVDVDEEQAGPSGLQRVVKPTSITVHDSESDDEEDSLELQEVWIPKNGTRRYSEREEKTGESVQSRELSVSGKGKTPLRKRYNSHQMGQSKQFPLEESSCEKGCQVTSEQIKADMKAARDIPEKKKNKDVYPSCSSTTASTVGNSSSHNTASQSPDFVRTVNSGGSSEPSPTEVDVSRQCACSPGGSEDSEAMEEGDAESSVCPRCCCHRPQESQRRTSRCSDEERPSTSRACVVNGPDEVAKTKPRHAMKRKRTADKSTSTSDPVIEDDHVQVLVLKSKNLVGVTMTNCGITDLVLKDCPKMMFIHATRCRVLKHLKVENAPIVNRFDYAQCKKLNMDQVLDQILRMPPERNRIIYLRPMQQVDTLTLEQKLFSGPYPYHICIIHEFSNPPNVRNKVRIRSWMDTIANINQELIKYEFFPEATRSEEDLKKYPKYPWGREIYTLEGVVDGAPYSMISDFPWLRSLRAAEPNSFARYDFEDDEESTIYAPRRKGQLSADICMETIGEEISEMRQMKKGVFQRVVAIFIHYCDVNGEPVEDDYI

SEQ ID NO: 11592 - protein, 408 aa, Homo sapiens
MFSNANSRSKMWLLLTMASLISVLGTTHGLFGKLHPGSPEVTMNISQMITYWGYPNEEYEVVTEDGYILEVNRIPYGKKNSGNTGQRPVVFLQHGLLASATNWISNLPNNSLAFILADAGYDVWLGNSRGNTWARRNLYYSPDSVEFWAFSFDEMAKYDLPATIDFIVKKTGQKQLHYVGHSQGTTIGFIAFSTNPSLAKRIKTFYALAPVATVKYTKSLINKLRFVPQSLFKFIFGDKIFYPHNFFDQFLATEVCSREMLNLLCSNALFIICGFDSKNFNTSRLDVYLSHNPAGTSVQNMFHWTQAVKSGKFQAYDWGSPVQNRMHYDQSQPPYYNVTAMNVPIAVWNGGKDLLADPQDVGLLLPKLPNLIYHKEIPFYNHLDFIWAMDAPQEVYNDIVSMISEDKK

SEQ ID NO: 11593 - protein, 443 aa, Homo sapiens
MEEDIDTRKINNSFLRDHSYATEADIISTVEFNHTGELLATGDKGGRVVIFQREQESKNQVHRRGEYNVYSTFQSHEPEFDYLKSLEIEEKINKIRWLPQQNAAYFLLSTNDKTVKLWKVSERDKRPEGYNLKDEEGRLRDPATITTLRVPVLRPMDLMVEATPRRVFANAHTYHINSISVNSDYETYMSADDLRINLWNFEITNQSFNIVDIKPANMEELTEVITAAEFHPHHCNTFVYSSSKGTIRLCDMRASALCDRHTKFFEEPEDPSNRSFFSEIISSISDVKFSHSGRYIMTRDYLTVKVWDLNMENRPIETYQVHDYLRSKLCSLYENDCIFDKFECVWNGSDSVIMTGSYNNFFRMFDRNTKRDVTLEASRENSKPRAILKPRKVCVGGKRRKDEISVDSLDFSKKILHTAWHPSENIIAVAATNNLYIFQDKVN

SEQ ID NO: 11594 - protein, 1343 aa, Homo sapiens
MGLEAQRLPGAEEAPVRVALRVRPLLPKELLHGHQSCLQVEPGLGRVTLGRDRHFGFHVVLAEDAGQEAVYQACVQPLLEAFFEGFNATVFAYGQTGSGKTYTMGEASVASLLEDEQGIVPRAMAEAFKLIDENDLLDCLVHVSYLEVYKEEFRDLLEVGTASRDIQLREDERGNVVLCGVKEVDVEGLDEVLSLLEMGNAARHTGATHLNHLSSRSHTVFTVTLEQRGRAPSRLPRPAPGQLLVSKFHFVDLAGSERVLKTGSTGERLKESIQINSSLLALGNVISALGDPQRRGSHIPYRDSKITRILKDSLGGNAKTVMIACVSPSSSDFDETLNTLNYASRAQNIRNRATVNWRPEAERPPEETASGARGPPRHRSETRIIHRGRRAPGPATASAAAAMRLGAECARYRACTDAAYSLLRELQAEPGLPGAAARKVRDWLCAVEGERSALSSASGPDSGIESASVEDQAAQGAGGRKEDEGAQQLLTLQNQVARLEEENRDFLAALEDAMEQYKLQSDRLREQQEEMVELRLRLELVRPGWGGPRLLNGLPPGSFVPRPHTAPLGGAHAHVLGMVPPACLPGDEVGSEQRGEQVTNGREAGAELLTEVNRLGSGSSAASEEEEEEEEPPRRTLHLRRNRISNCSQRAGARPGSLPERKGPELCLEELDAAIPGSRAVGGSKARVQARQVPPATASEWRLAQAQQKIRELAINIRMKEELIGELVRTGKAAQALNRQHSQRIRELEQEAEQVRAELSEGQRQLRELEGKELQDAGERSRLQEFRRRVAAAQSQVQVLKEKKQATERLVSLSAQSEKRLQELERNVQLMRQQQGQLQRRLREETEQKRRLEAEMSKRQHRVKELELKHEQQQKILKIKTEEIAAFQRKRRSGSNGSVVSLEQQQKIEEQKKWLDQEMEKVLQQRRALEELGEELHKREAILAKKEALMQEKTGLESKRLRSSQALNEDIVRVSSRLEHLEKELSEKSGQLRQGSAQSQQQIRGEIDSLRQEKDSLLKQRLEIDGKLRQGSLLSPEEERTLFQLDEAIEALDAAIEYKNEAITCRQRVLRASASLLSQCEMNLMAKLSYLSSSETRALLCKYFDKVVTLREEQHQQQIAFSELEMQLEEQQRLVYWLEVALERQRLEMDRQLTLQQKEHEQNMQLLLQQSRDHLGEGLADSRRQYEARIQALEKELGRYMWINQELKQKLGGVNAVGHSRGGEKRSLCSEGRQAPGNEDELHLAPELLWLSPLTEGAPRTREETRDLVHAPLPLTWKRSSLCGEEQGSPEELRQREAAEPLVGRVLPVGEAGLPWNFGPLSKPRRELRRASPGMIDVRKNPL

SEQ ID NO: 11595 - protein, 501 aa, Homo sapiens
MVLQPSERHYRDWNHRRLGPWCSPTGSPAPLSCETGCGEGSWILVCRLLVPTQVSLLSMEEDIDTRKINNSFLRDHSYATEADIISTVEFNHTGELLATGDKGGRVVIFQREQESKNQVHRRGEYNVYSTFQSHEPEFDYLKSLEIEEKINKIRWLPQQNAAYFLLSTNDKTVKLWKVSERDKRPEGYNLKDEEGRLRDPATITTLRVPVLRPMDLMVEATPRRVFANAHTYHINSISVNSDYETYMSADDLRINLWNFEITNQSFNIVDIKPANMEELTEVITAAEFHPHHCNTFVYSSSKGTIRLCDMRASALCDRHTKFFEEPEDPSNRSFFSEIISSISDVKFSHSGRYIMTRDYLTVKVWDLNMENRPIETYQVHDYLRSKLCSLYENDCIFDKFECVWNGSDSVIMTGSYNNFFRMFDRNTKRDVTLEASRENSKPRAILKPRKVCVGGKRRKDEISVDSLDFSKKILHTAWHPSENIIAVAATNNLYIFQDKVN

SEQ ID NO: 11596 - protein, 509 aa, Homo sapiens
MLLSLPALHLQTSEHHPFFQLPHRRLGPWCSPTGSPAPLSCETGCGEGSWILVCRLLVPTQVSLLSMEEDIDTRKINNSFLRDHSYATEADIISTVEFNHTGELLATGDKGGRVVIFQREQESKNQVHRRGEYNVYSTFQSHEPEFDYLKSLEIEEKINKIRWLPQQNAAYFLLSTNDKTVKLWKVSERDKRPEGYNLKDEEGRLRDPATITTLRVPVLRPMDLMVEATPRRVFANAHTYHINSISVNSDYETYMSADDLRINLWNFEITNQSFNIVDIKPANMEELTEVITAAEFHPHHCNTFVYSSSKGTIRLCDMRASALCDRHTKFFEEPEDPSNRSFFSEIISSISDVKFSHSGRYIMTRDYLTVKVWDLNMENRPIETYQVHDYLRSKLCSLYENDCIFDKFECVWNGSDSVIMTGSYNNFFRMFDRNTKRDVTLEASRENSKPRAILKPRKVCVGGKRRKDEISVDSLDFSKKILHTAWHPSENIIAVAATNNLYIFQDKVN

SEQ ID NO: 11597 - protein, 497 aa, Homo sapiens
MSQDGASQFQEVIRQELELSVKKELEKILTTASSHEFEHTKKDLDGFRKLFHRFLQEKGPSVDWGKIQRPPEDSIQPYEKIKARGLPDNISSVLNKLVVVKLNGGLGTSMGCKGPKSLIGVRNENTFLDLTVQQIEHLNKTYNTDVPLVLMNSFNTDEDTKKILQKYNHCRVKIYTFNQSRYPRINKESLLPVAKDVSYSGENTEAWYPPGHGDIYASFYNSGLLDTFIGEGKEYIFVSNIDNLGATVDLYILNHLMNPPNGKRCEFVMEVTNKTRADVKGGTLTQYEGKLRLVEIAQVPKAHVDEFKSVSKFKIFNTNNLWISLAAVKRLQEQNAIDMEIIVNAKTLDGGLNVIQLETAVGAAIKSFENSLGINVPRSRFLPVKTTSDLLLVMSNLYSLNAGSLTMSEKREFPTVPLVKLGSSFTKVQDYLRRFESIPDMLELDHLTVSGDVTFGKNVSLKGTVIIIANHGDRIDIPPGAVLENKIVSGNLRILDH

SEQ ID NO: 11598 - protein, 914 aa, Homo sapiens
MDHYDSQQTNDYMQPEEDWDRDLLLDPAWEKQQRKTFTAWCNSHLRKAGTQIENIEEDFRDGLKLMLLLEVISGERLAKPERGKMRVHKISNVNKALDFIASKGVKLVSIGAEEIVDGNVKMTLGMIWTIILRFAIQDISVEETSAKEGLLLWCQRKTAPYKNVNIQNFHISWKDGLGFCALIHRHRPELIDYGKLRKDDPLTNLNTAFDVAEKYLDIPKMLDAEDIVGTARPDEKAIMTYVSSFYHAFSGAQKAETAANRICKVLAVNQENEQLMEDYEKLASDLLEWIRRTIPWLENRVPENTMHAMQQKLEDFRDYRRLHKPPKVQEKCQLEINFNTLQTKLRLSNRPAFMPSEGRMVSDINNAWGCLEQVEKGYEEWLLNEIRRLERLDHLAEKFRQKASIHEAWTDGKEAMLRQKDYETATLSEIKALLKKHEAFESDLAAHQDRVEQIAAIAQELNELDYYDSPSVNARCQKICDQWDNLGALTQKRREALERTEKLLETIDQLYLEYAKRAAPFNNWMEGAMEDLQDTFIVHTIEEIQGLTTAHEQFKATLPDADKERLAILGIHNEVSKIVQTYHVNMAGTNPYTTITPQEINGKWDHVRQLVPRRDQALTEEHARQQHNERLRKQFGAQANVIGPWIQTKMEEIGRISIEMHGTLEDQLSHLRQYEKSIVNYKPKIDQLEGDHQLIQEALIFDNKHTNYTMEHIRVGWEQLLTTIARTINEVENQILTRDAKGISQEQMNEFRASFNHFDRDHSGTLGPEEFKACLISLGYDIGNDPQKKTGMMDTDDFRACLISMGYNMGEAEFARIMSIVDPNRLGVVTFQAFIDFMSRETADTDTADQVMASFKILAGDKNYITMDELRRELPPDQAEYCIARMAPYTGPDSVPGALDYMSFSTALYGESDL

SEQ ID NO: 11599 - protein, 1077 aa, Homo sapiens
MAERGGDGGESERFNPGELRMAQQQALRFRGPAPPPNAVMRGPPPLMRPPPPFGMMRGPPPPPRPPFGRPPFDPNMPPMPPPGGIPPPMGPPHLQRPPFMPPPMSSMPPPPGMMFPPGMPPVTAPGTPALPPTEEIWVENKTPDGKVYYYNARTRESAWTKPDGVKVIQQSELTPMLAAQAQVQAQAQAQAQAQAQAQAQAQAQAQAQAQAQAQAQAQAQAQAQAQAQAQAQAQAQAQAQAQVQAQVQAQVQAQAVGASTPTTSSPAPAVSTSTSSSTPSSTTSTTTTATSVAQTVSTPTTQDQTPSSAVSVATPTVSVSTPAPTATPVQTVPQPHPQTLPPAVPHSVPQPTTAIPAFPPVMVPPFRVPLPGMPIPLPGVLPGMAPPIVPMIHPQVAIAASPATLAGATAVSEWTEYKTADGKTYYYNNRTLESTWEKPQELKEKEKLEEKIKEPIKEPSEEPLPMETEEEDPKEEPIKEIKEEPKEEEMTEEEKAAQKAKPVATAPIPGTPWCVVWTGDERVFFYNPTTRLSMWDRPDDLIGRADVDKIIQEPPHKKGMEELKKLRHPTPTMLSIQKWQFSMSAIKEEQELMEEINEDEPVKAKKRKRDDNKDIDSEKEAAMEAEIKAARERAIVPLEARMKQFKDMLLERGVSAFSTWEKELHKIVFDPRYLLLNPKERKQVFDQYVKTRAEEERREKKNKIMQAKEDFKKMMEEAKFNPRATFSEFAAKHAKDSRFKAIEKMKDREALFNEFVAAARKKEKEDSKTRGEKIKSDFFELLSNHHLDSQSRWSKVKDKVESDPRYKAVDSSSMREDLFKQYIEKIAKNLDSEKEKELERQARIEASLREREREVQKARSEQTKEIDREREQHKREEAIQNFKALLSDMVRSSDVSWSDTRRTLRKDHRWESGSLLEREEKEKLFNEHIEALTKKKREHFRQLLDETSAITLTSTWKEVKKIIKEDPRCIKFSSSDRKKQREFEEYIRDKYITAKADFRTLLKETKFITYRSKKLIQESDQHLKDVEKILQNDKRYLVLDCVPEERRKLIVAYVDDLDRRGPPPPPTASEPTRRSTK

SEQ ID NO: 11600 - protein, 771 aa, Homo sapiens
MTANRLAESLLALSQQEELADLPKDYLLSESEDEGDNDGERKHQKLLEAISSLDGKNRRKLAERSEASLKVSEFNVSSEGSGEKLVLADLLEPVKTSSSLATVKKQLSRVKSKKTVELPLNKEEIERIHREVAFNKTAQVLSKWDPVVLKNRQAEQLVFPLEKEEPAIAPIEHVLSGWKARTPLEQEIFNLLHKNKQPVTDPLLTPVEKASLRAMSLEEAKMRRAELQRARALQSYYEAKARREKKIKSKKYHKVVKKGKAKKALKEFEQLRKVNPAAALEELEKIEKARMMERMSLKHQNSGKWAKSKAIMAKYDLEARQAMQEQLSKNKELTQKLQVASESEEEEGGTEDVEELLVPDVVNEVQMNADGPNPWMLRSCTSDTKEAATQEDPEQLPELEAHGVSESEGEERPVAEEEILLREFEERRSLRKRSELSQDAEPAGSQETKDSGSQEVLSELRVLSQKLKENHQSRKQKASSEGTIPQVQREEPAPEEEEPLLLQRPERVQTLEELEELGKEECFQNKELPRPVLEGQQSERTPNNRPDAPKEKKKKEQMIDLQNLLTTQSPSVKSLAVPTIEELEDEEERNHRQMIKEAFAGDDVIRDFLKEKREAVEASKPKDVDLTLPGWGEWGGVGLKPSAKKRRRFLIKAPEGPPRKDKNLPNVIINEKRNIHAAAHQVRVLPYPFTHHWQFERTIQTPIGSTWNTQRAFQKLTTPKVVTKPGHIINPIKAEDVGYRSSSRSDLSVIQRNPKRITTRHKKQLKKCSVD

SEQ ID NO: 11601 - protein, 382 aa, Homo sapiens
MVPSSPSPPPPPRVYKPCFVCNDKSSGYHYGVSSCEGCKGFFRRSIQKNMVYTCHRDKNCIINKVTRNRCQYCRLQKCFEVGMSKEAVRNDRNKKKKEVKEEGSPDSYELSPQLEELITKVSKAHQETFPSLCQLGKYTTNSSADHRVQLDLGLWDKFSELATKCIIKIVEFAKRLPGFTGLSIADQITLLKAACLDILMLRICTRYTPEQDTMTFSDGLTLNRTQMHNAGFGPLTDLVFAFAGQLLPLEMDDTETGLLSAICLICGDRMDLEEPEKVDKLQEPLLEALRLYARRRRPSQPYMFPRMLMKITDLRGISTKGAERAITLKMEIPGPMPPLIREMLENPEMFEDDSSQPGPHPNASSEDEVPGGQGKGGLKSPA

SEQ ID NO: 11602 - protein, 431 aa, Homo sapiens
MQALNITPEQFSRLLRDHNLTREQFIALYRLRPLVYTPELPGRAKLALVLTGVLIFALALFGNALVFYVVTRSKAMRTVTNIFICSLALSDLLITFFCIPVTMLQNISDNWLGGAFICKMVPFVQSTAVVTEILTMTCIAVERHQGLVHPFKMKWQYTNRRAFTMLGVVWLVAVIVGSPMWHVQQLEIKYDFLYEKEHICCLEEWTSPVHQKIYTTFILVILFLLPLMVMLILYSKIGYELWIKKRVGDGSVLRTIHGKEMSKIARKKKRAVIMMVTVVALFAVCWAPFHVVHMMIEYSNFEKEYDDVTIKMIFAIVQIIGFSNSICNPIVYAFMNENFKKNVLSAVCYCIVNKTFSPAQRHGNSGITMMRKKAKFSLRENPVEETKGEAFSDGNIEVKLCEQTEEKKKLKRHLALFRSELAENSPLDSGH

SEQ ID NO: 11603 - protein, 1176 aa, Homo sapiens
MAERKGTAKVDFLKKIEKEIQQKWDTERVFEVNASNLEKQTSKGKYFVTFPYPYMNGRLHLGHTFSLSKCEFAVGYQRLKGKCCLFPFGLHCTGMPIKACADKLKREIELYGCPPDFPDEEEEEEETSVKTEDIIIKDKAKGKKSKAAAKAGSSKYQWGIMKSLGLSDEEIVKFSEAEHWLDYFPPLAIQDLKRMGLKVDWRRSFITTDVNPYYDSFVRWQFLTLRERNKIKFGKRYTIYSPKDGQPCMDHDRQTGEGVGPQEYTLLKLKVLEPYPSKLSGLKGKNIFLVAATLRPETMFGQTNCWVRPDMKYIGFETVNGDIFICTQKAARNMSYQGFTKDNGVVPVVKELMGEEILGASLSAPLTSYKVIYVLPMLTIKEDKGTGVVTSVPSDSPDDIAALRDLKKKQALRAKYGIRDDMVLPFEPVPVIEIPGFGNLSAVTICDELKIQSQNDREKLAEAKEKIYLKGFYEGIMLVDGFKGQKVQDVKKTIQKKMIDAGDALIYMEPEKQVMSRSSDECVVALCDQWYLDYGEENWKKQTSQCLKNLETFCEETRRNFEATLGWLQEHACSRTYGLGTHLPWDEQWLIESLSDSTIYMAFYTVAHLLQGGNLHGQAESPLGIRPQQMTKEVWDYVFFKEAPFPKTQIAKEKLDQLKQEFEFWYPVDLRVSGKDLVPNHLSYYLYNHVAMWPEQSDKWPTAVRANGHLLLNSEKMSKSTGNFLTLTQAIDKFSADGMRLALADAGDTVEDANFVEAMADAGILRLYTWVEWVKEMVANWDSLRSGPASTFNDRVFASELNAGIIKTDQNYEKMMFKEALKTGFFEFQAAKDKYRELAVEGMHRELVFRFIEVQTLLLAPFCPHLCEHIWTLLGKPDSIMNASWPVAGPVNEVLIHSSQYLMEVTHDLRLRLKNYMMPAKGKKTDKQPLQKPSHCTIYVAKNYPPWQHTTLSVLRKHFEANNGKLPDNKVIASELGSMPELKKYMKKVMPFVAMIKENLEKMGPRILDLQLEFDEKAVLMENIVYLTNSLELEHIEVKFASEAEDKIREDCCPGKPLNVFRIEPGVSVSLVNPQPSNGHFSTKIEIRQGDNCDSIIRRLMKMNRGIKDLSKVKLMRFDDPLLGPRRVPVLGKEYTEKTPISEHAVFNVDLMSKKIHLTENGIRVDIGDTIIYLVH

SEQ ID NO: 11604 - protein, 823 aa, Homo sapiens
MVNAWFAERVHTIPVCKEGIRGHTESCSCPLQQSPRADNSAPGTPTRKISASEFDRPLRPIVVKDSEGTVSFLSDSEKKEQMPLTPPRFDHDEGDQCSRLLELVKDISSHLDVTALCHKIFLHIHGLISADRYSLFLVCEDSSNDKFLISRLFDVAEGSTLEEVSNNCIRLEWNKGIVGHVAALGEPLNIKDAYEDPRFNAEVDQITGYKTQSILCMPIKNHREEVVGVAQAINKKSGNGGTFTEKDEKDFAAYLAFCGIVLHNAQLYETSLLENKRNQVLLDLASLIFEEQQSLEVILKKIAATIISFMQVQKCTIFIVDEDCSDSFSSVFHMECEELEKSSDTLTREHDANKINYMYAQYVKNTMEPLNIPDVSKDKRFPWTTENTGNVNQQCIRSLLCTPIKNGKKNKVIGVCQLVNKMEENTGKVKPFNRNDEQFLEAFVIFCGLGIQNTQMYEAVERAMAKQMVTLEVLSYHASAAEEETRELQSLAAAVVPSAQTLKITDFSFSDFELSDLETALCTIRMFTDLNLVQNFQMKHEVLCRWILSVKKNYRKNVAYHNWRHAFNTAQCMFAALKAGKIQNKLTDLEILALLIAALSHDLDHRGVNNSYIQRSEHPLAQLYCHSIMEHHHFDQCLMILNSPGNQILSGLSIEEYKTTLKIIKQAILATDLALYIKRRGEFFELIRKNQFNLEDPHQKELFLAMLMTACDLSAITKPWPIQQRIAELVATEFFDQGDRERKELNIEPTDLMNREKKNKIPSMQVGFIDAICLQLYEALTHVSEDCFPLLDGCRKNRQKWQALAEQQEKMLINGESGQAKRN

SEQ ID NO: 11605 - protein, 474 aa, Homo sapiens
MRFTFTSRCLALFLLLNHPTPILPAFSNQTYPTIEPKPFLYVVGRKKMMDAQYKCYDRMQQLPAYQGEGPYCNRTWDGWLCWDDTPAGVLSYQFCPDYFPDFDPSEKVTKYCDEKGVWFKHPENNRTWSNYTMCNAFTPEKLKNAYVLYYLAIVGHSLSIFTLVISLGIFVFFRSLGCQRVTLHKNMFLTYILNSMIIIIHLVEVVPNGELVRRDPVSCKILHFFHQYMMACNYFWMLCEGIYLHTLIVVAVFTEKQRLRWYYLLGWGFPLVPTTIHAITRAVYFNDNCWLSVETHLLYIIHGPVMAALVVNFFFLLNIVRVLVTKMRETHEAESHMYLKAVKATMILVPLLGIQFVVFPWRPSNKMLGKIYDYVMHSLIHFQGFFVATIYCFCNNEVQTTVKRQWAQFKIQWNQRWGRRPSNRSARAAAAAAEAGDIPIYICHQELRNEPANNQGEESAEIIPLNIIEQESSA

SEQ ID NO: 11606 - protein, 237 aa, Homo sapiens
MASDGARKQFWKRSNSKLPGSIQHVYGAQHPPFDPLLHGTLLRSTAKMPTTPVKAKRVSTFQEFESNTSDAWDAGEDDDELLAMAAESLNSEVVMETANRVLRNHSQRQGRPTLQEGPGLQQKPRPEAEPPSPPSGDLRLVKSVSESHTSCPAESASDAAPLQRSQSLPHSATVTLGGTSDPSTLSSSALSEREASRLDKFKQLLAGPNTDLGLPSRQCRPETSHSPEKTKRIFCIY

SEQ ID NO: 11607 - protein, 517 aa, Homo sapiens
MAALGPSSQNVTEYVVRVPKNTTKKYNIMAFNAADKVNFATWNQARLERDLSNKKIYQEEEMPESGAGSEFNRKLREEARRKKYGIVLKEFRPEDQPWLLRVNGKSGRKFKGIKKGGVTENTSYYIFTQCPDGAFEAFPVHNWYNFTPLARHRTLTAEEAEEEWERRNKVLNHFSIMQQRRLKDQDQDEDEEEKEKRGRRKASELRIHDLEDDLEMSSDASDASGEEGGRVPKAKKKAPLAKGGRKKKKKKGSDDEAFEDSDDGDFEGQEVDYMSDGSSSSQEEPESKAKAPQQEEGPKGVDEQSDSSEESEEEKPPEEDKEEEEEKKAPTPQEKKRRKDSSEESDSSEESDIDSEASSALFMAKKKTPPKRERKPSGGSSRGNSRPGTPSAEGGSTSSTLRAAASKLEQGKRVSEMPAAKRLRLDTGPQSLSGKSTPQPPSGKTTPNSGDVQVTEDAVRRYLTRKPMTTKDLLKKFQTKKTGLSSEQTVNVLAQILKRLNPERKMINDKMHFSLKE

SEQ ID NO: 11608 - protein, 669 aa, Homo sapiens
MWTPVRRGAAWLGTLLGPGEGPPEPRGGAAHAHKPPAGSRKSTDQAVRFGPSQGMCSEARLARRLRDALREEEPWAVEELLRCGADPNLVLEDGAAAVHLAAGARHPRGLRCLGALLRQGGDPNARSVEALTPLHVAAAWGCRRGLELLLSQGADPALRDQDGLRPLDLALQQGHLECARVLQDLDTRTRTRTRIGAETQEPEPAPGTPGLSGPTDETLDSIALQKQPCRGDNRDIGLEADPGPPSLPVPLETVDKHGSSASPPGHWDYSSDASFVTAVEVSGAEDPASDTPPWAGSLPPTRQGLLHVVHANQRVPRSQGTEAELNARLQALTLTPPNAAGFQSSPSSMPLLDRSPAHSPPRTPTPGASDCHCLWEHQTSIDSDMATLWLTEDEASSTGGREPVGPCRHLPVSTVSDLELLKGLRALGENPHPITPFTRQLYHQQLEEAQIAPGPEFSGHSLELAAALRTGCIPDVQADEDALAQQFEQPDPARRWREGVVKSSFTYLLLDPRETQDLPARAFSLTPAERLQTFIRAIFYVGKGTRARPYVHLWEALGHHGRSRKQPHQACPKVRQILDIWASGCGVVSLHCFQHVVAVEAYTREACIVEALGIQTLTNQKQGHCYGVVAGWPPARRRRLGVHLLHRALLVFLAEGERQLHPQDIQARG

SEQ ID NO: 11609 - protein, 462 aa, Homo sapiens
MGQDAFMEPFGDTLGVFQCKIYLLLFGACSGLKVTVPSHTVHGVRGQALYLPVHYGFHTPASDIQIIWLFERPHTMPKYLLGSVNKSVVPDLEYQHKFTMMPPNASLLINPLQFPDEGNYIVKVNIQGNGTLSASQKIQVTVDDPVTKPVVQIHPPSGAVEYVGNMTLTCHVEGGTRLAYQWLKNGRPVHTSSTYSFSPQNNTLHIAPVTKEDIGNYSCLVRNPVSEMESDIIMPIIYYGPYGLQVNSDKGLKVGEVFTVDLGEAILFDCSADSHPPNTYSWIRRTDNTTYIIKHGPRLEVASEKVAQKTMDYVCCAYNNITGRQDETHFTVIITSVGLEKLAQKGKSLSPLASITGISLFLIISMCLLFLWKKYQPYKVIKQKLEGRPETEYRKAQTFSGHEDALDDFGIYEFVAFPDVSGVSRIPSRSVPASDCVSGQDLHSTVYEVIQHIPAQQQDHPE

SEQ ID NO: 11610 - protein, 587 aa, Homo sapiens
MASGAYNPYIEIIEQPRQRGMRFRYKCEGRSAGSIPGEHSTDNNRTYPSIQIMNYYGKGKVRITLVTKNDPYKPHPHDLVGKDCRDGYYEAEFGQERRPLFFQNLGIRCVKKKEVKEAIITRIKAGINPFNVPEKQLNDIEDCDLNVVRLCFQVFLPDEHGNLTTALPPVVSNPIYDNRAPNTAELRICRVNKNCGSVRGGDEIFLLCDKVQKDDIEVRFVLNDWEAKGIFSQADVHRQVAIVFKTPPYCKAITEPVTVKMQLRRPSDQEVSESMDFRYLPDEKDTYGNKAKKQKTTLLFQKLCQDHVNFPERPRPGLLGSIGEGRYFKKEPNLFSHDAVVREMPTGVSSQAESYYPSPGPISSGLSHHASMAPLPSSSWSSVAHPTPRSGNTNPLSSFSTRTLPSNSQGIPPFLRIPVGNDLNASNACIYNNADDIVGMEASSMPSADLYGISDPNMLSNCSVNMMTTSSDSMGETDNPRLLSMNLENPSCNSVLDPRDLRQLHQMSSSSMSAGANSNTTVFVSQSDAFEGSDFSCADNSMINESGPSNSTNPNSHGFVQDSQYSGIGSMQNEQLSDSFPYEFFQV

SEQ ID NO: 11611 - protein, 825 aa, Homo sapiens
MDVSLCPAKCSFWRIFLLGSVWLDYVGSVLACPANCVCSKTEINCRRPDDGNLFPLLEGQDSGNSNGNASINITDISRNITSIHIENWRSLHTLNAVDMELYTGLQKLTIKNSGLRSIQPRAFAKNPHLRYINLSSNRLTTLSWQLFQTLSLRELQLEQNFFNCSCDIRWMQLWQEQGEAKLNSQNLYCINADGSQLPLFRMNISQCDLPEISVSHVNLTVREGDNAVITCNGSGSPLPDVDWIVTGLQSINTHQTNLNWTNVHAINLTLVNVTSEDNGFTLTCIAENVVGMSNASVALTVYYPPRVVSLEEPELRLEHCIEFVVRGNPPPTLHWLHNGQPLRESKIIHVEYYQEGEISEGCLLFNKPTHYNNGNYTLIAKNPLGTANQTINGHFLKEPFPESTDNFILFDEVSPTPPITVTHKPEEDTFGVSIAVGLAAFACVLLVVLFVMINKYGRRSKFGMKGPVAVISGEEDSASPLHHINHGITTPSSLDAGPDTVVIGMTRIPVIENPQYFRQGHNCHKPDTYVQHIKRRDIVLKRELGEGAFGKVFLAECYNLSPTKDKMLVAVKALKDPTLAARKDFQREAELLTNLQHEHIVKFYGVCGDGDPLIMVFEYMKHGDLNKFLRAHGPDAMILVDGQPRQAKGELGLSQMLHIASQIASGMVYLASQHFVHRDLATRNCLVGANLLVKIGDFGMSRDVYSTDYYRVGGHTMLPIRWMPPESIMYRKFTTESDVWSFGVILWEIFTYGKQPWFQLSNTEVIECITQGRVLERPRVCPKEVYDVMLGCWQREPQQRLNIKEIYKILHALGKATPIYLDILG

SEQ ID NO: 11612 - protein, 799 aa, Homo sapiens
MELNFYKIPDNLPFSTKNLDLSFNPLRHLGSYSFFSFPELQVLDLSRCEIQTIEDGAYQSLSHLSTLILTGNPIQSLALGAFSGLSSLQKLVAVETNLASLENFPIGHLKTLKELNVAHNLIQSFKLPEYFSNLTNLEHLDLSSNKIQSIYCTDLRVLHQMPLLNLSLDLSLNPMNFIQPGAFKEIRLHKLTLRNNFDSLNVMKTCIQGLAGLEVHRLVLGEFRNEGNLEKFDKSALEGLCNLTIEEFRLAYLDYYLDDIIDLFNCLTNVSSFSLVSVTIERVKDFSYNFGWQHLELVNCKFGQFPTLKLKSLKRLTFTSNKGGNAFSEVDLPSLEFLDLSRNGLSFKGCCSQSDFGTTSLKYLDLSFNGVITMSSNFLGLEQLEHLDFQHSNLKQMSEFSVFLSLRNLIYLDISHTHTRVAFNGIFNGLSSLEVLKMAGNSFQENFLPDIFTELRNLTFLDLSQCQLEQLSPTAFNSLSSLQVLNMSHNNFFSLDTFPYKCLNSLQVLDYSLNHIMTSKKQELQHFPSSLAFLNLTQNDFACTCEHQSFLQWIKDQRQLLVEVERMECATPSDKQGMPVLSLNITCQMNKTIIGVSVLSVLVVSVVAVLVYKFYFHLMLLAGCIKYGRGENIYDAFVIYSSQDEDWVRNELVKNLEEGVPPFQLCLHYRDFIPGVAIAANIIHEGFHKSRKVIVVVSQHFIQSRWCIFEYEIAQTWQFLSSRAGIIFIVLQKVEKTLLRQQVELYRLLSRNTYLEWEDSVLGRHIFWRRLRKALLDGKSWNPEGTVGTGCNWQEATSI

SEQ ID NO: 11613 - protein, 2813 aa, Homo sapiens
MKLNPQQAPLYGDCVVTVLLAEEDKAEDDVVFYLVFLGSTLRHCTSTRKVSSDTLETIAPGHDCCETVKVQLCASKEGLPVFVVAEEDFHFVQDEAYDAAQFLATSAGNQQALNFTRFLDQSGPPSGDVNSLDKKLVLAFRHLKLPTEWNVLGTDQSLHDAGPRETLMHFAVRLGLLRLTWFLLQKPGGRGALSIHNQEGATPVSLALERGYHKLHQLLTEENAGEPDSWSSLSYEIPYGDCSVRHHRELDIYTLTSESDSHHEHPFPGDGCTGPIFKLMNIQQQLMKTNLKQMDSLMPLMMTAQDPSSAPETDGQFLPCAPEPTDPQRLSSSEETESTQCCPGSPVAQTESPCDLSSIVEEENTDRSCRKKNKGVERKGEEVEPAPIVDSGTVSDQDSCLQSLPDCGVKGTEGLSSCGNRNEETGTKSSGMPTDQESLSSGDAVLQRDLVMEPGTAQYSSGGELGGISTTNVSTPDTAGEMEHGLMNPDATVWKNVLQGGESTKERFENSNIGTAGASDVHVTSKPVDKISVPNCAPAASSLDGNKPAESSLAFSNEETSTEKTAETETSRSREESADAPVDQNSVVIPAAAKDKISDGLEPYTLLAAGIGEAMSPSDLALLGLEEDVMPHQNSETNSSHAQSQKGKSSPICSTTGDDKLCADSACQQNTVTSSGDLVAKLCDNIVSESESTTARQPSSQDPPDASHCEDPQAHTVTSDPVRDTQERADFCPFKVVDNKGQRKDVKLDKPLTNMLEVVSHPHPVVPKMEKELVPDQAVISDSTFSLANSPGSESVTKDDALSFVPSQKEKGTATPELHTATDYRDGPDGNSNEPDTRPLEDRAVGLSTSSTAAELQHGMGNTSLTGLGGEHEGPAPPAIPEALNIKGNTDSSLQSVGKATLALDSVLTEEGKLLVVSESSAAQEQDKDKAVTCSSIKENALSSGTLQEEQRTPPPGQDTQQFHEKSISADCAKDKALQLSNSPGASSAFLKAETEHNKEVAPQVSLLTQGGAAQSLVPPGASLATESRQEALGAEHNSSALLPCLLPDGSDGSDALNCSQPSPLDVGVKNTQSQGKTSACEVSGDVTVDVTGVNALQGMAEPRRENISHNTQDILIPNVLLSQEKNAVLGLPVALQDKAVTDPQGVGTPEMIPLDWEKGKLEGADHSCTMGDAEEAQIDDEAHPVLLQPVAKELPTDMELSAHDDGAPAGVREVMRAPPSGRERSTPSLPCMVSAQDAPLPKGADLIEEAASRIVDAVIEQVKAAGALLTEGEACHMSLSSPELGPLTKGLESAFTEKVSTFPPGESLPMGSTPEEATGSLAGCFAGREEPEKIILPVQGPEPAAEMPDVKAEDEVDFRASSISEEVAVGSIAATLKMKQGPMTQAINRENWCTIEPCPDAASLLASKQSPECENFLDVGLGRECTSKQGVLKRESGSDSDLFHSPSDDMDSIIFPKPEEEHLACDITGSSSSTDDTASLDRHSSHGSDVSLSQILKPNRSRDRQSLDGFYSHGMGAEGRESESEPADPGDVEEEEMDSITEVPANCSVLRSSMRSLSPFRRHSWGPGKNAASDAEMNHRSSMRVLGDVVRRPPIHRRSFSLEGLTGGAGVGNKPSSSLEVSSANAEELRHPFSGEERVDSLVSLSEEDLESDQREHRMFDQQICHRSKQQGFNYCTSAISSPLTKSISLMTISHPGLDNSRPFHSTFHNTSANLTESITEENYNFLPHSPSKKDSEWKSGTKVSRTFSYIKNKMSSSKKSKEKEKEKDKIKEKEKDSKDKEKDKKTVNGHTFSSIPVVGPISCSQCMKPFTNKDAYTCANCSAFVHKGCRESLASCAKVKMKQPKGSLQAHDTSSLPTVIMRNKPSQPKERPRSAVLLVDETATTPIFANRRSQQSVSLSKSVSIQNITGVGNDENMSNTWKFLSHSTDSLNKISKVNESTESLTDEGVGTDMNEGQLLGDFEIESKQLEAESWSRIIDSKFLKQQKKDVVKRQEVIYELMQTEFHHVRTLKIMSGVYSQGMMADLLFEQQMVEKLFPCLDELISIHSQFFQRILERKKESLVDKSEKNFLIKRIGDVLVNQFSGENAERLKKTYGKFCGQHNQSVNYFKDLYAKDKRFQAFVKKKMSSSVVRRLGIPECILLVTQRITKYPVLFQRILQCTKDNEVEQEDLAQSLSLVKDVIGAVDSKVASYEKKVRLNEIYTKTDSKSIMRMKSGQMFAKEDLKRKKLVRDGSVFLKNAAGRLKEVQAVLLTDILVFLQEKDQKYIFASLDQKSTVISLKKLIVREVAHEEKGLFLISMGMTDPEMVEVHASSKEERNSWIQIIQDTINTLNRDEDEGIPSENEEEKKMLDTRARELKEQLHQKDQKILLLLEEKEMIFRDMAECSTPLPEDCSPTHSPRVLFRSNTEEALKGGPLMKSAINEVEILQGLVSGNLGGTLGPTVSSPIEQDVVGPVSLPRRAETFGGFDSHQMNASKGGEKEEGDDGQDLRRTESDSGLKKGGNANLVFMLKRNSEQVVQSVVHLYELLSALQGVVLQQDSYIEDQKLVLSERALTRSLSRPSSLIEQEKQRSLEKQRQDLANLQKQQAQYLEEKRRREREWEARERELREREALLAQREEEVQQGQQDLEKEREELQQKKGTYQYDLERLRAAQKQLEREQEQLRREAERLSQRQTERDLCQVSHPHTKLMRIPSFFPSPEEPPSPSAPSIAKSGSLDSELSVSPKRNSISRTHKDKGPFHILSSTSQTNKGPEGQSQAPASTSASTRLFGLTKPKEKKEKKKKNKTSRSQPGDGPASEVSAEGEEIFC

SEQ ID NO: 11614 - protein, 901 aa, Homo sapiens
MSLPSRQTAIIVNPPPPEYINTKKNGRLTNQLQYLQKVVLKDLWKHSFSWPFQRPVDAVKLQLPPGDDIVLMAQALEKLFMQKLSQMPQEEQVVGVKERIKKGTQQNIAVSSAKEKSSPSATEKVFKQQEIPSVFPKTSISPLNVVQGASVNSSSQTAAQVTKGVKRKADTTTPATSAVKASSEFSPTFTEKSVALPPIKENMPKNVLPDSQQQYNVVKTVKVTEQLRHCSEILKEMLAKKHFSYAWPFYNPVDVNALGLHNYYDVVKNPMDLGTIKEKMDNQEYKDAYKFAADVRLMFMNCYKYNPPDHEVVTMARMLQDVFETHFSKIPIEPVESMPLCYIKTDITETTGRENTNEASSEGNSSDDSEDERVKRLAKLQEQLKAVHQQLQVLSQVPFRKLNKKKEKSKKEKKKEKVNNSNENPRKMCEQMRLKEKSKRNQPKKRKQQFIGLKSEDEDNAKPMNYDEKRQLSLNINKLPGDKLGRVVHIIQSREPSLSNSNPDEIEIDFETLKASTLRELEKYVSACLRKRPLKPPAKKIMMSKEELHSQKKQELEKRLLDVNNQLNSRKRQTKSDKTQPSKAVENVSRLSESSSSSSSSSESESSSSDLSSSDSSDSESEMFPKFTEVKPNDSPSKENVKKMKNECIPPEGRTGVTQIGYCVQDTTSANTTLVHQTTPSHVMPPNHHQLAFNYQELEHLQTVKNISPLQILPPSGDSEQLSNGITVMHPSGDSDTTMLESECQAPVQKDIKIKNADSWKSLGKPVKPSGVMKSSDELFNQFRKAAIEKEVKARTQELIRKHLEQNTKELKASQENQRDLGNGLTVESFSNKIQNKCSGEEQKEHQQSSEAQDKSKLWLLKDRDLARQKEQERRRREAMVGTIDMTLQSDIMTMFENNFD

SEQ ID NO: 11615 - protein, 1769 aa, Homo sapiens
EKLEFRVRELEQALLVEDRKHFGAVEAKPELSLEVQLQAERDAIDRKEKEITNLEEQLEQFREELENKNEEVQQLHMQLEIQKKESTTRLQELEQENKLFKDDMEKLGLAIKESDAMSTQDQHVLFGKFAQIIQEKEVEIDQLNEQVTKLQQQLKITTDNKVIEEKNELIRDLETQIECLMSDQECVKRNREEEIEQLNEVIEKLQQELANIGQKTSMNAHSLSEEADSLKHQLDVVIAEKLALEQQVETANEEMTFMKNVLKETNFKMNQLTQELFSLKRERESVEKIQSIPENSVNVAIDHLSKDKPELEVVLTEDALKSLENQTYFKSFEENGKGSIINLETRLLQLESTVSAKDLELTQCYKQIKDMQEQGQFETEMLQKKIVNLQKIVEEKVAAALVSQIQLEAVQEYAKFCQDNQTISSEPERTNIQNLNQLREDELGSDISALTLRISELESQVVEMHTSLILEKEQVEIAEKNVLEKEKKLLELQKLLEGNEKKQREKEKKRSPQDVEVLKTTTELFHSNEESGFFNELEALRAESVATKAELASYKEKAEKLQEELLVKETNMTSLQKDLSQVRDHLAEAKEKLSILEKEDETEVQESKKACMFEPLPIKLSKSIASQTDGTLKISSSNQTPQILVKNAGIQINLQSECSSEEVTEIISQFTEKIEKMQELHAAEILDMESRHISETETLKREHYVAVQLLKEECGTLKAVIQCLRSKEGSSIPELAHSDAYQTREICSSDSGSDWGQGIYLTHSQGFDIASEGRGEESESATDSFPKKIKGLLRAVHNEGMQVLSLTESPYSDGEDHSIQQVSEPWLEERKAYINTISSLKDLITKMQLQREAEVYDSSQSHESFSDWRGELLLALQQVFLEERSVLLAAFRTELTALGTTDAVGLLNCLEQRIQEQGVEYQAAMECLQKADRRSLLSEIQALHAQMNGRKITLKREQESEKPSQELLEYNIQQKQSQMLEMQVELSSMKDRATELQEQLSSEKMVVAELKSELAQTKLELETTLKAQHKHLKELEAFRLEVKDKTDEVHLLNDTLASEQKKSRELQWALEKEKAKLGRSEERDKEELEDLKFSLESQKQRNLQLNLLLEQQKQLLNESQQKIESQRMLYDAQLSEEQGRNLELQVLLESEKVRIREMSSTLDRERELHAQLQSSDGTGQSRPPLPSEDLLKELQKQLEEKHSRIVELLNETEKYKLDSLQTRQQMEKDRQVHRKTLQTEQEANTEGQKKMHELQSKVEDLQRQLEEKRQQVYKLDLEGQRLQGIMQEFQKQELEREEKRESRRILYQNLNEPTTWSLTSDRTRNWVLQQKIEGETKESNYAKLIEMNGGGTGCNHELEMIRQKLQCVASKLQVLPQKASERLQFETADDEDFIWVQENIDEIILQLQKLTGQQGEEPSLVSPSTSCGSLTERLLRQNAELTGHISQLTEEKNDLRNMVMKLEEQIRWYRQTGAGRDNSSRFSLNGGANIEAIIASEKEVWNREKLTLQKSLKRAEAEVYKLKAELRNDSLLQTLSPDSEHVTLKRIYGKYLRAESFRKALIYQKKYLLLLLGGFQECEDATLALLARMGGQPAFTDLEVITNRPKGFTRFRSAVRVSIAISRMKFLVRRWHRVTGSVSININRDGFGLNQGAEKTDSFYHSSGGLELYGEPRHTTYRSRSDLDYIRSPLPFQNRYPGTPADFNPGSLACSQLQNYDPDRALTDYITRLEALQRRLGTIQSGALSLTTSWQHHSARPTAPLSLKFFHTH

SEQ ID NO: 11616 - protein, 1060 aa, Homo sapiens
MDSGAGGRRCPEAALLILGPPRMEHLRHSPGPGGQRLLLPSMLLALLLLLAPSPGHATRVVYKVPEEQPPNTLIGSLAADYGFPDVGHLYKLEVGAPYLRVDGKTGDIFTTETSIDREGLRECQNQLPGDPCILEFEVSITDLVQNGSPRLLEGQIEVQDINDNTPNFASPVITLAIPENTNIGSLFPIPLASDRDAGPNGVASYELQAGPEAQELFGLQVAEDQEEKQPQLIVMGNLDRERWDSYDLTIKVQDGGSPPRASSALLRVTVLDTNDNAPKFERPSYEAELSENSPIGHSVIQVKANDSDQGANAEIEYTFHQAPEVVRRLLRLDRNTGLITVQGPVDREDLSTLRFSVLAKDRGTNPKSARAQVVVTVKDMNDNAPTIEIRGIGLVTHQDGMANISEDVAEETAVALVQVSDRDEGENAAVTCVVAGDVPFQLRQASETGSDSKKKYFLQTTTPLDYEKVKDYTIEIVAVDSGNPPLSSTNSLKVQVVDVNDNAPVFTQSVTEVAFPENNKPGEVIAEITASDADSGSNAELVYSLEPEPAAKGLFTISPETGEIQVKTSLDREQRESYELKVVAADRGSPSLQGTATVLVNVLDCNDNDPKFMLSGYNFSVMENMPALSPVGMVTVIDGDKGENAQVQLSVEQDNGDFVIQNGTGTILSSLSFDREQQSTYTFQLKAVDGGVPPRSAYVGVTINVLDENDNAPYITAPSNTSHKLLTPQTRLGETVSQVAAEDFDSGVNAELIYSIAGGNPYGLFQIGSHSGAITLEKEIERRHHGLHRLVVKVSDRGKPPRYGTALVHLYVNETLANRTLLETLLGHSLDTPLDIDIAGDPEYERSKQRGNILFGVVAGVVAVALLIALAVLVRYCRQREAKSGYQAGKKETKDLYAPKPSGKASKGNKSKGKKSKSPKPVKPVEDEDEAGLQKSLKFNLMSDAPGDSPRIHLPLNYPPGSPDLGRHYRSNSPLPSIQLQPQSPSASKKHQVVQDLPPANTFVGTGDTTSTGSEQYSDYSYRTNPPKYPSKQVGQPFQLSTPQPLPHPYHGAIWTEVWE

SEQ ID NO: 11617 - protein, 1872 aa, Homo sapiens
MMNEDAAQKSDSGEKFNGSSQRRKRPKKSDSNASFLRAARAGNLDKVVEYLKGGIDINTCNQNGLNALHLAAKEGHVGLVQELLGRGSSVDSATKKGNTALHIASLAGQAEVVKVLVKEGANINAQSQNGFTPLYMAAQENHIDVVKYLLENGANQSTATEDGFTPLAVALQQGHNQAVAILLENDTKGKVRLPALHIAARKDDTKSAALLLQNDHNADVQSKMMVNRTTESGFTPLHIAAHYGNVNVATLLLNRGAAVDFTARNGITPLHVASKRGNTNMVKLLLDRGGQIDAKTRDGLTPLHCAARSGHDQVVELLLERGAPLLARTKNGLSPLHMAAQGDHVECVKHLLQHKAPVDDVTLDYLTALHVAAHCGHYRVTKLLLDKRANPNARALNGFTPLHIACKKNRIKVMELLVKYGASIQAITESGLTPIHVAAFMGHLNIVLLLLQNGASPDVTNIRGETALHMAARAGQVEVVRCLLRNGALVDARAREEQTPLHIASRLGKTEIVQLLLQHMAHPDAATTNGYTPLHISAREGQVDVASVLLEAGAAHSLATKKGFTPLHVAAKYGSLDVAKLLLQRRAAADSAGKNGLTPLHVAAHYDNQKVALLLLEKGASPHATAKNGYTPLHIAAKKNQMQIASTLLNYGAETNIVTKQGVTPLHLASQEGHTDMVTLLLDKGANIHMSTKSGLTSLHLAAQEDKVNVADILTKHGADQDAHTKLGYTPLIVACHYGNVKMVNFLLKQGANVNAKTKNGYTPLHQAAQQGHTHIINVLLQHGAKPNATTANGNTALAIAKRLGYISVVDTLKVVTEEVTTTTTTITEKHKLNVPETMTEVLDVSDEEGDDTMTGDGGEYLRPEDLKELGDDSLPSSQFLDGMNYLRYSLEGGRSDSLRSFSSDRSHTLSHASYLRDSAVMDDSVVIPSHQVSTLAKEAERNSYRLSWGTENLDNVALSSSPIHSGFLVSFMVDARGGAMRGCRHNGLRIIIPPRKCTAPTRVTCRLVKRHRLATMPPMVEGEGLASRLIEVGPSGAQFLGKLHLPTAPPPLNEGESLVSRILQLGPPGTKFLGPVIVEIPHFAALRGKERELVVLRSENGDSWKEHFCDYTEDELNEILNGMDEVLDSPEDLEKKRICRIITRDFPQYFAVVSRIKQDSNLIGPEGGVLSSTVVPQVQAVFPEGALTKRIRVGLQAQPMHSELVKKILGNKATFSPIVTLEPRRRKFHKPITMTIPVPKASSDVMLNGFGGDAPTLRLLCSITGGTTPAQWEDITGTTPLTFVNECVSFTTNVSARFWLIDCRQIQESVTFASQVYREIICVPYMAKFVVFAKSHDPIEARLRCFCMTDDKVDKTLEQQENFAEVARSRDVEVLEGKPIYVDCFGNLVPLTKSGQHHIFSFFAFKENRLPLFVKVRDTTQEPCGRLSFMKEPKSTRGLVHQAICNLNITLPIYTKESESDQEQEEEIDMTSEKNPQDEQERIEERLAYIADHLGFSWTELARELDFTEEQIHQIRIENPNSLQDQSHALLKYWLERDGKHATDTNLVECLTKINRMDIVHLMETNTEPLQERISHSYAEIEQTITLDHSEGFSVLQEELCTAQHKQKEEQAVSKESETCDHPPIVSEEDISVGYSTFQDGVPKTEGDSSATALFPQTHKEQVQQDFSGKMQDLPEESSLEYQQEYFVTTPGTETSETQKAMIVPSSPSKTPEEVSTPAEEEKLYLQTPTSSERGGSPIIQEPEEPSEHREESSPRKTSLVIVESADNQPETCERLDEDAAFEKGDDMPEIPPETVTEEEYIDEHGHTVVKKVTRKIIRRYVSSEGTEKEEIMVQGMPQEPVNIEEGDGYSKVIKRVVLKSDTEQSEDNNE

SEQ ID NO: 11618 - protein, 255 aa, Homo sapiens
MNFSGGGRQEAAGSRGRRAPRPREQDRDVQLSKALSYALRHGALKLGLPMGADGFVPLGTLLQLPQFRGFSAEDVQRVVDTNRKQRFALQLGDPSTGLLIRANQGHSLQVGVPKLELMPLETPQALPPMLVHGTFWKHWPSILLKGLSCQGRTHIHLAPGLPGDPGIISGMRSHCEIAVFIDGPLALADGIPFFRSANGVILTPGNTDGFLLPKYFKEALQLRPTRKPLSLAGDEETECQSSPKHSSRERRRIQQ

SEQ ID NO: 11619 - protein, 204 aa, Homo sapiens
MGADGFVPLGTLLQLPQFRGFSAEDVQRVVDTNRKQRFALQLGDPSTGLLIRANQGHSLQVPKLELMPLETPQALPPMLVHGTFWKHWPSILLKGLSCQGRTHIHLAPGLPGDPGIISGMRSHCEIAVFIDGPLALADGIPFFRSANGVILTPGNTDGFLLPKYFKEALQLRPTRKPLSLAGDEETECQSSPKHSSRERRRIQQ

SEQ ID NO: 11620 - protein, 305 aa, Homo sapiens
MSRELAPLLLLLLSIHSALAMRICSFNVRSFGESKQEDKNAMDVIVKVIKRCDIILVMEIKDSNNRICPILMEKLNRNSRRGITYNYVISSRLGRNTYKEQYAFLYKEKLVSVKRSYHYHDYQDGDADVFSREPFVVWFQSPHTAVKDFVIIPLHTTPETSVKEIDELVEVYTDVKHRWKAENFIFMGDFNAGCSYVPKKAWKNIRLRTDPRFVWLIGDQEDTTVKKSTNCAYDRIVLRGQEIVSSVVPKSNSVFDFQKAYKLTEEEALDVSDHFPVEFKLQSSRAFTNSKKSVTLRKKTKSKRS

SEQ ID NO: 11621 - protein, 929 aa, Homo sapiens
MAEVEAVQLKEEGNRHFQLQDYKAATNSYSQALKLTKDKALLATLYRNRAACGLKTESYVQAASDASRAIDINSSDIKALYRRCQALEHLGKLDQAFKDVQRCATLEPRNQNFQEMLRRLNTSIQEKLRVQFSTDSRVQKMFEILLDENSEADKREKAANNLIVLGREEAGAEKIFQNNGVALLLQLLDTKKPELVLAAVRTLSGMCSGHQARATVILHAVRIDRICSLMAVENEEMSLAVCNLLQAIIDSLSGEDKREHRGKEEALVLDTKKDLKQITSHLLDMLVSKKVSGQGRDQALNLLNKNVPRKDLAIHDNSRTIYVVDNGLRKILKVVGQVPDLPSCLPLTDNTRMLASILINKLYDDLRCDPERDHFRKICEEYITGKFDPQDMDKNLNAIQTVSGILQGPFDLGNQLLGLKGVMEMMVALCGSERETDQLVAVEALIHASTKLSRATFIITNGVSLLKQIYKTTKNEKIKIRTLVGLCKLGSAGGTDYGLRQFAEGSTEKLAKQCRKWLCNMSIDTRTRRWAVEGLAYLTLDADVKDDFVQDVPALQAMFELAKTSDKTILYSVATTLVNCTNSYDVKEVIPELVQLAKFSKQHVPEEHPKDKKDFIDMRVKRLLKAGVISALACMVKADSAILTDQTKELLARVFLALCDNPKDRGTIVAQGGGKALIPLALEGTDVGKVKAAHALAKIAAVSNPDIAFPGERVYEVVRPLVRLLDTQRDGLQNYEALLGLTNLSGRSDKLRQKIFKERALPDIENYMFENHDQLRQAATECMCNMVLHKEVQERFLADGNDRLKLVVLLCGEDDDKVQNAAAGALAMLTAAHKKLCLKMTQVTTQWLEILQRLCLHDQLSVQHRGLVIAYNLLAADAELAKKLVESELLEILTVVGKQEPDEKKAEVVQTARECLIKCMDYGFIKPVS

SEQ ID NO: 11622 - protein, 932 aa, Homo sapiens
MAALQKLPHCRKLVLLCFLLATLWEARAGQIRYSVREEIDRGSFVGNIAKDLGLEPLALAEQGVRIVSRGRSQLFALNPRSGSLVTANRIDREELCAQSAPCLLNFNILLEDKLTIYSVEVEITDINDNAPRFGVEELELKISETTTPGFRIPLKNAHDADVGENALQKYALNPNDHFSLDVRRGADGNKYPELVLERSLDREEEAVHHLVLVASDGGDPVLSGTSRICVKVLDANDNAPVFTQPEYRISIPENTLVGTRILTVTATDADEGYYAQVVYFLEKSPGETSEVFELKSTSGELTIIKDLDYEDATFHEIDIEAQDGPGLLTRAKVIVTVLDVNDNAPEFYMTSATSSVSEDSLPGTIIGLFNVHDRDSGQNAFTTCSLPEDLPFKLEKSVDNYYRLVTTRALDREQFSFYNITLTAKDGGNPSLSTDAHILLQVADINDNAPAFSRTSYSTYIPENNPRGASVFSVTAHDPDSNDNAHVTYSFAEDTVQGAPLSSYISINSDTGVLYALRSFDYEQLRDLQVWVIARDSGNPPLSSNVSLSLFVLDQNDNAPEILYPAFPTDGSTGVELAPRSAEPGYLVTKVVAVDRDSGQNAWLSYHLLKASEPGLFSVGLHTGEVRTARALLDRDALKQSLVVAIQDHGQPPLSATVTLTVAVADRIPDILADLGSLEPSAIPNDSDLTLYLVVAVAAVSCVFLAFVIVLLAHRLRRWHKSRLLQASGGSLTGMQSSHFVGVDGVRAFLQTYSHEVSLTADSRKSHLIFPQPNYADTLISQESCEKKDFLSAPQSLLEEEREETFSQQAPPNTDWRFSQAQRPGTSGSQNGDDTGTWPNNQFDTEMLQAMILASASEAADGSSTLGGGAGTMGLSARYGPQFTLQHVPDYRQNVYIPGSNATLTNAAGKRDGKAPAGGNGNKKKSGKKEKK

SEQ ID NO: 11623 - protein, 154 aa, Homo sapiens
MARRAGGARMFGSLLLFALLAAGVAPLSWDLPEPRSRASKIRVHSRGNLWATGHFMGKKSLEPSSPSPLGTAPHTSLRDQRLQLSHDLLGILLLKKALGVSLSRPAPQIQEAAGTNTAEMTPIMGQTQQRGLDCAHPGKVLNGTLLMAPSGCKS

SEQ ID NO: 11624 - protein, 865 aa, Homo sapiens
MAQLERSAISGFSSKSRRNSFAYDVKREVYNEETFQQEHKRKASSSGNMNINITTFRHHVQCRCSWHRFLRCVLTIFPFLEWMCMYRLKDWLLGDLLAGISVGLVQVPQGLTLSLLARQLIPPLNIAYAAFCSSVIYVIFGSCHQMSIGSFFLVSALLINVLKVSPFNNGQLVMGSFVKNEFSAPSYLMGYNKSLSVVATTTFLTGIIQIIGFTVIANKISMATETSQTLIDMIPYSFLLPVTPDFSLLPKIILQAFSLSLVSSFLLIFLGKKIASLHNYSVNSNQDLIAIGLCNVVSSFFRSCVFTGAIARTIIQDKSGGRQQFASLVGAGVMLLLMVKMGHFFYTLPNAVLAGIILSNVIPYLETISNLPSLWRQDQYDCALWMMTFSSSIFLGLDIGLIISVVSAFFITTVRSHRAKILLLGQIPNTNIYRSINDYREIITIPGVKIFQCCSSITFVNVYYLKHKLLKEVDMVKVPLKEEEIFSLFNSSDTNLQGGKICRCFCNCDDLEPLPRILYTERFENKLDPEASSINLIHCSHFESMNTSQTASEDQVPYTVSSVSQKNQGQQYEEVEEVWLPNNSSRNSSPGLPDVAESQGRRSLIPYSDASLLPSVHTIILDFSMVHYVDSRGLVVLRQICNAFQNANILILIAGCHSSIVRAFERNDFFDAGITKTQLFLSVHDAVLFALSRKVIGSSELSIDESETVIRETYSETDKNDNSRYKMSSSFLGSQKNVSPGFIKIQQPVEEESELDLELESEQEAGLGLDLDLDRELEPEMEPKAETETKTQTEMEPQPETEPEMEPNPKSRPRAHTFPQQRYWPMYHPSMASTQSQTQTRTWSVERRRHPMDSYSPEGNSNEDV

SEQ ID NO: 11625 - protein, 686 aa, Homo sapiens
MVFSRRGGLGARDLLLWLLLLAAWEVGSGQLHYSIPEEAKHGTFVGRVAQDLGLELAELVPRLFRVASKTHRDLLEVNLQNGILFVNSRIDREELCQWSAECSIHLELIADRPLQVFHVEVKVKDINDNPPVFRGREQIIFIPESRLLNSRFPIEGAADADIGANALLTYTLSPSDYFSLDVEASDELSKSLWLELRKYLDREETPELHLLLTATDGGKPELQGTVELLITVLDVNDNAPLFDQAVYRVHLLETTANGTLVTTLNASDADEGVNGEVVFSFDSGISRDIQEKFKVDSSSGEIRLIDKLDYEETKSYEIQVKAVDKGSPPMSNHCKVLVKVLDVNDNAPELAVTSLYLPIREDAPLSTVIALITVSDRDSGANGQVTCSLMPHVPFKLVSTFKNYYSLVLDSALDRESLSVYELVVTARDGGSPSLWATARVSVEVADVNDNAPAFAQPEYTVFVKENNPPGCHIFTVSARDADAQENALVSYSLVERRVGERALSNYVSVHAESGKVYALQPLDHEELELLQFQPRQPNPDWRYSASLRAGMHSSVHLEEAGILRAGPGGPDQQWPTVSSATPEPEAGEVSPPVGAGVNSNSWTFKYGPGNPKQSGPGELPDKFIIPGSPAIISIRQEPTNSQIDKSDFITFGKKEETKKKKKKKKGNKTQEKKEKGNSTTDNSDQ

SEQ ID NO: 11626 - protein, 583 aa, Homo sapiens
MKLLHVFLLFLCFHLRFCKVTYTSQEDLVEKKCLAKKYTHLSCDKVFCQPWQRCIEGTCVCKLPYQCPKNGTAVCATNRRSFPTYCQQKSLECLHPGTKFLNNGTCTAEGKFSVSLKHGNTDSEGIVEVKLVDQDKTMFICKSSWSMREANVACLDLGFQQGADTQRRFKLSDLSINSTECLHVHCRGLETSLAECTFTKRRTMGYQDFADVVCYTQKADSPMDDFFQCVNGKYISQMKACDGINDCGDQSDELCCKACQGKGFHCKSGVCIPSQYQCNGEVDCITGEDEVGCAGFASVTQEETEILTADMDAERRRIKSLLPKLSCGVKNRMHIRRKRIVGGKRAQLGDLPWQVAIKDASGITCGGIYIGGCWILTAAHCLRASKTHRYQIWTTVVDWIHPDLKRIVIEYVDRIIFHENYNAGTYQNDIALIEMKKDGNKKDCELPRSIPACVPWSPYLFQPNDTCIVSGWGREKDNERVFSLQWGEVKLISNCSKFYGNRFYEKEMECAGTYDGSIDACKGDSGGPLVCMDANNVTYVWGVVSWGENCGKPEFPGVYTKVANYFDWISYHVGRPFISQYNV

SEQ ID NO: 11627 - protein, 591 aa, Homo sapiens
MKLLHVFLLFLCFHLRFCKVTYTSQEDLVEKKCLAKKYTHLSCDKVFCQPWQRCIEGTCVCKLPYQCPKNGTAVCATNRRSFPTYCQQKSLECLHPGTKFLNNGTCTAEGKFSVSLKHGNTDSEGIVEVKLVDQDKTMFICKSSWSMREANVACLDLGFQQGADTQRRFKLSDLSINSTECLHVHCRGLETSLAECTFTKRRTMGYQDFADVVCYTQKADSPMDDFFQCVNGKYISQMKACDGINDCGDQSDELCCKACQGKGFHCKSGVCIPSQYQCNGEVDCITGEDEVGCAAARHPTIQGFASVTQEETEILTADMDAERRRIKSLLPKLSCGVKNRMHIRRKRIVGGKRAQLGDLPWQVAIKDASGITCGGIYIGGCWILTAAHCLRASKTHRYQIWTTVVDWIHPDLKRIVIEYVDRIIFHENYNAGTYQNDIALIEMKKDGNKKDCELPRSIPACVPWSPYLFQPNDTCIVSGWGREKDNERVFSLQWGEVKLISNCSKFYGNRFYEKEMECAGTYDGSIDACKGDSGGPLVCMDANNVTYVWGVVSWGENCGKPEFPGVYTKVANYFDWISYHVGRPFISQYNV

SEQ ID NO: 11628 - protein, 483 aa, Homo sapiens
MSYPQGYLYQPSASLALYSCPAYSTSVISGPRTDELGRSSSGSAFSPYAGSTAFTAPSPGYNSHLQYGADPAAAAAAAFSSYVGSPYDHTPGMAGSLGYHPYAAPLGSYPYGDPAYRKNATRDATATLKAWLNEHRKNPYPTKGEKIMLAIITKMTLTQVSTWFANARRRLKKENKMTWTPRNRSEDEEEEENIDLEKNDEDEPQKPEDKGDPEGPEAGGAEQKAASGCERLQGPPTPAGKETEGSLSDSDFKEPPSEGRLDALQGPPRTGGPSPAGPAAARLAEDPAPHYPAGAPAPGPHPAAGEVPPGPGGPSVIHSPPPPPPPAVLAKPKLWSLAEIATSSDKVKDGGGGNEGSPCPPCPGPIAGQALGGSRASPAPAPSRSPSAQCPFPGGTVLSRPLYYTAPFYPGYTNYGSFGHLHGHPGPGPGPTTGPGSHFNGLNQTVLNRADALAKDPKMLRSQSQLDLCKDSPYELKKGMSDI

SEQ ID NO: 11629 - protein, 591 aa, Homo sapiens
MNRFNGLCKVCSERRYRQITIPRGKDGFGFTICCDSPVRVQAVDSGGPAERAGLQQLDTVLQLNERPVEHWKCVELAHEIRSCPSEIILLVWRMVPQVKPGPDGGVLRRASCKSTHDLQSPPNKREKNCTHGVQARPEQRHSCHLVCDSSDGLLLGGWERYTEVAKRGGQHTLPALSRATAPTDPNYIILAPLNPGSQLLRPVYQEDTIPEESGSPSKGKSYTGLGKKSRLMKTVQTMKGHGNYQNCPVVRPHATHSSYGTYVTLAPKVLVFPVFVQPLDLCNPARTLLLSEELLLYEGRNKAAEVTLFAYSDLLLFTKEDEPGRCDVLRNPLYLQSVKLQEGSSEDLKFCVLYLAEKAECLFTLEAHSQEQKKRVCWCLSENIAKQQQLAASPPDSKMSGADTVGDDDEASRKRKSKNLAKDMKNKLGIFRRRNESPGAPPAGKADKMMKSFKPTSEEALKWGESLEKLLVHKYGLAVFQAFLRTEFSEENLEFWLACEDFKKVKSQSKMASKAKKIFAEYIAIQACKEVNLDSYTREHTKDNLQSVTRGCFDLAQKRIFGLMEKDSYPRFLRSDLYLDLINQKKMSPPL

SEQ ID NO: 11630 - protein, 631 aa, Homo sapiens
MDYSFDTTAEDPWVRISDCIKNLFSPIMSENHGHMPLQPNASLNEEEGTQGHPDGTPPKLDTANGTPKVYKSADSSTVKKGPPVAPKPAWFRQSLKGLRNRASDPRGLPDPALSTQPAPASREHLGSHIRASSSSSSIRQRISSFETFGSSQLPDKGAQRLSLQPSSGEAAKPLGKHEEGRFSGLLGRGAAPTLVPQQPEQVLSSGSPAASEARDPGVSESPPPGRQPNQKTLPPGPDPLLRLLSTQAEESQGPVLKMPSQRARSFPLTRSQSCETKLLDEKTSKLYSISSQVSSAVMKSLLCLPSSISCAQTPCIPKEGASPTSSSNEDSAANGSAETSALDTGFSLNLSELREYTEGLTEAKEDDDGDHSSLQSGQSVISLLSSEELKKLIEEVKVLDEATLKQLDGIHVTILHKEEGAGLGFSLAGGADLENKVITVHRVFPNGLASQEGTIQKGNEVLSINGKSLKGTTHHDALAILRQAREPRQAVIVTRKLTPEAMPDLNSSTDSAASASAASDVSVESTAEATVCTVTLEKMSAGLGFSLEGGKGSLHGDKPLTINRIFKGAASEQSETVQPGDEILQLGGTAMQGLTRFEAWNIIKALPDGPVTIVIRRKSLQSKETTAAGDS

SEQ ID NO: 11631 - protein, 456 aa, Homo sapiens
MASRSLGGLSGIRGGGGGGGKKSLSARNAAVERRNLITVCRFSVKTLIDRSCFETIDDSSPEFNNFAAILEQILSHRLKGQVTWFGYESPRSFWDYIRVACRKVSQNCICSIENMENVSSSRAKGRAWIRVALMEKHLSEYISTALRDFKTTRRFYEDGAIVLGEEANMLAGMLLGLNAIDFSFCLKGEGLDGSFPAVIDYTPYLKYIQSSDSISSDEEELRTLGSSGSESSTPENVGPPFLMDENSWFNKCKRVKQKYQLTLEQKGYLEELLRLRENQLSESVSQNKILLQRIEDSDLAHKLEKEQLEYIIVELQDQLTVLKNNDLRSRQELTAHLTNQWPSPGALDVNAVALDTLLYRKHNKQWYEKSYQSLDQLSAEVSLSQTSLDPGQSQEGDGKQDTLNVMSEGKEDTPSLLGLCGSLTSVASYKSLTSLKSNDYLASPTTEMTSPGLTPS

SEQ ID NO: 11632 - protein, 1331 aa, Homo sapiens
MESHSRAGKSRKSAKFRSISRSLMLCNAKTSDDGSSPDEKYPDPFEISLAQGKEGIFHSSVQLADTSEAGPSSVPDLALASEAAQLQAAGNDRGKTCRRIFFMKESSTASSREKPGKLEAQSSNFLFPKACHQRARSNSTSVNPYCTREIDFPMTKKSAAPTDRQPYSLCSNRKSLSQQLDCPAGKAAGTSRPTRSLSTAQLVQPSGGLQASVISNIVLMKGQAKGLGFSIVGGKDSIYGPIGIYVKTIFAGGAAAADGRLQEGDEILELNGESMAGLTHQDALQKFKQAKKGLLTLTVRTRLTAPPSLCSHLSPPLCRSLSSSTCITKDSSSFALESPSAPISTAKPNYRIMVEVSLQKEAGVGLGIGLCSVPYFQCISGIFVHTLSPGSVAHLDGRLRCGDEIVEISDSPVHCLTLNEVYTILSHCDPGPVPIIVSRHPDPQVSEQQLKEAVAQAVENTKFGKERHQWSLEGVKRLESSWHGRPTLEKEREKNSAPPHRRAQKVMIRSSSDSSYMSGSPGGSPGSGSAEKPSSDVDISTHSPSLPLAREPVVLSIASSRLPQESPPLPESRDSHPPLRLKKSFEILVRKPMSSKPKPPPRKYFKSDSDPQKSLEERENSSCSSGHTPPTCGQEARELLPLLLPQEDTAGRSPSASAGCPGPGIGPQTKSSTEGEPGWRRASPVTQTSPIKHPLLKRQARMDYSFDTTAEDPWVRISDCIKNLFSPIMSENHGHMPLQPNASLNEEEGTQGHPDGTPPKLDTANGTPKVYKSADSSTVKKGPPVAPKPAWFRQSLKGLRNRASDPRGLPDPALSTQPAPASREHLGSHIRASSSSSSIRQRISSFETFGSSQLPDKGAQRLSLQPSSGEAAKPLGKHEEGRFSGLLGRGAAPTLVPQQPEQVLSSGSPAASEARDPGVSESPPPGRQPNQKTLPPGPDPLLRLLSTQAEESQGPVLKMPSQRARSFPLTRSQSCETKLLDEKTSKLYSISSQVSSAVMKSLLCLPSSISCAQTPCIPKEGASPTSSSNEDSAANGSAETSALDTGFSLNLSELREYTEGLTEAKEDDDGDHSSLQSGQSVISLLSSEELKKLIEEVKVLDEATLKQLDGIHVTILHKEEGAGLGFSLAGGADLENKVITVHRVFPNGLASQEGTIQKGNEVLSINGKSLKGTTHHDALAILRQAREPRQAVIVTRKLTPEAMPDLNSSTDSAASASAASDVSVESTEATVCTVTLEKMSAGLGFSLEGGKGSLHGDKPLTINRIFKGAASEQSETVQPGDEILQLGGTAMQGLTRFEAWNIIKALPDGPVTIVIRRKSLQSKETTAAGDS

SEQ ID NO: 11633 - protein, 494 aa, Homo sapiens
MGRKKKKQLKPWCWYCNRDFDDEKILIQHQKAKHFKCHICHKKLYTGPGLAIHCMQVHKETIDAVPNAIPGRTDIELEIYGMEGIPEKDMDERRRLLEQKTQESQKKKQQDDSDEYDDDDSAASTSFQPQPVQPQQGYIPPMAQPGLPPVPGAPGMPPGIPPLMPGVPPLMPGMPPVMPGMPPGLHHQRKYTQSFCGENIMMPMGGMMPPGPGIPPLMPGMPPGMPPPVPRPGIPPMTQAQAVSAPGILNRPPAPTATVPAPQPPVTKPLFPSAGQMGTPVTSSSTASSNSESLSASSKALFPSTAQAQAAVQGPVGTDFKPLNSTPATTTEPPKPTFPAYTQSTASTTSTTNSTAAKPAASITSKPATLTTTSATSKLIHPDEDISLEERRAQLPKYQRNLPRPGQAPIGNPPVGPIGGMMPPQPGIPQQQGMRPPMPPHGQYGGHHQGMPGYLPGAMPPYGQGPPMVPPYQGGPPRPPMGMRPPVMSQGGRY

SEQ ID NO: 11634 - protein, 948 aa, Homo sapiens
MNLGDGLKLETELLDGKTKLILSPYEHKSKISVKMGNKAKIAKCPLRTKTGHILKSTQDTCIGSEKLLQKKPVGSETSQAKGEKNGMTFSSTKDLCKQCIDKDCLHIQKEISPATPNMQKTRNTVNTSLVGKQKPHKKHITAENMKSSLVCLTQDQLQQILMTVNQGNRSLSLTENGKEAKSQYSLYLNSISNQPKDENIMGLFKKTEMVSSVPAENKSVLNEHQETSKQCEQKIAIENEWKPADIFSTLGERECDRSSLEAKKAQWRKELDEQVALKKKEKEVSEKWNDPWKKSESDKIIWEKHQILDQSRETVLLEHPFSAVKQELQRKWIEELNKQIEDDRQRKIEEKIIYSKGEEHDRWAMHFDSLKSYPGSQSQLFSQSTHKQPEYFCVSPDTQELADVSSVCTPTTGSQVEPSEEEHIAKPIKDVVMANSKKTNFLRSMTALLDPAQIEERDRRRQKQLEHQKAITAQVEEKRRKKQLEEEQRKKEEQEEELRLAQEREEMQKQYEEDILKQKQKEEIMTLKTNELFQTMQRAQELAQRLKQEQRIRELAQKGHDTSRLIKNLGVDTIQMEYNASNISNSRHDSDEISGKMNTYMNSTTSKKDTGVQTDDLNIGIFTNAESHCGSLMERDITNCSSPEISAELIGQFSTKKNKQELTQDKGASLEKENNRCNDQCNQFTRIEKQTKHMKKYPKRPDWNINKPPKRYIPASEKYPKQLQKQREEKKVRRQMELLHLVEKNNPGHLSQNRGISPEIFHSSHQETESKLRWHLVKKEEEPLNIHSFSKERSPSSPVPVVKNRTQQTQNTLHLPLKNSSYERENLISGSNQTELSSGISESSHFIPYVRTNEIYYLDPDAPLSGPSTQDPQYQNSQDCGQKRQLFDSDCVRDPLLNPNMVKNRDRQQAILKGLSELRQGLLQKQKELESSLLPLAENQEESFGSSF

SEQ ID NO: 11635 - protein, 463 aa, Homo sapiens
MGRKKKKQLKPWCWYCNRDFDDEKILIQHQKAKHFKCHICHKKLYTGPGLAIHCMQVHKETIDAVPNAIPGRTDIELEIYGMEGIPEKDMDERRRLLEQKTQESQKKKQQDDSDEYDDDDSAASTSFQPQPVQPQQGYIPPMAQPGLPPVPGAPGMPPGIPPLMPGVPPLMPGMPPVMPGMPPGLHHQRKYTQSFCGENIMMPMGGMMPPGPGIPPLMPGMPPGMPPPVPRPGIPPMTQAQAVSAPGILNRPPAPTATVPAPQPPVTKPLFPSAGQAQAAVQGPVGTDFKPLNSTPATTTEPPKPTFPAYTQSTASTTSTTNSTAAKPAASITSKPATLTTTSATSKLIHPDEDISLEERRAQLPKYQRNLPRPGQAPIGNPPVGPIGGMMPPQPGIPQQQGMRPPMPPHGQYGGHHQGMPGYLPGAMPPYGQGPPMVPPYQGGPPRPPMGMRPPVMSQGGRY

SEQ ID NO: 11636 - protein, 198 aa, Homo sapiens
MQVHKETIDAVPNAIPGRTDIELEIYGMEGIPEKDMDERRRLLEQKTQESQKKKQQDDSDEYDDDDSAASTSFQPQPVQPQQGYIPPMAQPGLPPVPGAPGMPPGIPPLMPGVPPLMPGMPPVMPGMPPGLHHQRKYTQSFCGENIMMPMGGMMPPGPGIPPLMPGMPPGMPPPVPRPGIPPMTQAQAVSAPGILNRP

SEQ ID NO: 11637 - protein, 651 aa, Homo sapiens
MGKKHKKHKSDKHLYEEYVEKPLKLVLKVGGNEVTELSTGSSGHDSSLFEDKNDHDKHKDRKRKKRKKGEKQIPGEEKGRKRRRVKEDKKKRDRDRVENEAEKDLQCHAPVRLDLPPEKPLTSSLAKQEEVEQTPLQEALNQLMRQLQRKDPSAFFSFPVTDFIAPGYSMIIKHPMDFSTMKEKIKNNDYQSIEELKDNFKLMCTNAMIYNKPETIYYKAAKKLLHSGMKILSQERIQSLKQSIDFMADLQKTRKQKDGTDTSQSGEDGGCWQREREDSGDAEAHAFKSPSKENKKKDKDMLEDKFKSNNLEREQEQLDRIVKESGGKLTRRLVNSQCEFERRKPDGTTTLGLLHPVDPIVGEPGYCPVRLGMTTGRLQSGVNTLQGFKEDKRNKVTPVLYLNYGPYSSYAPHYDSTFANISKDDSDLIYSTYGEDSDLPSDFSIHEFLATCQDYPYVMADSLLDVLTKGGHSRTLQEMEMSLPEDEGHTRTLDTAKEMEITEVEPPGRLDSSTQDRLIALKAVTNFGVPVEVFDSEEAEIFQKKLDETTRLLRELQEAQNERLSTRPPPNMICLLGPSYREMHLAEQVTNNLKELAQQVTPGDIVSTYGVRKAMGISIPSPVMENNFVDLTEDTEEPKKTDVAECGPGGS

SEQ ID NO: 11638 - protein, 652 aa, Homo sapiens
MGKKHKKHKSDKHLYEEYVEKPLKLVLKVGGNEVTELSTGSSGHDSSLFEDKNDHDKHKDRKRKKRKKGEKQIPGEEKGRKRRRVKEDKKKRDRDRVENEAEKDLQCHAPVRLDLPPEKPLTSSLAKQEEVEQTPLQEALNQLMRQLQRKDPSAFFSFPVTDFIAPGYSMIIKHPMDFSTMKEKIKNNDYQSIEELKDNFKLMCTNAMIYNKPETIYYKAAKKLLHSGMKILSQERIQSLKQSIDFMADLQKTRKQKDGTDTSQSGEDGGCWQREREDSGDAEAHAFKSPSKENKKKDKDMLEDKFKSNNLEREQEQLDRIVKESGGKLTRRLVNSQCEFERRKPDGTTTLGLLHPVDPIVGEPGYCPVRLGMTTGRLQSGVNTLQGFKEDKRNKVTPVLYLNYGPYSSYAPHYDSTFANISKDDSDLIYSTYGEDSDLPSDFSIHEFLATCQDYPYVMADSLLDVLTKGGHSRTLQEMEMSLPEDEGHTRTLDTAKEMEQITEVEPPGRLDSSTQDRLIALKAVTNFGVPVEVFDSEEAEIFQKKLDETTRLLRELQEAQNERLSTRPPPNMICLLGPSYREMHLAEQVTNNLKELAQQVTPGDIVSTYGVRKAMGISIPSPVMENNFVDLTEDTEEPKKTDVAECGPGGS

SEQ ID NO: 11639 - protein, 1163 aa, Homo sapiens
MPVSTSLHQDGSQERPVSLTSTTSSSGSSCDSRSAMEEPSSSEAPAKNGAGSLRSRHLPNSNNNSSSWLNVKGPLSPFNSRAAAGPAHHKLSYLGRVVREIVETERMYVQDLRSIVESQEFDIYTQYCNNYPNSVAALTECMRDKQQAKFFRDRQELLQHSLPLGSYLLKPVQRILKYHLLLQEIAKHFDEEEDGFEVVEDAIDTMTCVAWYINDMKRRHEHAVRLQEIQSLLINWKGPDLTTYGELVLEGTFRVHRVRNERTFFLFDKTLLITKKRGDHFVYKGNIPCSSLMLIESTRDSLCFTVTHYKHSKQQYSIQAKTVEEKRNWTHHIKRLILENHHATIPQKAKEAILEMDSYYPNRYRCSPERLKKAWSSQDEVSTNVRQGRRQSEPTKHLLRQLNEKARAAGMKGKGRRESESSRSSRRPSGRSPTSTEKRMSFESISSLPEVEPDPEAGSEQEVFSAVEGPSAEETPSDTESPEVLETQLDAHQGLLGMDPPGDMVDFVAAESTEDLKALSSEEEEEMGGAAQEPESLLPPSVLDQASVIAERFVSSFSRRSSVAQEDSKSSGFGSPRLVSRSSSVLSLEGSEKGLARHGSATDSLSCQLSPEVDISVGVATEDSPSVNGMEPPSPGCPVEPDRSSCKKKESALSTRDRLLLDKIKSYYENAEHHDAGFSVRRRESLSYIPKGLVRNSISRFNSLPRPDPEPVPPVGSKRQVGSRPTSWALFELPGPSQAVKGDPPPISDAEFRPSSEIVKIWEGMESSGGSPGKGPGQGQANGFDLHEPLFILEEHELGAITEESATASPESSSPTEGRSPAHLARELKELVKELSSSTQGELVAPLHPRIVQLSHVMDSHVSERVKNKVYQLARQYSLRIKSNKPVMARPPLQWEKVAPERDGKSPTVPCLQEEAGEPLGGKGKRKPVLSLFDYEQLMAQEHSPPKPSSAGEMSPQRFFFNPSAVSQRTTSPGGRPSARSPLSPTETFSWPDVRELCSKYASRDEARRAGGGRPRGPPVNRSHSVPENMVEPPLSGRVGRCRSLSTKRGRGGGEAAQSPGPLPQSKPDGGETLYVTADLTLEDNRRVIVMEKGPLPSPTAGLEESSGQGPSSPVALLGQVQDFQQSAECQPKEEGSRDPADPSQQGRVRNLREKFQALNSVG

SEQ ID NO: 11640 - protein, 650 aa, Homo sapiens
MKKDVRILLVGEPRVGKTSLIMSLVSEEFPEEVPPRAEEITIPADVTPERVPTHIVDYSEAEQSDEQLHQEISQANVICIVYAVNNKHSIDKVTSRWIPLINERTDKDSRLPLILVGNKSDLVEYSSMETILPIMNQYTEIETCVECSAKNLKNISELFYYAQKAVLHPTGPLYCPEEKEMKPACIKALTRIFKISDQDNDGTLNDAELNFFQRICFNTPLAPQALEDVKNVVRKHISDGVADSGLTLKGFLFLHTLFIQRGRHETTWTVLRRFGYDDDLDLTPEYLFPLLKIPPDCTTELNHHAYLFLQSTFDKHDLDRDCALSPDELKDLFKVFPYIPWGPDVNNTVCTNERGWITYQGFLSQWTLTTYLDVQRCLEYLGYLGYSILTEQESQASAVTVTRDKKIDLQKKQTQRNVFRCNVIGVKNCGKSGVLQALLGRNLMRQKKIREDHKSYYAINTVYVYGQEKYLLLHDISESEFLTEAEIICDVVCLVYDVSNPKSFEYCARIFKQHFMDSRIPCLIVAAKSDLHEVKQEYSISPTDFCRKHKMPPPQAFTCNTADAPSKDIFVKLTTMAMYPEDHYRDRLSRDMGHTDRIENLRKIWVFLKTALHVTQADLKSSTFWLRASFGATVFAVLGFAMYKALLKQR

SEQ ID NO: 11641 - protein, 540 aa, Homo sapiens
MNSTGHLQDAPNATSLHVPHSQEGNSTSLQEGLQDLIHTATLVTCTFLLAVIFCLGSYGNFIVFLSFFDPAFRKFRTNFDFMILNLSFCDLFICGVTAPMFTFVLFFSSASSIPDAFCFTFHLTSSGFIIMSLKTVAVIALHRLRMVLGKQPNRTASFPCTVLLTLLLWATSFTLATLATLKTSKSHLCLPMSSLIAGKGKAILSLYVVDFTFCVAVVSVSYIMIAQTLRKNAQVRKCPPVITVDASRPQPFMGVPVQGGGDPIQCAMPALYRNQNYNKLQHVQTRGYTKSPNQLVTPAASRLQLVSAINLSTAKDSKAVVTCVIIVLSVLVCCLPLGISLVQVVLSSNGSFILYQFELFGFTLIFFKSGLNPFIYSRNSAGLRRKVLWCLQYIGLGFFCCKQKTRLRAMGKGNLEVNRNKSSHHETNSAYMLSPKPQKKFVDQACGPSHSKESMVSPKISAGHQHCGQSSSTPINTRIEPYYSIYNSSPSQEESSPCNLQPVNSFGFANSYIAMHYHTTNDLVQEYDSTSAKQIPVPSV

SEQ ID NO: 11642 - protein, 546 aa, Homo sapiens
MKAIKKSLTEEEYLYLDFSHQTEGCIFPLHTSVTLFLLSYCDCKIFKICLVVTKEVSQWTRLCELTIPLAIENFLRESSDQPPTIPVEILQLEKKLSEPVRVHNDDKLRRQKLKQQKADGVGPPLTKGKAKSKVHTQETSEGLDSSSKSLELKVAFSKLTVQEEPATTNREPSHIRKAKASDLPPLEHVFAEGLYFTLADIVLLPCIHHFLVIISRKFSEKLVEFPLLASWYQRIQEVPGVKTAASKCGIQFLHLPKLLTTSTEQHPNLCEVPGVEEQSDPLFIGGPRPTMAKLMEKGIEVMFSPHPCPTWTLDWNVLPAAVSPKEGKMSSDRALRKQQQLNNLVYVVTNQAKPGDRIVDFCSGGGHVGIVLAHMLPSCQVTLIENKELSLIRAKKRSDELGLSNIWFIQANMEYFTGMFNIGVALHACGVATDMVIEHCIKTRASFVTCPCCYGFIQNTSKFNFPKSEQFKKTLSYKEHMILCRFADQTAVQLPPQRRLIGKQCMCLVDLDRARAAEECGYSVQVISMEPESCSPKNNMIVGVPI

SEQ ID NO: 11643 - protein, 535 aa, Homo sapiens
MRTPPALGSQGSEVTGPTFADGELIPREPGFFPEDEEEAMTLAPPEGPQELYTDSPMESTQSLEGSVGSPAEKDGGLGGLFLPEDKSLVHTPSMTTSDLSTHSTTSLISNEEQFEDYGEGDDVDCAPSSPCPDDETRTNVYSDLGSSVSSSAGQTPRKMRHVYNSELLDVYCSQCCKKINLLNDLEARLKNLKANSPNRKISSTAFGRQLMHSSNFSSSNGSTEDLFRDSIDSCDNDITEKVSFLEKKVTELENDSLTNGDLKSKLKQENTQLVHRVHELEEMVKDQETTAEQALEEEARRHREAYGKLEREKATEVELLNARVQQLEEENTELRTTVTRLKSQTEKLDEERQRMSDRLEDTSLRLKDEMDLYKRMMDKLRQNRLEFQKEREATQELIEDLRKELEHLQMYKLDCERPGRGRSASSGLGEFNARAREVELEHEVKRLKQENYKLRDQNDDLNGQILSLSLYEAKNLFAAQTKAQSLAAEIDTASRDELMEALKEQEEINFRLRQYMDKIILAILDHNPSILEIKH

SEQ ID NO: 11644 - protein, 489 aa, Homo sapiens
MYSAMSPFSKATLDTSKLYVSSSFTNKIPDEGDTTPEKPEDPSALSKQSSEVSMREESDIDQNQSDDGDTETSPTKSPTTPKSVKNKNSSEFPLFSYNNGVVMTSCRELDNNRSALSAASAFAIATAGANEGTPNKEKYRRMSLASAGFPPDQRNGDKEFVIRRAATNRVLNVLRHWVSKHSQDFETNDELKCKVIGFLEEVMHDPELLTQERKAAANIIRTLTQEDPGDNQITLEEITQMAEGVKAEPFENHSALEIAEQLTLLDHLVFKKIPYEEFFGQGWMKLEKNERTPYIMKTTKHFNDISNLIASEIIRNEDINARVSAIEKWVAVADICRCLHNYNAVLEITSSMNRSAIFRLKKTWLKVSKQTKALIDKLQKLVSSEGRFKNLREALKNCDPPCVPYLGMYLTDLAFIEEGTPNYTEDGLVNFSKMRMISHIIREIRQFQQTAYKIEHQAKVTQYLLDQSFVMDEESLYESSLRIEPKLPT

SEQ ID NO: 11645 - protein, 1135 aa, Homo sapiens
MCSTNPGKWVTFDDDPAVQSSQKSKNFPLENQGVCRPNGLKLNLPGLREFPSGSSSTSSTPLSSPIVDFYFSPGPPSNSPLSTPTKDFPGFPGIPKAGTHVLYPIPESSSDSPLAISGGESSLLPTRPTCLSHALLPSDHSCTHPTPKVGLPDEVNPQQAESLGFQSDDLPQFQYFREDCAFSSPFWKDEGSDSHFTLDPPGSKKMFSSRNKEMPIDQKSLNKCSLNYICEKLEHLQSAENQDSLRSLSMHCLCAEENASSFVPHTLFRSQPKSGWSFMLRIPEKKNMMSSRQWGPIFLKVLPGGILQMYYEQGLEKPFKEIQLDPYCRLSEPKVENFSVAGKIHTVKIEHVSYTEKRKYHSKTEVVHEPDIEQMLKLGSTSYHDFLDFLTTVEEELMKLPAVSKPKKNYEEQEISLEIVDNFWGKVTKEGKFVESAVITQIYCLCFVNGNLECFLTLNDLELPKRDESYYEKDSEKKGIDILDYHFHKCVNVQEFEQSRIIKFVPLDACRFELMRFKTLYNGDNLPFSLKSVVVVQGAYVELQAFVNMASLAQRSSYAGSLRSCDNIRIHFPVPSQWIKALWTMNLQRQKSLKAKMNRRACLGSLQELESEPVIQVTVGSAKYESAYQAVVWKIDRLPDKNSSLDHPHCLSYKLELGSDQEIPSDWYPFATVQFSVPDTCASRTEVRSLGVESDVQPQKHVQQRACYNIQPKLYRSVIEDVIEGVRNLFAEEGIEEQVLKDLKQLWETKVLQSKATEDFFRNSIQSPLFTLQLPHSLHQTLQSSTGHLYKVNVPIMVTETSGRAGILQHPIQQVFQQLGQPSVIQTSVPQLNPWSLQATTEKSQRIETVLQQPAILPSGPVDRKHLENATSDILVSPGNEHKIVPEALLCHQESSHYISLPGVVFSPQVSQTNSNVESVLSGSASMAQNLHDESLSTSPHGALHQHVTDIQLHILKNRMYGCDSVKQPRNIEEPSNIPVSEKDSNSQVDLSIRVTDDDIGEIIQVDGSGDTSSNEEIGSTRDADENEFLGNIDGGDLKVPEEEADSISNEDSATNSSDNEDPQVNIVEEDPLNSGDDVSEQDVPDLFDTDNVIVCQYDKIHRSKNKWKFYLKDGVMCFGGRDYVFAKAIGDAEW

SEQ ID NO: 11646 - protein, 866 aa, Homo sapiens
MNGEQQLDADAGSGMEEVELSWEDYLEETGSTAVPYGSFKHVDTRLQNGFAPGMKLEVAVRTDPETYWVATVITTCEQLLLLRYDGYGEDRRADFWCDIRKADLYPIGWCEQNKKTLEAPEGIRDKVSDWDEFLRQTLIGACSPPVPLLEGLRNGRNPLDLIAPGSRLECQAFQDSLSTWIVTVVENIGGRLKLRYEGLESSDNYEHWLYYLDPFLHHVGWAAQQGYELQPPSAIRHLKNEAEWQEILAKVKEEEEEPLPSYLFKDKQVIGIHTFSVNMKLEAVDPWSPFGISPATVVKVFDEKYFLVEMDDLRPENHARRSFVCHADSPGIFPVQWSLKNGLHISPPPGYPSQDFDWADYLKQCGAEAAPQRCFPPLISEHEFKENMKLEAVNPILPEEVCVATITAVRGSYLWLQLEGSKKPIPECIVSVESMDIFPLGWCETNGHPLSTPRRARVYKQRKIAVVQPEKQVPSSRTVHEGLRNQELNSTESVMINGKYCCPKIYFNHRCFSGPYLNKGRIAELPQCVGPGNCVLVLREVLTLLINAAYKPSRVLRELQLDKDSVWHGCGEVLKAKYKGKSYRATVEIVKTADRVTEFCRQTCIKLECCPNLFGPRMVLDKCSENCSVLTKTKYTHYYGKKKNKRIGRPPGGHSNLACALKKASKRRKRRKNVFVHKKKRSSASVDNTPAGSPQGSGGEDEDDPDEGDDDSLSEGSTSEQQDELQEESEMSEKKSCSSSPTQSEISTSLPPDRQRRKRELRTFSFSDDENKPPSPKEIRIEVAERLHLDSNPLKWSVADVVRFIRSTDCAPLARIFLDQEIDGQALLLLTLPTVQECMDLKLGPAIKLCHHIERIKFAFYEQFAN

SEQ ID NO: 11647 - protein, 1182 aa, Homo sapiens
MCSTNPGKWVTFDDDPAVQSSQKSKNFPLENQGVCRPNGLKLNLPGLREFPSGSSSTSSTPLSSPIVDFYFSPGPPSNSPLSTPTKDFPGFPGIPKAGTHVLYPIPESSSDSPLAISGGESSLLPTRPTCLSHALLPSDHSCTHPTPKVGLPDEVNPQQAESLGFQSDDLPQFQYFREDCAFSSPFWKDEGSDSHFTLDPPGSKKMFSSRNKEMPIDQKSLNKCSLNYICEKLEHLQSAENQDSLRSLSMHCLCAEENASSFVPHTLFRSQPKSGWSFMLRIPEKKNMMSSRQWGPIFLKVLPGGILQMYYEQGLEKPFKEIQLDPYCRLSEPKVENFSVAGKIHTVKIEHVSYTEKRKYHSKTEVVHEPDIEQMLKLGSTSYHDFLDFLTTVEEELMKLPAVSKPKKNYEEQEISLEIVDNFWGKVTKEGKFVESAVITQIYCLCFVNGNLECFLTLNDLELPKRDESYYEKDSEKKGIDILDYHFHKCVNVQEFEQSRIIKFVPLDACRFELMRFKTLYNGDNLPFSLKSVVVVQGAYVELQAFVNMASLAQRSSYAGSLRSCDNIRIHFPVPSQWIKALWTMNLQRQKSLKAKMNRRACLGSLQELESEPVIQVTVGSAKYESAYQAVVWKIDRLPDKNSSLDHPHCLSYKLELGSDQEIPSDWYPFATVQFSVPDTCASRTEVRSLGVESDVQPQKHVQQRACYNIQPKLYRSVIEDVIEGVRNLFAEEGIEEQVLKDLKQLWETKVLQSKATEDFFRNSIQSPLFTLQLPHSLHQTLQSSTASLVIPAGRTLPSFTTAELGTSNSSANFTFPGYPIHVPAGVTLQTVSGHLYKVNVPIMVTETSGRAGILQHPIQQVFQQLGQPSVIQTSVPQLNPWSLQATTEKSQRIETVLQQPAILPSGPVDRKHLENATSDILVSPGNEHKIVPEALLCHQESSHYISLPGVVFSPQVSQTNSNVESVLSGSASMAQNLHDESLSTSPHGALHQHVTDIQLHILKNRMYGCDSVKQPRNIEEPSNIPVSEKDSNSQVDLSIRVTDDDIGEIIQVDGSGDTSSNEEIGSTRDADENEFLGNIDGGDLKVPEEEADSISNEDSATNSSDNEDPQVNIVEEDPLNSGDDVSEQDVPDLFDTDNVIVCQYDKIHRSKNKWKFYLKDGVMCFGGRDYVFAKAIGDAEW

SEQ ID NO: 11648 - protein, 539 aa, Homo sapiens
MATTATCTRFTDDYQLFEELGKGAFSVVRRCVKKTSTQEYAAKIINTKKLSARDHQKLEREARICRLLKHPNIVRLHDSISEEGFHYLVFDLVTGGELFEDIVAREYYSEADASHCIHQILESVNHIHQHDIVHRDLKPENLLLASKCKGAAVKLADFGLAIEVQGEQQAWFGFAGTPGYLSPEVLRKDPYGKPVDIWACGVILYILLVGYPPFWDEDQHKLYQQIKAGAYDFPSPEWDTVTPEAKNLINQMLTINPAKRITADQALKHPWVCQRSTVASMMHRQETVECLRKFNARRKLKGAILTTMLVSRNFSVGRQSSAPASPAASAAGLAGQAAKSLLNKKSDGGVKPQSNNKNSLVSPAQEPAPLQTAMEPQTTVVHNATDGIKGSTESCNTTTEDEDLKVRKQEIIKITEQLIEAINNGDFEAYTKICDPGLTSFEPEALGNLVEGMDFHKFYFENLLSKNSKPIHTTILNPHVHVIGEDAACIAYIRLTQYIDGQGRPRTSQSEETRVWHRRDGKWLNVHYHCSGAPAAPLQ

SEQ ID NO: 11649 - protein, 896 aa, Homo sapiens
MDGAAGPGDGPAREALQSLSQRLRVQEQEMELVKAALAEALRLLRLQVPPSSLQGSGTPAPPGDSLAAPPGLPPTCTPSLVSRGTQTETEVELKSSPGPPGLSNGPPAPQGASEEPSGTQSEGGGSSSSGAGSPGPPGILRPLQPPQRADTPRRNSSSSSSPSERPRQKLSRKAISSANLLVRSGSTESRGGKDPLSSPGGPGSRRSNYNLEGISVKMFLRGRPITMYIPSGIRSLEELPSGPPPETLSLDWVYGYRGRDSRSNLFVLRSGEVVYFIACVVVLYRPGGGPGGPGGGGQRHYRGHTDCVRCLAVHPDGVRVASGQTAGVDKDGKPLQPVVHIWDSETLLKLQEIGLGAFERGVGALAFSAADQGAFLCVVDDSNEHMLSVWDCSRGMKLAEIKSTNDSVLAVGFNPRDSSCIVTSGKSHVHFWNWSGGVGVPGNGTLTRKQGVFGKYKKPKFIPCFVFLPDGDILTGDSEGNILTWGRSPSDSKTPGRGGAKETYGIVAQAHAHEGSIFALCLRRDGTVLSGGGRDRRLVQWGPGLVALQEAEIPEHFGAVRAIAEGLGSELLVGTTKNALLRGDLAQGFSPVIQGHTDELWGLCTHPSQNRFLTCGHDRQLCLWDGESHALAWSIDLKETGLCADFHPSGAVVAVGLNTGRWLVLDTETREIVSDVIDGNEQLSVVRYSPDGLYLAIGSHDNVIYIYSVSSDGAKSSRFGRCMGHSSFITHLDWSKDGNFIMSNSGDYEILYWDVAGGCKQLKNRYESRDREWATYTCVLGFHVYGVWPDGSDGTDINSLCRSHNERVVAVADDFCKVHLFQYPCARAKAPSRMYGGHGSHVTSVRFTHDDSHLVSLGGKDASIFQWRVLGAGGAGPAPATPSRTPSLSPASSLDV

SEQ ID NO: 11650 - protein, 910 aa, Homo sapiens
DGPAREALQSLSQRLRVQEQEMELVKAALAEALRLLRLQVPPSSLQGSGTPAPPGDSSLAAPPGLPPTCTPSLVSRGTQTETEVELKSSPGPPGLSNGPPAPQGASEEPSGTQSEGGGSSSSGAGSPGPPGILRPLQPPQRADTPRRNSSSSSSPSERPRQKLSRKAISSANLLVRSGSTESRGGKDPLSSPGGPGSRRSNYNLEGISVKMFLRGRPITMYIPSGIRSLEELPSGPPPETLSLDWVYGYRGRDSRSNLFVLRSGEVVYFIACVVVLYRPGGGPGGPGGGGQRHYRGHTDCVRCLAVHPDGVRVASGQTAGVDKDGKPLQPVVHIWDSETLLKLQEIGLGAFERGVGALAFSAADQGAFLCVVDDSNEHMLSVWDCSRGMKLAEIKSTNDSVLAVGFNPRDSSCIVTSGKSHVHFWNWSGGVGVPGNGTLTRKQGVFGKYKKPKFIPCFVFLPDGDILTGDSEGNILTWGRSPSDSKTPGRGGAKETYGIVAQAHAHEGSIFALCLRRDGTVLSGGGRDRRLVQWGPGLVALQEAEIPEHFGAVRAIAEGLGSELLVGTTKNALLRGDLAQGFSPVIQGHTDELWGLCTHPSQNRFLTCGHDRQLCLWDGESHALAWSIDLKETGLCADFHPSGAVVAVGLNTGRWLVLDTETREIVSDVIDGNEQLSVVRYSPDGLYLAIGSHDNVIYIYSVSSDGAKSSRFGRCMGHSSFITHLDWSKDGNFIMSNSGDYEILYWDVAGGCKQLKNRYESRDREWATYTCVLGFHVYVPVRSCQGAEPHVRGPRQPRDQRPIHARRLAPRLAGRQGRQHLPVASAGRWGRGAGARHALSNPLPVPRLLPRRLIAAWRDRLARRRGPAPPCPSLAQSPTTRGRLFPGLTSRHSRSRIFLEGANGAPAHTV

SEQ ID NO: 11651 - protein, 1370 aa, Homo sapiens
MSETLGDELEILRGKMMQRRPRSAEVKYFYFFKILLRLRLAILKYLFIDDKGILFVSSRKHLPTLPTLLSRLKLFLVKDPLLDFKGQIFTEANFSRECFSLQETLEAFVKEDFCMDKVNFCQEKLEDTICLNEPSSFLIEYEFLIPPSLKPEIDIPSLSELKELLNPVPEIINYVDEKEKLFERDLTNKHGIEDIGDIKFSSTEILTIQSQSEPEECSKPGELEMPLTPLFLTCQHSSVNSLRTELQTFPLSPVCKINLLTAEESANEYYMMWQLERCRSPLNPFLLTVPRIQEPHSQYSVTDLKKIFSVKEESLVINLEKAEWWKQAGLNLKMMETLEHLNTYLCHDNLSSNDTKIEIFLPTKVLQLESCLEHKSHSSPIALIDEKSTNAHLSLPQKSPSLAKEVPDLCFSDDYFSDKGAAKEEKPKNDQEPVNRIIQKKENNDHFELDCTGPSIKSPSSSIIKKASFEHGKKQENDLDLLSDFIMLRNKYKTCTSKTEVTNSDEKHDKEACSLTLQEESPIVHINKTLEEINQERGTDSVIEIQASDSQCQAFCLLEAAASPILKNLVSLCTLPTANWKFATVIFDQTRFLLKEQEKVVSDAVRQGYLSKAKDIYNSILGPYLGDIWRQLEIVQFIRGKKPETNYKIQELQCQILSWMQSQQQIKVLIIIRMDSDGEKHFLIKILNKIEGLTLTVLHSNERKDFLESEGVLRGTSSCVVVHNQYIGADFPWSNFSFVVEYNYVEDSCWTKHCKELNIPYMAFKVILPDTVLERSTLLDRFGGFLLEIQIPYVFFASEGLLNTPDILQLLESNYNISLVERGCSESLKLFGSSECYVVVTIDEHTAIILQDLEELNYEKASDNIIMRLMALSLQYRYCWIILYTKETLNSEYLLTEKTLHHLALIYAALVSFGLNSEELDVKLIIAPGVEATALIIRQIADHSLMTSKRDPHEWLDKSWLKVSPSEEEMYLLDFPCINPLVAQLMLNKGPSLHWILLATLCQLQELLPEVPEKVLKHFCSITSLFKIGSSSITKSPQISSPQENRNQISTLSSQSSASDLDSVIQEHNEYYQYLGLGETVQEDKTTILNDNSSIMELKEISSFLPPVTSYNQTSYWKDSSCKSNIGQNTPFLINIESRRPAYNSFLNHSDSESDVFSLGLTQMNCETIKSPTDTQKRVSVVPRFINSQKRRTHEAKGFINKDVSDPIFSLEGTQSPLHWNFKKNIWEQENHPFNLQYGAQQTACNKLYSQKGNLFTDQQKCLSDESEGLTCESSKDETFWRELPSVPSLDLFRASDSNANQKEFNSLYFYQRAGKSLGQKRHHESSFNSGDKESLTGFMCSQLPQFKKRRLAYEKVPGRVDGQTRLRFF

SEQ ID NO: 11652 - protein, 1405 aa, Homo sapiens
MSETLGDELEILRGKMMQRRPRSAEVKYFYFFKILLRLRLAILKYLFIDDKGILFVSSRKHLPTLPTLLSRLKLFLVKDPLLDFKGQIFTEANFSRECFSLQETLEAFVKEDFCMDKVNFCQEKLEDTICLNEPSSFLIEYEFLIPPSLKPEIDIPSLSELKELLNPVPEIINYVDEKEKLFERDLTNKHGIEDIGDIKFSSTEILTIQSQSEPEECSKPGELEMPLTPLFLTCQHSSVNSLRTELQTFPLSPVCKINLLTAEESANEYYMMWQLERCRSPLNPFLLTVPRIQEPHSQYSVTDLKKIFSVKEESLVINLEKAEWWKQAGLNLKMMETLEHLNTYLCHDNLSSNDTKIEIFLPTKVLQLESCLEHKSHSSPIALIDEKSTNAHLSLPQKSPSLAKEVPDLCFSDDYFSDKGAAKEEKPKNDQEPVNRIIQKKENNDHFELDCTGPSIKSPSSSIIKKASFEHGKKQENDLDLLSDFIMLRNKYKTCTSKTEVTNSDEKHDKEACSLTLQEESPIVHINKTLEEINQERGTDSVIEIQASDSQCQAFCLLEAAASPILKNLVSLCTLPTANWKFATVIFDQTRFLLKEQEKVVSDAVRQGTIDEREMTFKHAALLHLLVTIRDVLLTCSLDTALGYLSKAKDIYNSILGPYLGDIWRQLEIVQFIRGKKPETNYKIQELQCQILSWMQSQQQIKVLIIIRMDSDGEKHFLIKILNKIEGLTLTVLHSNERKDFLESEGVLRGTSSCVVVHNQYIGADFPWSNFSFVVEYNYVEDSCWTKHCKELNIPYMAFKVILPDTVLERSTLLDRFGGFLLEIQIPYVFFASEGLLNTPDILQLLESNYNISLVERGCSESLKLFGSSECYVVVTIDEHTAIILQDLEELNYEKASDNIIMRLMALSLQYRYCWIILYTKETLNSEYLLTEKTLHHLALIYAALVSFGLNSEELDVKLIIAPGVEATALIIRQIADHSLMTSKRDPHEWLDKSWLKVSPSEEEMYLLDFPCINPLVAQLMLNKGPSLHWILLATLCQLQELLPEVPEKVLKHFCSITSLFKIGSSSITKSPQISSPQENRNQISTLSSQSSASDLDSVIQEHNEYYQYLGLGETVQEDKTTILNDNSSIMELKEISSFLPPVTSYNQTSYWKDSSCKSNIGQNTPFLINIESRRPAYNSFLNHSDSESDVFSLGLTQMNCETIKSPTDTQKRVSVVPRFINSQKRRTHEAKGFINKDVSDPIFSLEGTQSPLHWNFKKNIWEQENHPFNLQYGAQQTACNKLYSQKGNLFTDQQKCLSDESEGLTCESSKDETFWRELPSVPSLDLFRASDSNANQKEFNSLYFYQRAGKSLGQKRHHESSFNSGDKESLTGFMCSQLPQFKKRRLAYEKVPGRVDGQTRLRFF

SEQ ID NO: 11653 - protein, 1137 aa, Homo sapiens
MKCVFVTVGTTSFDDLIACVSAPDSLQKIESLGYNRLILQIGRGTVVPEPFSTESFTLDVYRYKDSLKEDIQKADLVISHAGAGSCLETLEKGKPLVVVINEKLMNNHQLELAKQLHKEGHLFYCTCRVLTCPGQAKSIASAPGKCQDSAALTSTAFSGLDFGLLSGYLHKQALVTATHPTCTLLFPSCHAFFPLPLTPTLYKMHKGWKNYCSQKSLNEASMDEYLGSLGLFRKLTAKDASCLFRAISEQLFCSQVHHLEIRKACVSYMRENQQTFESYVEGSFEKYLERLGDPKESAGQLEIRALSLIYNRDFILYRFPGKPPTYVTDNGYEDKILLCYSSSGHYDSVYSKQFQSSAAVCQAVLYEILYKDVFVVDEEELKTAIKLFRSGSKKNRNNAVTGSEDAHTDYKSSNQNRMEEWGACYNAENIPEGYNKGTEETKSPENPSKMPFPYKVLKALDPEIYRNVEFDVWLDSRKELQKSDYMEYAGRQYYLGDKCQVCLESEGRYYNAHIQEVGNENNSVTVFIEELAEKHVVPLANLKPVTQVMSVPAWNAMPSRKGRGYQKMPGGYVPEIVISEMDIKQQKKMFKKIRGKEVYMTMAYGKGDPLLPPRLQHSMHYGHDPPMHYSQTAGNVMSNEHFHPQHPSPRQGRGYGMPRNSSRFINRHNMPGPKVDFYPGPGKRCCQSYDNFSYRSRSFRRSHRQMSCVNKESQYGFTPGNGQMPRGLEETITFYEVEEGDETAYPTLPNHGGPSTMVPATSGYCVGRRGHSSGKQTLNLEEGNGQSENGRYHEEYLYRAEPDYETSGVYSTTASTANLSLQDRKSCSMSPQDTVTSYNYPQKMMGNIAAVAASCANNVPAPVLSNGAAANQAISTTSVSSQNAIQPLFVSPPTHGRPVIASPSYPCHSAIPHAGASLPPPPPPPPPPPPPPPPPPPPPPPPPPPALDVGETSNLQPPPPLPPPPYSCDPSGSDLPQDTKVLQYYFNLGLQCYYHSYWHSMVYVPQMQQQLHVENYPVYTEPPLVDQTVPQCYSEVRREDGIQAEASANDTFPNADSSSVPHGAVYYPVMSDPYGQPPLPGFDSCLPVVPDYSCVPPWHPVGTAYGGSSQIHGAINPGPIGCIAPSPPASHYVPQGM

SEQ ID NO: 11654 - protein, 456 aa, Homo sapiens
MRKKWKMGGMKYIFSLLFFLLLEGGKTEQVKHSETYCMFQDKKYRVGERWHPYLEPYGLVYCVNCICSENGNVLCSRVRCPNVHCLSPVHIPHLCCPRCPDSLPPVNNKVTSKSCEYNGTTYQHGELFVAEGLFQNRQPNQCTQCSCSEGNVYCGLKTCPKLTCAFPVSVPDSCCRVCRGDGELSWEHSDGDIFRQPANREARHSYHRSHYDPPPSRQAGGLSRFPGARSHRGALMDSQQASGTIVQIVINNKHKHGQVCVSNGKTYSHGESWHPNLRAFGIVECVLCTCNVTKQECKKIHCPNRYPCKYPQKIDGKCCKVCPGKKAKELPGQSFDNKGYFCGEETMPVYESVFMEDGETTRKIALETERPPQVEVHVWTIRKGILQHFHIEKISKRMFEELPHFKLVTRTTLSQWKIFTEGEAQISQMCSSRVCRTELEDLVKVLYLERSEKGHC

SEQ ID NO: 11655 - protein, 537 aa, Homo sapiens
MTCHKRYKIQKKVREHHRKLRKEAKKRGHKKPRKDPGVPNSAPFKEALLREAELRKQRLEELKQQQKLDRQKELEKKRKLETNPDIKPSNVEPMEKEFGLCKTENKAKSGKQNSKKLYCQELKKVIEASDVVLEVLDARDPLGCRCPQVEEAIVQSGQKKLVLILNKSDLVPKENLESWLNYLKKELPTVVFRASTKPKDKGKITKRVKAKKNAAPFRSEVCFGKEGLWKLLGGFQETCSKAIRVGVIGFPNVGKSSIINSLKQEQMCNVGVSMGLTRSMQVVPLDKQITIIDSPSFIVSPLNSSSALALRSPASIEVVKPMEAASAILSQADARQVVLKYTVPGYRNSLEFFTVLAQRRGMHQKGGIPNVEGAAKLLWSEWTGASLAYYCHPPTSWTPPPYFNESIVVDMKSGFNLEELEKNNAQSIRAIKGPHLANSILFQSSGLTNGIIEEKDIHEELPKRKERKQEEREDDKDSDQETVDEEVDENSSGMFAAEETGEALSEETTAGEQSTRSFILDKIIEEDDAYDFSTDYV

SEQ ID NO: 11656 - protein, 895 aa, Homo sapiens
MSKSFQQSSLSRDSQGHGRDLSAAGIGLLAAATQSLSMPASLGRMNQGTARLASLMNLGMSSSLNQQGAHSALSSASTSSHNLQSIFNIGSRGPLPLSSQHRGDADQASNILASFGLSARDLDELSRYPEDKITPENLPQILLQLKRRRTEEGPTLSYGRDGRSATREPPYRVPRDDWEEKRHFRRDSFDDRGPSLNPVLDYDHGSRSQESGYYDRMDYEDDRLRDGERCRDDSFFGETSHNYHKFDSEYERMGRGPGPLQERSLFEKKRGAPPSSNIEDFHGLLPKGYPHLCSICDLPVHSNKEWSQHINGASHSRRCQLLLEIYPEWNPDNDTGHTMGDPFMLQQSTNPAPGILGPPPPSFHLGGPAVGPRGNLGAGNGNLQGPRHMQKGRVETSRVVHIMDFQRGKNLRYQLLQLVEPFGVISNHLILNKINEAFIEMATTEDAQAAVDYYTTTPALVFGKPVRVHLSQKYKRIKKPEGKPDQKFDQKQELGRVIHLSNLPHSGYSDSAVLKLAEPYGKIKNYILMRMKSQAFIEMETREDAMAMVDHCLKKALWFQGRCVKVDLSEKYKKLVLRIPNRGIDLLKKDKSRKRSYSPDGKESPSDKKSKTDGSQKTESSTEGKEQEEKSGEDGEKDTKDDQTEQEPNMLLESEDELLVDEEEAAALLESGSSVGDETDLANLGDVASDGKKEPSDKAVKKDGSASAAAKKKLKKRRFPGSMEGFVTLDEVGDEEDSELQKLRKSGMAFKSGDKNDDGLVEIKVDKIEELDQENEAALENGIKNEENTEPGAESSENADDPNKDTSENADGQSDENKDDYTIPDEYRIGPYQPNVPVGIDYVIPKTGFYCKLCSLFYTNEEVAKNTHCSSLPHYQKLKKFLNKLAEERRQKKET

SEQ ID NO: 11657 - protein, 181 aa, Homo sapiens
RPVEHLNDKIKIKFGLAISQLVDVDEKNQLMTTNVWLKQEWIDVKLRWNPDDYGGIKVIRVPSDSVWTPDIVLFDNADGRFEGTSTKTVIRYNGTVTWTPPANYKSSCTIDVTFFPFDLQNCSMKFGSWTYDGSQVDIILEDQDVDKRDFFDNGEWEIVSATGSKGNRTDSCCWLLKIGNS

SEQ ID NO: 11658 - protein, 819 aa, Homo sapiens
MSGTSKESLGHGGLPGLGKTCLTTMDTKLNMLNEKVDQLLHFQEDVTEKLQSMCRDMGHLERGLHRLEASRAPGPGGADGVPHIDTQAGWPEVLELVRAMQQDAAQHGARLEALFRMVAAVDRAIALVGATFQKSKVADFLMQGRVPWRRGSPGDSPEENKERVEEEGGKPKHVLSTSGVQSDAREPGEESQKADVLEGTAERLPPIRASGLGADPAQAVVSPGQGDGVPGPAQAFPGHLPLPTKVEAKAPETPSENLRTGLELAPAPGRVNVVSPSLEVAPGAGQGASSSRPDPEPLEEGTRLTPGPGPQCPGPPGLPAQARATHSGGETPPRISIHIQEMDTPGEMLMTGRGSLGPTLTTEAPAAAQPGKQGPPGTGRCLQAPGTEPGEQTPEGARELSPLQESSSPGGVKAEEEQRAGAEPGTRPSLARSDDNDHEVGALGLQQGKSPGAGNPEPEQDCAARAPVRAEAVRRMPPGAEAGSVVLDDSPAPPAPFEHRVVSVKETSISAGYEVCQHEVLGGGRFGQVHRCTEKSTGLPLAAKIIKVKSAKDREDVKNEINIMNQLSHVNLIQLYDAFESKHSCTLVMEYVDGGELFDRITDEKYHLTELDVVLFTRQICEGVHYLHQHYILHLDLKPENILCVNQTGHQIKIIDFGLARRYKPREKLKVNFGTPEFLAPEVVNYEFVSFPTDMWSVGVITYMLLSGLSPFLGETDAETMNFIVNCSWDFDADTFEGLSEEAKDFVSRLLVKEKSCRMSATQCLKHEWLNNLPAKASRSKTRLKSQLLLQKYIAQRKWKKHFYVVTAANRLRKFPTSP

SEQ ID NO: 11659 - protein, 977 aa, Homo sapiens
MGAEEEVLVTLSGGAPWGFRLHGGAEQRKPLQVSKIRRRSQAGRAGLRERDQLLAINGVSCTNLSHASAMSLIDASGNQLVLTVQRLADEGPVQSPSPHELQVLSPLSPLSPEPPGAPVPQPLQPGSLRSPPDSEAYYGETDSDADGPATQEKPRRPRRRGPTRPTPPGAPPDEVYLSDSPAEPAPTIPGPPSQGDSRVSSPSWEDGAALQPPPAEALLLPHGPLRPGPHLIPMVGPVPHPVAEDLTTTYTQKAKQAKLQRAESLQEKSIKEAKTKCRTIASLLTAAPNPHSKGVLMFKKRRQRAKKYTLVSFGAAAGTGAEEEDGVPPTSESELDEEAFSDARSLTNQSDWDSPYLDMELARAGSRASEGQGSGLGGQLSEVSGRGVQLFEQQRQRADSSTQELARVEPAAMLNGEGLQSPPRAQSAPPEAAVLPPSPLPAPVASPRPFQPGGGAPTPAPSIFNRSARPFTPGLQGQRPTTTSVIFRPLAPKRANDSLGGLSPAPPPFLSSQGPTPLPSFTSGVPSHAPVSGSPSTPRSSGPVTATSSLYIPAPSRPVTPGGAPEPPAPPSAAAMTSTASIFLSAPLRPSARPEAPAPGPGAPEPPSAREQRISVPAARTGILQEARRRGTRKQMFRPGKEETKNSPNPELLSLVQNLDEKPRAGGAESGPEEDALSLGAEACNFMQPVGARSYKTLPHVTPKTPPPMAPKTPPPMTPKTPPPVAPKPPSRGLLDGLVNGAASSAGIPEPPRLQGRGGELFAKRQSRADRYVVEGTPGPGLGPRPRSPSPTPSLPPSWKYSPNIRAPPPIAYNPLLSPFFPQAARTLPKAQSQGPRATPKQGIKALDFMRHQPYQLKTAMFCFDEVPPTPGPIASGSPKTARVQEIRRFSTPAPQPTAEPLAPTVLAPRAATTLDEPIWRTELASAPVPSPAPPPEAPRGLGASPSSCGFQVARPRFSATRTGLQAHVWRPGAGHQ

SEQ ID NO: 11660 - protein, 918 aa, Homo sapiens
MGTTAPGPIHLLELCDQKLMEFLCNMDNKDLVWLEEIQEEAERMFTREFSKEPELMPKTPSQKNRRKKRRISYVQDENRDPIRRRLSRRKSRSSQLSSRRLRSKDSVEKLATVVGENGSVLRRVTRAAAAAAAATMALAAPSSPTPESPTMLTKKPEDNHTQCQLVPVVEIGISERQNAEQHVTQLMSTEPLPRTLSPTPASATAPTSQGIPTSDEESTPKKSKARILESITVSSLMATPQDPKGQGVGTGRSASKLRIAQVSPGPRDSPAFPDSPWRERVLAPILPDNFSTPTGSRTDSQSVRHSPIAPSSPSPQVLAQKYSLVAKQESVVRRASRRLAKKTAEEPAASGRIICHSYLERLLNVEVPQKVGSEQKEPPEEAEPVAAAEPEVPENNGNNSWPHNDTEIANSTPNPKPAASSPETPSAGQQEAKTDQADGPREPPQSARRKRSYKQAVSELDEEQHLEDEELQPPRSKTPSSPCPASKVVRPLRTFLHTVQRNQMLMTPTSAPRSVMKSFIKRNTPLRMDPKCSFVEKERQRLENLRRKEEAEQLRRQKVEEDKRRRLEEVKLKREERLRKVLQARERVEQMKEEKKKQIEQKFAQIDEKTEKAKEERLAEEKAKKKAAAKKMEEVEARRKQEEEARRLRWLQQEEEERRHQELLQKKKEEEQERLRKAAEAKRLAEQREQERREQERREQERREQERREQERREQERQLAEQERRREQERLQAERELQEREKALRLQKEQLQRELEEKKKKEEQQRLAERQLQEEQEKKAKEAAGASKALNVTVDVQSPACTSYQMTPQGHRAPPKINPDNYGMDLNSDDSTDDEAHPRKPIPTWARGTPLSQAIIHQYYHPPNLLELFGTILPLDLEDIFKKSKPRYHKRTSSAVWNSPPLQGARVPSSLAYSLKKH

SEQ ID NO: 11661 - protein, 968 aa, Homo sapiens
MAEDDPYLGRPEQMFHLDPSLTHTIFNPEVFQPQMALPTDGPYLQILEQPKQRGFRFRYVCEGPSHGGLPGASSEKNKKSYPQVKICNYVGPAKVIVQLVTNGKNIHLHAHSLVGKHCEDGICTVTAGPKDMVVGFANLGILHVTKKKVFETLEARMTEACIRGYNPGLLVHPDLAYLQAEGGGDRQLGDREKELIRQAALQQTKEMDLSVVRLMFTAFLPDSTGSFTRRLEPVVSDAIYDSKAPNASNLKIVRMDRTAGCVTGGEEIYLLCDKVQKDDIQIRFYEEEENGGVWEGFGDFSPTDVHRQFAIVFKTPKYKDINITKPASVFVQLRRKSDLETSEPKPFLYYPEIKDKEEVQRKRQKLMPNFSDSFGGGSGAGAGGGGMFGSGGGGGGTGSTGPGYSFPHYGFPTYGGITFHPGTTKSNAGMKHGTMDTESKKDPEGCDKSDDKNTVNLFGKVIETTEQDQEPSEATVGNGEVTLTYATGTKEESAGVQDNLFLEKAMQLAKRHANALFDYAVTGDVKMLLAVQRHLTAVQDENGDSVLHLAIIHLHSQLVRDLLEVTSGLISDDIINMRNDLYQTPLHLAVITKQEDVVEDLLRAGADLSLLDRLGNSVLHLAAKEGHDKVLSILLKHKKAALLLDHPNGDGLNAIHLAMMSNSLPCLLLLVAAGADVNAQEQKSGRTALHLAVEHDNISLAGCLLLEGDAHVDSTTYDGTTPLHIAAGRGSTRLAALLKAAGADPLVENFEPLYDLDDSWENAGEDEGVVPGTTPLDMATSWQVFDILNGKPYEPEFTSDDLLAQGDMKQLAEDVKLQLYKLLEIPDPDKNWATLAQKLGLGILNNAFRLSPAPSKTLMDNYEVSGGTVRELVEALRQMGYTEAIEVIQAASSPVKTTSQAHSLPLSPASTRQQIDELRDSDSVCDSGVETSFRKLSFTESLTSGASLLTLNKMPHDYGQEGPLEGKI

SEQ ID NO: 11662 - protein, 618 aa, Homo sapiens
METTPLNSQKQLSACEDGEDCQENGVLQKVVPTPGDKVESGQISNGYSAVPSPGAGDDTRHSIPATTTTLVAELHQGERETWGKKVDFLLSVIGYAVDLGNVWRFPYICYQNGGGAFLLPYTIMAIFGGIPLFYMELALGQYHRNGCISIWRKICPIFKGIGYAICIIAFYIASYYNTIMAWALYYLISSFTDQLPWTSCKNSWNTGNCTNYFSEDNITWTLHSTSPAEEFYTRHVLQIHRSKGLQDLGGISWQLALCIMLIFTVIYFSIWKGVKTSGKVVWVTATFPYIILSVLLVRGATLPGAWRGVLFYLKPNWQKLLETGVWIDAAAQIFFSLGPGFGVLLAFASYNKFNNNCYQDALVTSVVNCMTSFVSGFVIFTVLGYMAEMRNEDVSEVAKDAGPSLLFITYAEAIANMPASTFFAIIFFLMLITLGLDSTFAGLEGVITAVLDEFPHVWAKRRERFVLAVVITCFFGSLVTLTFGGAYVVKLLEEYATGPAVLTVALIEAVAVSWFYGITQFCRDVKEMLGFSPGWFWRICWVAISPLFLLFIICSFLMSPPQLRLFQYNYPYWSIILGYCIGTSSFICIPTYIAYRLIITPGTFKERIIKSITPETPT

SEQ ID NO: 11663 - protein, 515 aa, Homo sapiens
MAAPEPARAAPPPPPPPPPPPGADRVVKAVPFPPTHRLTSEEVFDLDGIPRVDVLKNHLVKEGRVDEEIALRIINEGAAILRREKTMIEVEAPITVCGDIHGQFFDLMKLFEVGGSPANTRYLFLGDYVDRGYFSIECVLYLWVLKILYPSTLFLLRGNHECRHLTEYFTFKQECKIKYSERVYEACMEAFDSLPLAALLNQQFLCVHGGLSPEIHTLDDIRRLDRFKEPPAFGPMCDLLWSDPSEDFGNEKSQEHFSHNTVRGCSYFYNYPAVCEFLQNNNLLSIIRAHEAQDAGYRMYRKSQTTGFPSLITIFSAPNYLDVYNNKAAVLKYENNVMNIRQFNCSPHPYWLPNFMDVFTWSLPFVGEKVTEMLVNVLSICSDDELMTEGEDQFDVGSAAARKEIIRNKIRAIGKMARVFSVLREESESVLTLKGLTPTGMLPSGVLAGGRQTLQSAIRGFSPPHRICSFEEAKGLDRINERMPPRKDAVQQDGFNSLNTAHATENHGTGNHTAQ

SEQ ID NO: 11664 - protein, 525 aa, Homo sapiens
MAAPEPARAAPPPPPPPPPPPGADRVVKAVPFPPTHRLTSEEVFDLDGIPRVDVLKNHLVKEGRVDEEIALRIINEGAAILRREKTMIEVEAPITVCGDIHGQFFDLMKLFEVGGSPANTRYLFLGDYVDRGYFSIECVLYLWVLKILYPSTLFLLRGNHECRHLTEYFTFKQECKIKYSERVYEACMEAFDSLPLAALLNQQFLCVHGGLSPEIHTLDDIRRLDRFKEPPAFGPMCDLLWSDPSEDFGNEKSQEHFSHNTVRGCSYFYNYPAVCEFLQNNNLLSIIRAHEAQDAGYRMYRKSQTTGFPSLITIFSAPNYLDVYNNKAAVLKYENNVMNIRQFNCSPHPYWLPNFMDVFTWSLPFVGEKVTEMLVNVLSICSDDELMTEGEDQFDVGSAAARKEIIRNKIRAIGKMARVFSVLREESESVLTLKGLTPTGMLPSGVLAGGRQTLQSATVEAIEAEKAIRGFSPPHRICSFEEAKGLDRINERMPPRKDAVQQDGFNSLNTAHATENHGTGNHTAQ

SEQ ID NO: 11665 - protein, 1582 aa, Homo sapiens
MGSKRRRATSPSSSVSGDFDDGHHSVSTPGPSRKRRRLSNLPTVDPIAVCHELYNTIRDYKDEQGRLLCELFIRAPKRRNQPDYYEVVSQPIDLMKIQQKLKMEEYDDVNLLTADFQLLFNNAKSYYKPDSPEYKAACKLWDLYLRTRNEFVQKGEADDEDDDEDGQDNQGTVTEGSSPAYLKEILEQLLEAIVVATNPSGRLISELFQKLPSKVQYPDYYAIIKEPIDLKTIAQRIQNGSYKSIHAMAKDIDLLAKNAKTYNEPGSQVFKDANSIKKIFYMKKAEIEHHEMAKSSLRMRTPSNLAAARLTGPSHSKGSLGEERNPTSKYYRNKRAVQGGRLSAITMALQYGSESEEDAALAAARYEEGESEAESITSFMDVSNPFYQLYDTVRSCRNNQGQLIAEPFYHLPSKKKYPDYYQQIKMPISLQQIRTKLKNQEYETLDHLECDLNLMFENAKRYNVPNSAIYKRVLKLQQVMQAKKKELARRDDIEDGDSMISSATSDTGSAKRKSKKNIRKQRMKILFNVVLEAREPGSGRRLCDLFMVKPSKKDYPDYYKIILEPMDLKIIEHNIRNDKYAGEEGMIEDMKLMFRNARHYNEEGSQVYNDAHILEKLLKEKRKELGPLPDDDDMASPKLKLSRKSGISPKKSKYMTPMQQKLNEVYEAVKNYTDKRGRRLSAIFLRLPSRSELPDYYLTIKKPMDMEKIRSHMMANKYQDIDSMVEDFVMMFNNACTYNEPESLIYKDALVLHKVLLETRRDLEGDEDSHVPNVTLLIQELIHNLFVSVMSHQDDEGRCYSDSLAEIPAVDPNFPNKPPLTFDIIRKNVENNRYRRLDLFQEHMFEVLERARRMNRTDSEIYEDAVELQQFFIKIRDELCKNGEILLSPALSYTTKHLHNDVEKERKEKLPKEIEEDKLKREEEKREAEKSEDSSGAAGLSGLHRTYSQDCSFKNSMYHVGDYVYVEPAEANLQPHIVCIERLWEDSAEKEVFKSDYYNKVPVSKILGKCVVMFVKEYFKLCPENFRDEDVFVCESRYSAKTKSFKKIKLWTMPISSVRFVPRDVPLPVVRVASVFANADKGDDEKNTDNSEDSRAEDNFNLEKEKEDVPVEMSNGEPGCHYFEQLHYNDMWLKVGDCVFIKSHGLVRPRVGRIEKVWVRDGAAYFYGPIFIHPEETEHEPTKMFYKKEVFLSNLEETCPMTCILGKCAVLSFKDFLSCRPTEIPENDILLCESRYNESDKQMKKFKGLKRFSLSAKVVDDEIYYFRKPIVPQKEPSPLLEKKIQLLEAKFAELEGGDDDIEEMGEEDSESTPKSAKGSAKKEGSKRKINMSGYILFSSEMRAVIKAQHPDYSFGELSRLVGTEWRNLETAKKAEYEGMMGGYPPGLPPLQGPVDGLVSMGSMQPLHPGGPPPHHLPPGVPGLPGIPPPGVMNQGVAPMVGTPAPGGSPYGQQVGVLGPPGQQAPPPYPGPHPAGPPVIQQPTTPMFVAPPPKTQRLLHSEAYLKYIEGLSAESNSISKWDQTLAARRRDVHLSKEQESRLPSHWLKSKGAHTTMADALWRLRDLMLRDTLNIRQAYNLENV

SEQ ID NO: 11666 - protein, 1503 aa, Homo sapiens
MNESASQEELRPAQENRKEDKERKWNLTEVKELHETLQSVPDVPVKEDTNSVVEKAMDEIKSQELNLEGQRKISPGSIKDSKTEASGNIAIRKSAKVIFALDETELKSKPEHTWKKNLFERMEARAQAMQQKIIDKENLKKELEKKAEKKLPRDNLAKEWFNTDSMTLNNTAYLLDKLLPTLVPGVENMLTQVEKKKVLTEADTPSKFDPINYLGEYLIRNNPNYIKDPGMSGYQRLMKEVTEDLKIYVPDTICNRVSKMKENVKQNRKQRESIDKIIVKVANTRKQALQEQFDEWILDPKGMIPKSVIQNVLQEFFQNPDFKLGSHCKQLDITDSTEPRLNKMEFTEYISSHIKDLKSEMFEELLKHLCHSADEFREVIKADMRRQMFAELFLHCDHGKVGFLDRQRTLALLELFYDHSSQMLRSLLRNPRQWPFIEFEEINLTELWGDMDNQKHIYEGFDKVLLEMNTLLSANHASKTQSKLLESPDQPKLNEQRTSTPSPNPPEQQRGVTAEQGPQRISIEEQQQGKKPTAEQELYIESVIEPGTHTESTLEQGSSRRLLTEQETHRESTTEQGQHKGSIEGQGPRRVSVSEQGSSRESVAEQGSRRESIAEQDRHKGSVAEQGSRRMSAAEQGSLRESVIEEPYQKSEQGPYGEIISEEQEDIGSTSQSRKDSILKSTKYGEPITSEYIEVPLQEKRSWEQTYEEEIFLSSELQEEVPTLSRKDHFPETTKKEVQKDKPCEPKSQKIEGKSWSGEFFTCNWKMKYVTFEDEEQANLIYGNSRFTDLHSIIRNIQSCKEVKGRTAFNGVSFNLLQFVQLLETFVGEDAPLSVSETLTSFFKEGYVETEQEKMNALEQFSQNAFQVRQRLLLEAIFQKWDSDGSGFLDLKEVDELLYTYKEGMEKESMKKAKLHIQFPKPHPGHEVRLSSKQFQNYIELVVSELRGNEDQVLESVVEFLMNALERSHIESLRNSARRKWLHQIQCAAETSGVSLEPVYSETFKALMQDAEAHGNKKISAHISLLEENLLLPEKGNVLLRNVACTLDDAQFVLNRVLYRDMKGISFTVVDEGKPIHVPQVQYHGNIFFWNQSRNKHDYNGSFLALPLQDAYMRIFGVLAVDTLRDPHEINIFLPHEIRFYQGVANVFSTAYHYVHSREHILHIVITGIGWLYDVTSSITSITTYFVEPSPAQDSDYVLRNMMVTGQLGLTEIHKNPPTIHRKSCIFRDFLFKCTDSSEVVLASACGETHIVVPLRERTGEALGVLDFNIGQNRMLLCQEYKDLQKMMKVVQVACYEILGEFSGEIKKKYILEIENVREVQRAGILFFRIMLLELQESIQLLNSMEFVSLLLYDHTLVTEPNSPQDSKSMELEANVKLVRDILKAVILFFHPELEFSSDFGSWDKCKFYVNKYLVNNICAFDPTAKHVEVNVQLIDEYIRDHSRTEVWKFGNVVIEHLYHWIHICSALMKITKQLNSGITPPLPSKTDNYMYAKMPGEGLQEK

SEQ ID NO: 11667 - protein, 882 aa, Homo sapiens
MAAKGAHGSYLKVESELERCRAEGHWDRMPELVRQLQTLSMPGGGGNRRGSPSAAFTFPDTDDFGKLLLAEALLEQCLKENHAKIKDSMPLLEKNEPKMSEAKNYLSSILNHGRLSPQYMCEAMLILGKLHYVEGSYRDAISMYARAGIDDMSMENKPLYQMRLLSEAFVIKGLSLERLPNSIASRFRLTEREEEVITCFERASWIAQVFLQELEKTTNNSTSRHLKGCHPLDYELTYFLEAALQSAYVKNLKKGNIVKGMRELREVLRTVETKATQNFKVMAAKHLAGVLLHSLSEECYWSPLSHPLPEFMGKEESSFATQALRKPHLYEGDNLYCPKDNIEEALLLLLISESMATRDVVLSRVPEQEEDRTVSLQNAAAIYDLLSITLGRRGQYVMLSECLERAMKFAFGEFHLWYQVALSMVACGKSAYAVSLLRECVKLRPSDPTVPLMAAKVCIGSLRWLEEAEHFAMMVISLGEEAGEFLPKGYLALGLTYSLQATDATLKSKQDELHRKALQTLERAQQLAPSDPQVILYVSLQLALVRQISSAMEQLQEALKVRKDDAHALHLLALLFSAQKHHQHALDVVNMAITEHPENFNLMFTKVKLEQVLKGPEEALVTCRQVLRLWQTLYSFSQLGDFRSPEGFQTPQRNICNSEIYRGGGLEKDGSFGEGLTMKKQSGMHLTLPDAHDADSGSRRASSIAASRLEEAMSELTMPSSVLKQGPMQLWTTLEQIWLQAAELFMEQQHLKEAGFCIQEAAGLFPTSHSVLYMRGRLAEVKGNLEEAKQLYKEALTVNPDGVRIMHSLGLMLSRLGHKSLAQKVLRDAVERQSTCHEAWQGLGEVLQAQGQNEAAVDCFLTALELEASSPVLPFSIIPREL

SEQ ID NO: 11668 - protein, 1707 aa, Homo sapiens
MHPGLWLLLVTLCLTEELAAAGEKSYGKPCGGQDCSGSCQCFPEKGARGRPGPIGIQGPTGPQGFTGSTGLSGLKGERGFPGLLGPYGPKGDKGPMGVPGFLGINGIPGHPGQPGPRGPPGLDGCNGTQGAVGFPGPDGYPGLLGPPGLPGQKGSKGDPVLAPGSFKGMKGDPGLPGLDGITGPQGAPGFPGAVGPAGPPGLQGPPGPPGPLGPDGNMGLGFQGEKGVKGDVGLPGPAGPPPSTGELEFMGFPKGKKGSKGEPGPKGFPGISGPPGFPGLGTTGEKGEKGEKGIPGLPGPRGPMGSEGVQGPPGQQGKKGTLGFPGLNGFQGIEGQKGDIGLPGPDVFIDIDGAVISGNPGDPGVPGLPGLKGDEGIQGLRGPSGVPGLPALSGVPGALGPQGFPGLKGDQGNPGRTTIGAAGLPGRDGLPGPPGPPGPPSPEFETETLHNKESGFPGLRGEQGPKGNLGLKGIKGDSGFCACDGGVPNTGPPGEPGPPGPWGLIGLPGLKGARGDRGSGGAQGPAGAPGLVGPLGPSGPKGKKGEPILSTIQGMPGDRGDSGSQGFRGVIGEPGKDGVPGLPGLPGLPGDGGQGFPGEKGLPGLPGEKGHPGPPGLPGNGLPGLPGPRGLPGDKGKDGLPGQQGLPGSKGDCCCREVGKGDLDTERGITLPCIIPGSYGPSGFPGTPGFPGPKGSRGLPGTPGQPGSSGSKGEPGSPGLVHLPELPGFPGPRGEKGLPGFPGLPGKDGLPGMIGSPGLPGSKGATGDIFGAENGAPGEQGLQGLTGHKGFLGDSGLPGLKGVHGKPGLLGPKGERGSPGTPGQVGQPGTPGSSGPYGIKGKSGLPGAPGFPGISGHPGKKGTRGKKGPPGSIVKKGLPGLKGLPGNPGLVGLKGSPGSPGVAGLPALSGPKGEKGSVGFVGFPGIPGLPGIPGTRGLKGIPGSTGKMGPSGRAGTPGEKGDRGNPGPVGIPSPRRPMSNLWLKGDKGSQGSAGSNGFPGPRGDKGEAGRPGPPGLPGAPGLPGIIKGVSGKPGPPGFMGIRGLPGLKGSSGITGFPGMPGESGSQGIRGSPGLPGASGLPGLKGDNGQTVEISGSPGPKGQPGESGFKGTKGRDGLIGNIGFPGNKGEDGKVGVSGDVGLPGAPGFPGVAGMRGEPGLPGSSGHQGAIGPLGSPGLIGPKGFPGFPGLHGLNGLPGTKGTHGTPGPSITGVPGPAGLPGPKGEKGYPGIGIGAPGKPGLRGQKGDRGFPGLQGPAGLPGAPGISLPSLIAGQPGDPGRPGLDGERGRPGPAGPPGPPGPSSNQGDTGDPGFPGIPGPKGPKGDQGIPGFSGLPGELGLKGMRGEPGFMGTPGKVGPPGDPGFPGMKGKAGPRGSSGLQGDPGQTPTAEAVQVPPGPLGLPGIDGIPGLTGDPGAQGPVGLQGSKGLPGIPGKDGPSGLPGPPGALGDPGLPGLQGPPGFEGAPGQQGPFGMPGMPGQSMRVGYTLVKHSQSEQVPPCPIGMSQLWVGYSLLFVEGQEKAHNQDLGFAGSCLPRFSTMPFIYCNINEVCHYARRNDKSYWLSTTAPIPMMPVSQTQIPQYISRCSVCEAPSQAIAVHSQDITIPQCPLGWRSLWIGYSFLMHTAAGAEGGGQSLVSPGSCLEDFRATPFIECSGARGTCHYFANKYSFWLTTVEERQQFGELPVSETLKAGQLHTRVSRCQVCMKSL

SEQ ID NO: 11669 - protein, 216 aa, Homo sapiens
MRLGPRTAALGLLLLCAAAAGAGKAEELHYPLGERRSDYDREALLGVQLHLKDKKRFEKANQDSGPGLSLEEFIAFEHPEEVDYMTEFVIQEALEEHDKNGDGFVSLEEFLGDYRWDPTANEDPEWILVEKDRFVNDYDKDNDGRLDPQELLPWVVPNNQGIAQEEALHLIDEMDLNGDKKLSEEEILENPDLFLTSEATDYGRQLHDDYFYHDEL

SEQ ID NO: 11670 - protein, 317 aa, Homo sapiens
MRLGPRTAALGLLLLCAAAAGAGKAEELHYPLGERRSDYDREALLGVQEDVDEYVKLGHEEQQKRLQAIIKKIDLDSDGFLTESELSSWIQMSFKHYAMQEAKQQFVEYDKNSDDTVTWDEYNIQMYDRVIDFDENTALDDAEEESFRKLHLKDKKRFEKANQDSGPGLSLEEFIAFEHPEEVDYMTEFVIQEALEEHDKNGDGFVSLEEFLGDYRWDPTANEDPEWILVEKDRFVNDYDKDNDGRLDPQELLPWVVPNNQGIAQEEALHLIDEMDLNGDKKLSEEEILENPDLFLTSEATDYGRQLHDDYFYHDEL

SEQ ID NO: 11671 - protein, 597 aa, Homo sapiens
MAASTSMVPVAVTAAVAPVLSINSDFSDLREIKKQLLLIAGLTRERGLLHSSKWSAELAFSLPALPLAELQPPPPITEEDAQDMDAYTLAKAYFDVKEYDRAAHFLHGCNSKKAYFLYMYSRYLSGEKKKDDETVDSLGPLEKGQVKNEALRELRVELSKKHQARELDGFGLYLYGVVLRKLDLVKEAIDVFVEATHVLPLHWGAWLELCNLITDKEMLKFLSLPDTWMKEFFLAHIYTELQLIEEALQKYQNLIDVGFSKSSYIVSQIAVAYHNIRDIDKALSIFNELRKQDPYRIENMDTFSNLLYVRSMKSELSYLAHNLCEIDKYRVETCCVIGNYYSLRSQHEKAALYFQRALKLNPRYLGAWTLMGHEYMEMKNTSAAIQAYRHAIEVNKRDYRAWYGLGQTYEILKMPFYCLYYYRRAHQLRPNDSRMLVALGECYEKLNQLVEAKKCYWRAYAVGDVEKMALVKLAKLHEQLTESEQAAQCYIKYIQDIYSCGEIVEHLEESTAFRYLAQYYFKCKLWDEASTCAQKCCAFNDTREEGKALLRQILQLRNQGETPTTEVPAPFFLPASLSANNTPTRRVSPLNLSSVTP

SEQ ID NO: 11672 - protein, 890 aa, Homo sapiens
MSQGILSPPAGLLSDDDVVVSPMFESTAADLGSVVRKNLLSDCSVVSTSLEDKQQVPSEDSMEKVKVYLRVRPLLPSELERQEDQGCVRIENVETLVLQAPKDSFALKSNERGIGQATHRFTFSQIFGPEVGQASFFNLTVKEMVKDVLKGQNWLIYTYGVTNSGKTHTIQGTIKDGGILPRSLALIFNSLQGQLHPTPDLKPLLSNEVIWLDSKQIRQEEMKKLSLLNGGLQEEELSTSLKRSVYIESRIGTSTSFDSGIAGLSSISQCTSSSQLDETSHRWAQPDTAPLPVPANIRFSIWISFFEIYNELLYDLLEPPSQQRKRQTLRLCEDQNGNPYVKDLNWIHVQDAEEAWKLLKVGRKNQSFASTHLNQNSSRSHSIFSIRILHLQGEGDIVPKISELSLCDLAGSERCKDQKSGERLKEAGNINTSLHTLGRCIAALRQNQQNRSKQNLVPFRDSKLTRVFQGFFTGRGRSCMIVNVNPCASTYDETLHVAKFSAIASQLVHAPPMQLGFPSLHSFIKEHSLQVSPSLEKGAKADTGLDDDIENEADISMYGKEELLQVVEAMKTLLLKERQEKLQLEMHLRDEICNEMVEQMQQREQWCSEHLDTQKELLEEMYEEKLNILKESLTSFYQEEIQERDEKIEELEALLQEARQQSVAHQQSGSELALRRSQRLAASASTQQLQEVKAKLQQCKAELNSTTEELHKYQKMLEPPPSAKPFTIDVDKKLEEGQKNIRLLRTELQKLGESLQSAERACCHSTGAGKLRQALTTCDDILIKQDQTLAELQNNMVLVKLDLRKKAACIAEQYHTVLKLQGQVSAKKRLGTNQENQQPNQQPPGKKPFLRNLLPRTPTCQSSTDCSPYARILRSRRSPLLKSGPFGKKY

SEQ ID NO: 11673 - protein, 327 aa, Homo sapiens
MTALELARRGARVVLACRSQERGEAAAFDLRQESGNNEVIFMALDLASLASVRAFATAFLSSEPRLDILIHNAGISSCGRTREAFNLLLRVNHIGPFLLTHLLLPCLKACAPSRVVVVASAAHCRGRLDFKRLDRPVVGWRQELRAYADTKLANVLFARELANQLEATGVTCYAAHPGPVNSELFLRHVPGWLRPLLRPLAWLVLRAPRGGAQTPLYCALQEGIEPLSGRYFANCHVEEVPPAARDDRAAHRLWEASKRLAGLGPGEDAEPDEDPQSEDSEAPSSLSTPHPEEPTVSQPYPSPQSSPDLSKMTHRIQAKVEPEIQLS

SEQ ID NO: 11674 - protein, 509 aa, Homo sapiens
MDSQKEALQRIISTLANKNDEIQNFIDTLHHTLKGVQENSSNILSELDEEFDSLYSILDEVKESMINCIKQEQARKSQELQSQISQCNNALENSEELLEFATRSLDIKEPEEFSKAARQIKDRVTMASAFRLSLKPKVSDNMTHLMVDFSQERQMLQTLKFLPVPKAPEIDPVECLVADNSVTVAWRMPEEDNKIDHFILEHRKTNFDGLPRVKDERCWEIIDNIKGTEYTLSGLKFDSKYMNFRVRACNKAVAGEYSDPVTLETKALNFNLDNSSSHLNLKVEDTCVEWDPTGGKGQESKIKGKENKGSVHVTSLKKHTRSGTPSPKRTSVGSRPPAVRGSRDRFTGESYTVLGDTAIESGQHYWEVKAQKDCKSYSVGVAYKTLGKFDQLGKTNTSWCIHVNNWLQNTFAAKHNNKVKALDVTVPEKIGVFCDFDGGQLSFYDANSKQLLYSFKTKFTQPVLPGFMVWCGGLSLSTGMQVPSAVRTLQKSENGMTGSASSLNNVVTQ

SEQ ID NO: 11675 - protein, 527 aa, Homo sapiens [sequence omitted]

SEQ ID NO: 11676 - protein, 524 aa, Homo sapiens
MYALFLLASLLGAALAGPVLGLKECTRGSAVWCQNVKTASDCGAVKHCLQTVWNKPTVKSLPCDICKDVVTAAGDMLKDNATEEEILVYLEKTCDWLPKPNMSASCKEIVDSYLPVILDIIKGEMSRPGEVCSALNLCESLQKHLAELNHQKQLESNKIPELDMTEVVAPFMANIPLLLYPQDGPRSKPQPKDNGDVCQDCIQMVTDIQTAVRTNSTFVQALVEHVKEECDRLGPGMADICKNYISQYSEIAIQMMMHMQPKEICALVGFCDEVKEMPMQTLVPAKVASKNVIPALELVEPIKKHEVPAKSDVYCEVCEFLVKEVTKLIDNNKTEKEILDAFDKMCSKLPKSLSEECQEVVDTYGSSILSILLEEVSPELVCSMLHLCSGTRLPALTVHVTQPKDGGFCEVCKKLVGYLDRNLEKNSTKQEILAALEKGCSFLPDPYQKQCDQFVAEYEPVLIEILVEVMDPSFVCLKIGACPSAHKPLLGTEKCIWGPSYWCQNTETAAQCNAVEHCKRHVWN

SEQ ID NO: 11677 - protein, 760 aa, Homo sapiens
MESSPFNRRQWTSLSLRVTAKELSLVNKNKSSAIVEIFSKYQKAAEETNMEKKRSNTENLSQHFRKGTLTVLKKKWENPGLGAESHTDSLRNSSTEIRHRADHPPAEVTSHAASGAKADQEEQIHPRSRLRSPPEALVQGRYPHIKDGEDLKDHSTESKKMENCLGESRHEVEKSEISENTDASGKIEKYNVPLNRLKMMFEKGEPTQTKILRAQSRSASGRKISENSYSLDDLEIGPGQLSSSTFDSEKNESRRNLELPRLSETSIKDRMAKYQAAVSKQSSSTNYTNELKASGGEIKIHKMEQKENVPPGPEVCITHQEGEKISANENSLAVRSTPAEDDSPGDSQVKSEVQQPVHPKPLSPDSRASSLSESSPPKAMKKFQAPARETCVECQKTVYPMERLLANQQVFHISCFRCSYCNNKLSLGTYASLHGRIYCKPHFNQLFKSKGNYDEGFGHRPHKDLWASKNENEEILERPAQLANARETPHSPGVEDAPIAKVGVLAASMEAKASSQQEKEDKPAETKKLRIAWPPPTELGSSGSALEEGIKMSKPKWPPEDEISKPEVPEDVDLDLKKLRRSSSLKERSRPFTVAASFQSTSVKSPKTVSPPIRKGWSMSEQSEESVGGRVAERKQVENAKASKKNGNVGKTTWQNKESKGETGKRSKEGHSLEMENENLVENGADSDEDDNSFLKQQSPQEPKSLNWSSFVDNTFAEEFTTQNQKSQDVELWEGEVVKELSVEEQIKRNRYYDEDEDEE

SEQ ID NO: 11678 - protein, 439 aa, Homo sapiens
MPAIAVLAAAAAAWCFLQVESRHLDALAGGAGPNHGNFLDNDQWLSTVSQYDRDKYWNRFRDDDYFRNWNPNKPFDQALDPSKDPCLKVKCSPHKVCVTQDYQTALCVSRKHLLPRQKKGNVAQKHWVGPSNLVKCKPCPVAQSAMVCGSDGHSYTSKCKLEFHACSTGKSLATLCDGPCPCLPEPEPPKHKAERSACTDKELRNLASRLKDWFGALHEDANRVIKPTSSNTAQGRFDTSILPICKDSLGWMFNKLDMNYDLLLDPSEINAIYLDKYEPCIKPLFNSCDSFKDGKLSNNEWCYCFQKPGGLPCQNEMNRIQKLSKGKSLLGAFIPRCNEEGYYKATQCHGSTGQCWCVDKYGNELAGSRKQGAVSCEEEQETSGDFGSGGSVVLLDDLEYERELGPKDKEGKLRVHTRAVTEDDEDEDDDKEDEVGYIW

SEQ ID NO: 11679 - protein, 496 aa, Homo sapiens
MASSTGDRSQAVRHGLRAKVLTLDGMNPRVRRVEYAVRGPIVQRALELEQELRQGVKKPFTEVIRANIGDAQAMGQRPITFLRQVLALCVNPDLLSSPNFPDDAKKRAERILQACGGHSLGAYSVSSGIQLIREDVARYIERRDGGIPADPNNVFLSTGASDAIVTVLKLLVAGEGHTRTGVLIPIPQYPLYSATLAELGAVQVDYYLDEERAWALDVAELHRALGQARDHCRPRALCVINPGNPTGQVQTRECIEAVIRFAFEERLFLLADEVYQDNVYAAGSQFHSFKKVLMEMGPPYAGQQELASFHSTSKGYMGECGFRGGYVEVVNMDAAVQQQMLKLMSVRLCPPVPGQALLDLVVSPPAPTDPSFAQFQAEKQAVLAELAAKAKLTEQVFNEAPGISCNPVQGAMYSFPRVQLPPRAVERAQELGLAPDMFFCLRLLEETGICVVPGSGFGQREGTYHFRMTILPPLEKLRLLLEKLSRFHAKFTLEYS

SEQ ID NO: 11680 - protein, 624 aa, Homo sapiens
MQKSSTCSFMYGELTDKKTIEKVRQTFDNYESNCFEVLLYKKNRTPVWFYMQIAPIRNEHEKVVLFLCTFKDITLFKQPIEDDSTKGWTKFARLTRALTNSRSVLQQLTPMNKTEVVHKHSRLAEVLQLGSDILPQYKQEAPKTPPHIILHYCAFKTTWDWVILILTFYTAIMVPYNVSFKTKQNNIAWLVLDSVVDVIFLVDIVLNFHTTFVGPGGEVISDPKLIRMNYLKTWFVIDLLSCLPYDIINAFENVDEGISSLFSSLKVVRLLRLGRVARKLDHYLEYGAAVLVLLVCVFGLVAHWLACIWYSIGDYEVIDEVTNTIQIDSWLYQLALSIGTPYRYNTSAGIWEGGPSKDSLYVSSLYFTMTSLTTIGFGNIAPTTDVEKMFSVAMMMVGSLLYATIFGNVTTIFQQMYANTNRYHEMLNNVRDFLKLYQVPKGLSERVMDYIVSTWSMSKGIDTEKVLSICPKDMRADICVHLNRKVFNEHPAFRLASDGCLRALAVEFQTIHCAPGDLIYHAGESVDALCFVVSGSLEVIQDDEVVAILGKGDVFGDIFWKETTLAHACANVRALTYCDLHIIKREALLKVLDFYTAFANSFSRNLTLTCNLRKRGWFSMANAL

SEQ ID NO: 11681 - protein, 1829 aa, Homo sapiens
MEDTPPSLSCSDCQRHFPSLPELSRHRELLHPSPNQDSEEADSIPRPYRCQQCGRGYRHPGSLVNHRRTHETGLFPCTTCGKDFSNPMALKSHMRTHAPEGRRRHRPPRPKEATPHLQGETVSTDSWGQRLGSSEGWENQTKHTEETPDCESVPDPRAASGTWEDLPTRQREGLASHPGPEDGADGWGPSTNSARAPPLPIPASSLLSNLEQYLAESVVNFTGGQEPTQSPPAEEERRYKCSQCGKTYKHAGSLTNHRQSHTLGIYPCAICFKEFSNLMALKNHSRLHAQYRPYHCPHCPRVFRLPRELLEHQQSHEGERQEPRWEEKGMPTTNGHTDESSQDQLPSAQMLNGSAELSTSGELEDSGLEEYRPFRCGDCGRTYRHAGSLINHRKSHQTGVYPCSLCSKQLFNAAALKNHVRAHHRPRQGVGENGQPSVPPAPLLLAETTHKEEEDPTTTLDHRPYKCSECGRAYRHRGSLVNHRHSHRTGEYQCSLCPRKYPNLMALRNHVRVHCKAARRSADIGAEGAPSHLKVELPPDPVEAEAAPHTDQDHVCKHEEEATDITPAADKTAAHICSICGLLFEDAESLERHGLTHGAGEKENSRTETTMSPPRAFACRDCGKSYRHSGSLINHRQTHQTGDFSCGACAKHFHTMAAMKNHLRRHSRRRSRRHRKRAGGASGGREAKLLAAESWTRELEDNEGLESPQDPSGESPHGAEGNLESDGDCLQAESEGDKCGLERDETHFQGDKESGGTGEGLERKDASLLDNLDIPGEEGGGTHFCDSLTGVDEDQKPATGQPNSSSHSANAVTGWQAGAAHTCSDCGHSFPHATGLLSHRPCHPPGIYQCSLCPKEFDSLPALRSHFQNHRPGEATSAQPFLCCLCGMIFPGRAGYRLHRRQAHSSSGMTEGSEEEGEEEGVAEAAPARSPPLQLSEAELLNQLQREVEALDSAGYGHICGCCGQTYDDLGSLERHHQSQSSGTTADKAPSPLGVAGDAMEMVVDSVLEDIVNSVSGEGGDAKSQEGAGTPLGDSLCIQGGESLLEAQPRPFRCNQCGKTYRHGGSLVNHRKIHQTGDFLCPVCSRCYPNLAAYRNHLRNHPRCKGSEPQVGPIPEAAGSSELQVGPIPEGGSNKPQHMAEEGPGQAEVEKLQEELKVEPLEEVARVKEEVWEETTVKGEEIEPRLETAEKGCQTEASSERPFSCEVCGRSYKHAGSLINHRQSHQTGHFGCQACSKGFSNLMSLKNHRRIHADPRRFRCSECGKAFRLRKQLASHQRVHMERRGGGGTRKATREDRPFRCGQCGRTYRHAGSLLNHRRSHETGQYSCPTCPKTYSNRMALKDHQRLHSENRRRRAGRSRRTAVRCALCGRSFPGRGSLERHLREHEETEREPANGQGGLDGTAASEANLTGSQGLETQLGGAEPVPHLEDGVPRPGERSQSPIRAASSEAPEPLSWGAGKAGGWPVGGGLGNHSGGWVPQFLTRSEEPEDSVHRSPCHAGDCQLNGPTLSHMDSWDNRDNSSQLQPGSHSSCSQCGKTYCQSGSLLNHNTNKTDRHYCLLCSKEFLNPVATKSHSHNHIDAQTFACPDCGKAFESHQELASHLQAHARGHSQVPAQMEEARDPKAGTGEDQVVLPGQGKAQEAPSETPRGPGESVERARGGQAVTSMAAEDKERPFRCTQCGRSYRHAGSLLNHQKAHTTGLYPCSLCPKLLPNLLSLKNHSRTHTDPKRHCCSICGKAFRTAARLEGHGRVHAPREGPFTCPHCPRHFRRRISFVQHQQQHQEEWTVAGSGRGHEGSQEEVGTQWRGKSSPKVGGGARSERREPRGF

SEQ ID NO: 11682 - protein, 827 aa, Homo sapiens
MEGAGGANDKKNRISSERRKEKSRDAARSRRSKESEVFYELAHQLPLPHNVSSHLDKASVMRLTISYLRVRKLLDAGDLDIEDDMKAQMNCFYLKALDGFVMVLTDDGDMIYISDNVNKYMGLTQFELTGHSVFDFTHPCDHEEMREMLTHRNGLVKKGKEQNTQRSFFLRMKCTLTSRGRTMNIKSATWKVLHCTGHIHVYDTNSNQPQCGYKKPPMTCLVLICEPIPHPSNIEIPLDSKTFLSRHSLDMKFSYCDERITELMGYEPEELLGRSIYEYYHALDSDHLTKTHHDMFTKGQVTTGQYRMLAKRGGYVWVETQATVIYNTKNSQPQCIVCVNYVVSGIIQHDLIFSLQQTECVLKPVESSDMKMTQLFTKVESEDTSSLFDKLKKEPDALTLLAPAAGDTIISLDFGSNDTETDDQQLEEVPLYNDVMLPSPNEKLQNINLAMSPLPTAETPKPLRSSADPALNQEVALKLEPNPESLELSFTMPQIQDQTPSPSDGSTRQSSPEPNSPSEYCFYVDSDMVNEFKLELVEKLFAEDTEAKNPFSTQDTDLDLEMLAPYIPMDDDFQLRSFDQLSPLESSSASPESASPQSTVTVFQQTQIQEPTANATTTTATTDELKTVTKDRMEDIKILIASPSPTHIHKETTSATSSPYRDTQSRTASPNRAGKGVIEQTEKSHPRSPNVLSVALSQRTTVPEEELNPKILALQNAQRKRKMEHDGSLFQAVGIGTLLQQPDDHAATTSLSWKRVKGCKSSEQNGMEQKTIILIPSDLACRLLGQSMDESGLPQLTSYDCEVNAPIQGSRNLLQGEELLRALDQVN

SEQ ID NO: 11683 - protein, 695 aa, Homo sapiens
MESTSQDRRATHVITIKPNETVLTAFPYRPHSSLLDFLKGEPRVLGATQILLALIIVGFGTIFALNYIGFSQRLPLVVLTGYPFWGALIGQGVTGMNVISSLVAITGITFTILSYRHQDKYCQMPSFEEICVFSRTLFIGILLILLIISIAELSISVTIASFRSKCWTQSDEVLFFLPSDVTQNSEQPAPEENDQLQFVLQEEFSSDDSTTNAQSVIFGGYAFFKLTLSRSPLVSQPGNKGREFVPDEQKQSILPSPKFSEEEIEPLPPTLEKKPSENMSIQLDSTFKQMKDEDLQSAIVQPSQMQTKLLQDQAASLQVFPSHSALKLEDISPEDLPSQALPVEGLSEQTMPSKSTSSHVKQSSNLTANDLPPQGILSQDTSSQDMLFHDMTSQDMQSLDMLSQDTPSHAMPPQDIPSQDMLSQALSAHAILPEASTSHIVQFPEIQHLLQQPPDLQPENTEPQNQQILQMSYQDIRSEVMEETKEWKSEEELHRRKSSRRHSLNQQTKALQYLRRHSLDVQAKGQKSSKRHSLDQQSKGWQSPKQKSLDQQIKDWLSPKRHSVDKQAQLNQTKEQLPDQQAEDQQAKGEQYPEGQSKDGQVKDQQTDKEQNSKKQTQDQQTEDQPAQEKKSPKGQFQNVQAEGQQAQVEKVPKLLCQDSESQIQQYQFWQFHKGNLQAGQPRTVNLLAKNPLTG

SEQ ID NO: 11684 - protein, 669 aa, Homo sapiens
MACEIMPLQSSQEDERPLSPFYLSAHVPQVSNVSATGELLERTIRSAVEQHLFDVNNSGGQSSEDSESGTLSASSATSARQRRRQSKEQDEVRHGRDKGLINKENTPSGFNHLDDCILNTQEVEKVHKNTFGCAGERSKPKRQKSSTKLSELHDNQDGLVNMESLNSTRSHERTGPDDFEWMSDERKGNEKDGGHTQHFESPTMKIQEHPSLSDTKQQRNQDAGDQEESFVSEVPQSDLTALCDEKNWEEPIPAFSSWQRENSDSDEAHLSPQAGRLIRQLLDEDSDPMLSPRFYAYGQSRQYLDDTEVPPSPPNSHSFMRRRSSSLGSYDDEQEDLTPAQLTRRIQSLKKKIRKFEDRFEEEKKYRPSHSDKAANPEVLKWTNDLAKFRRQLKESKLKISEEDLTPRMRQRSNTLPKSFGSQLEKEDEKKQELVDKAIKPSVEATLESIQRKLQEKRAESSRPEDIKDMTKDQIANEKVALQKALLYYESIHGRPVTKNERQVMKPLYDRYRLVKQILSRANTIPIIEEEEGSEDDSNVKPDFMVTLKTDFSARCFLDQFEDDADGFISPMDDKIPSKCSQDTGLSNLHAASIPELLEHLQEMREEKKRIRKKLRDFEDNFFRQNGRNVQKEDRTPMAEEYSEYKHIKAKLRLLEVLISKRDTDSKSM

SEQ ID NO: 11685 - protein, 790 aa, Homo sapiens
MEEKRRKYSISSDNSDTTDSHATSTSASRCSKLPSSTKSGWPRQNEKKPSEVFRTDLITAMKIPDSYQLSPDDYYILADPWRQEWEKGVQVPAGAEAIPEPVVRILPPLEGPPAQASPSSTMLGEGSQPDWPGGSRYDLDEIDAYWLELINSELKEMERPELDELTLERVLEELETLCHQNMARAIETQEGLGIEYDEDVVCDVCRSPEGEDGNEMVFCDKCNVCVHQACYGILKVPTGSWLCRTCALGVQPKCLLCPKRGGALKPTRSGTKWVHVSCALWIPEVSIGCPEKMEPITKISHIPASRWALSCSLCKECTGTCIQCSMPSCVTAFHVTCAFDHGLEMRTILADNDEVKFKSFCQEHSDGGPRNEPTSEPTEPSQAGEDLEKVTLRKQRLQQLEEDFYELVEPAEVAERLDLAEALVDFIYQYWKLKRKANANQPLLTPKTDEVDNLAQQEQDVLYRRLKLFTHLRQDLERVRNLCYMVTRRERTKHAICKLQEQIFHLQMKLIEQDLCRGLSTSFPIDGTFFNSWLAQSVQITAENMAMSEWPLNNGHREDPAPGLLSEELLQDEETLLSFMRDPSLRPGDPARKARGRTRLPAKKKPPPPPPQDGPGSRTTPDKAPKKTWGQDAGSGKGGQGPPTRKPPRRTSSHLPSSPAAGDCPILATPESPPPLAPETPDEAASVAADSDVQVPGPAASPKPLGRLRPPRESKVTRRLPGARPDAGMGPPSAVAERPKVSLHFDTETDGYFSDGEMSDSDVEAEDGGVQRGPREAGAEEVVRMGVLAS

SEQ ID NO: 11686 - protein, 662 aa, Homo sapiens
MESTSQDRRATHVITIKPNETVLTAFPYRPHSSLLDFLKGEPRVLGATQILLALIIVGFGTIFALNYIGFSQRLPLVVLTGYPFWGALIGQGVTGMNVISSLVAITGITFTILSYRHQDKYCQMPSFEEICVFSRTLFIVLFFLPSDVTQNSEQPAPEENDQLQFVLQEEFSSDDSTTNAQSVIFGGYAFFKLTLSRSPLVSQPGNKGREFVPDEQKQSILPSPKFSEEEIEPLPPTLEKKPSENMSIQLDSTFKQMKDEDLQSAIVQPSQMQTKLLQDQAASLQVFPSHSALKLEDISPEDLPSQALPVEGLSEQTMPSKSTSSHVKQSSNLTANDLPPQGILSQDTSSQDMLFHDMTSQDMQSLDMLSQDTPSHAMPPQDIPSQDMLSQALSAHAILPEASTSHIVQFPEIQHLLQQPPDLQPENTEPQNQQILQMSYQDIRSEVMEETKEWKSEEELHRRKSSRRHSLNQQTKALQYLRRHSLDVQAKGQKSSKRHSLDQQSKGWQSPKQKSLDQQIKDWLSPKRHSVDKQAQLNQTKEQLPDQQAEDQQAKGEQYPEGQSKDGQVKDQQTDKEQNSKKQTQDQQTEDQPAQEKKSPKGQFQNVQAEGQQAQVEKVPKLLCQDSESQIQQYQFWQFHKGNLQAGQPRTVNLLAKNPLTG

SEQ ID NO: 11687 - protein, 481 aa, Homo sapiens
MPQLDSGGGGAGGGDDLGAPDELLAFQDEGEEQDDKSRDSAAGPERDLAELKSSLVNESEGAAGGAGIPGVPGAGAGARGEAEALGREHAAQRLFPDKLPEPLEDGLKAPECTSGMYKETVYSAFNLLMHYPPPSGAGQHPQPQPPLHKANQPPHGVPQLSLYEHFNSPHPTPAPADISQKQVHRPLQTPDLSGFYSLTSGSMGQLPHTVSWFTHPSLMLGSGVPGHPAAIPHPAIVPPSGKQELQPFDRNLKTQAESKAEKEAKKPTIKKPLNAFMLYMKEMRAKVIAECTLKESAAINQILGRRWHALSREEQAKYYELARKERQLHMQLYPGWSARDNYGKKKRRSREKHQESTTDPGSPKKCRARFGLNQQTDWCGPCRRKKKCIRYLPGEGRCPSPVPSDDSALGCPGSPAPQDSPSYHLLPRFPTELLTSPAEPAPTSPGLSTALSLPTPGPPQAPRSTLQSTQVQQQESQRQVA

SEQ ID NO: 11688 - protein, 1318 aa, Homo sapiens
MQAQQLPYEFFSEENAPKWRGLLVPALKKVQGQVHPTLESNDDALQYVEELILQLLNMLCQAQPRSASDVEERVQKSFPHPIDKWAIADAQSAIEKRKRRNPLSLPVEKIHPLLKEVLGYKIDHQVSVYIVAVLEYISADILKLVGNYVRNIRHYEITKQDIKVAMCADKVLMDMFHQDVEDINILSLTDEEPSTSGEQTYYDLVKAFMAEIRQYIRELNLIIKVFREPFVSNSKLFSANDVENIFSRIVDIHELSVKLLGHIEDTVEMTDEGSPHPLVGSCFEDLAEELAFDPYESYARDILRPGFHDRFLSQLSKPGAALYLQSIGEGFKEAVQYVLPRLLLAPVYHCLHYFELLKQLEEKSEDQEDKECLKQAITALLNVQSGMEKICSKSLAKRRLSESACRFYSQQMKGKQLAIKKMNEIQKNIDGWEGKDIGQCCNEFIMEGTLTRVGAKHERHIFLFDGLMICCKSNHGQPRLPGASNAEYRLKEKFFMRKVQINDKDDTNEYKHAFEIILKDENSVIFSAKSAEEKNNWMAALISLQYRSTLERMLDVTMLQEEKEEQMRLPSADVYRFAEPDSEENIIFEENMQPKAGIPIIKAGTVIKLIERLTYHMYADPNFVRTFLTTYRSFCKPQELLSLIIERFEIPEPEPTEADRIAIENGDQPLSAELKRFRKEYIQPVQLRVLNVCRHWVEHHFYDFERDAYLLQRMEEFIGTVRGKAMKKWVESITKIIQRKKIARDNGPGHNITFQSSPPTVEWHISRPGHIETFDLLTLHPIEIARQLTLLESDLYRAVQPSELVGSVWTKEDKEINSPNLLKMIRHTTNLTLWFEKCIVETENLEERVAVVSRIIEILQVFQELNNFNGVLEVVSAMNSSPVYRLDHTFEQIPSRQKKILEEAHELSEDHYKKYLAKLRSINPPCVPFFGIYLTNILKTEEGNPEVLKRHGKELINFSKRRKVAEITGEIQQYQNQPYCLRVESDIKRFFENLNPMGNSMEKEFTDYLFNKSLEIEPRNPKPLPRFPKKYSYPLKSPGVRPSNPRPGTMRHPTPLQQEPRKISYSRIPESETESTASAPNSPRTPLTPPPASGASSTTDVCSVFDSDHSSPFHSRSASVSSISLTKGTDEVPVPPPVPPRRRPESAPAESSPSKIMSKHLDSPPAIPPRQPTSKAYSPRYSISDRTSISDPPESPPLLPPREPVRTPDVFSSSPLHLQPPPLGKKSDHGNAFFPNSPSPFTPPPPQTPSPHGTRRHLPSPPLTQEVDLHSIAGPPVPPRQSTSQHIPKLPPKTYKREHTHPSMHRDGPPLLENAHSS

SEQ ID NO: 11689 - protein, 466 aa, Homo sapiens
MPTRRWAPGTQCITKCEHTRPKPGELAFRKGDVVTILEACENKSWYRVKHHTSGQEGLLAAGALREREALSADPKLSLMPWFHGKISGQEAVQQLQPPEDGLFLVRESARHPGDYVLCVSFGRDVIHYRVLHRDGHLTIDEAVFFCNLMDMVEHYSKDKGAICTKLVRPKRKHGTKSAEEELARAGWLLNLQHLTLGAQIGEGEFGAVLQGEYLGQKVAVKNIKCDVTAQAFLDETAVMTKMQHENLVRLLGVILHQGLYIVMEHVSKGNLVNFLRTRGRALVNTAQLLQFSLHVAEGMEYLESKKLVHRDLAARNILVSEDLVAKVSDFGLAKAERKGLDSSRLPVKWTAPEALKHGKFTSKSDVWSFGVLLWEVFSYGRAPYPKMSLKEVSEAVEKGYRMEPPEGCPGPVHVLMSSCWEAEPARRPPFRKLAEKLARELRSAGAPASVSGQDADGSTSPRSQEP

SEQ ID NO: 11690 - protein, 508 aa, Homo sapiens
MQGHFPAERREGRPRRGTRGQQQLLVSPRFLRAWHPPPVSARMPTRRWAPGTQCITKCEHTRPKPGELAFRKGDVVTILEACENKSWYRVKHHTSGQEGLLAAGALREREALSADPKLSLMPWFHGKISGQEAVQQLQPPEDGLFLVRESARHPGDYVLCVSFGRDVIHYRVLHRDGHLTIDEAVFFCNLMDMVEHYSKDKGAICTKLVRPKRKHGTKSAEEELARAGWLLNLQHLTLGAQIGEGEFGAVLQGEYLGQKVAVKNIKCDVTAQAFLDETAVMTKMQHENLVRLLGVILHQGLYIVMEHVSKGNLVNFLRTRGRALVNTAQLLQFSLHVAEGMEYLESKKLVHRDLAARNILVSEDLVAKVSDFGLAKAERKGLDSSRLPVKWTAPEALKHGKFTSKSDVWSFGVLLWEVFSYGRAPYPKMSLKEVSEAVEKGYRMEPPEGCPGPVHVLMSSCWEAEPARRPPFRKLAEKLARELRSAGAPASVSGQDADGSTSPRSQEP

SEQ ID NO: 11691 - protein, 483 aa, Homo sapiens
MLFPISMSATEFLLASVIFCLVFWVIRASRPQVPKGLKNPPGPWGWPLIGHMLTLGKNPHLALSRMSQQYGDVLQIRIGSTPVVVLSGLDTIRQALVRQGDDFKGRPDLYTFTLISNGQSMSFSPDSGPVWAARRRLAQNGLKSFSIASDPASSTSCYLEEHVSKEAEVLISTLQELMAGPGHFNPYRYVVVSVTNVICAICFGRRYDHNHQELLSLVNLNNNFGEVVGSGNPADFIPILRYLPNPSLNAFKDLNEKFYSFMQKMVKEHYKTFEKGHIRDITDSLIEHCQEKQLDENANVQLSDEKIINIVLDLFGAGFDTVTTAISWSLMYLVMNPRVQRKIQEELDTVIGRSRRPRLSDRSHLPYMEAFILETFRHSSFVPFTIPHRKLWVNPSEFLPERFLTPDGAIDKVLSEKVIIFGMGKRKCIGETIARWEVFLFLAILLQRVEFSVPLGVKVDMTPIYGLTMKHACCEHFQMQLRS

SEQ ID NO: 11692 - protein, 2971 aa, Homo sapiens [sequence omitted]

SEQ ID NO: 11693 - protein, 473 aa, Homo sapiens
METPTPLPPVPASPTCNPAPRTIQIEFPQHSSSLLESLNRHRLEGKFCDVSLLVQGRELRAHKAVLAAASPYFHDKLLLGDAPRLTLPSVIEADAFEGLLQLIYSGRLRLPLDALPAHLLVASGLQMWQVVDQCSEILRELETSGGGISARGGNSYHALLSTTSSTGGWCIRSSPFQTPVQSSASTESPASTESPVGGEGSELGEVLQIQVEEEEEEEEDDDDEDQGSATLSQTPQPQRVSGVFPRPHGPHPLPMTATPRKLPEGESAPLELPAPPALPPKIFYIKQEPFEPKEEISGSGTQPGGAKEETKVFSGGDTEGNGELGFLLPSGPGPTSGGGGPSWKPVDLHGNEILSGGGGPGGAGQAVHGPVKLGGTPPADGKRFGCLCGKRFAVKPKRDRHIMLTFSLRPFGCGICNKRFKLKHHLTEHMKTHAGALHACPHCGRRFRVHACFLRHRDLCKGQGWATAHWTYK

SEQ ID NO: 11694 - protein, 275 aa, Homo sapiens
MQNNEIIKPAKYFSELEKSILLALVEKYKYVLECKKSDARTIALKQRTWQALAHEYNSQPSVSLRDFKQLKKCWENIKARTKKIMAHERREKVKRSVSPLLSTHVLGKEKIASMLPEQLYFLQSPPEEEPEYHPDASAQESFAVSNRELCDDEKEFIHFPVCEGTSQPEPSCSAVRITANKNYRSKTSQEGALKKMHEEEHHQQMSILQLQLIQMNEVHVAKIQQIERECEMAEEEHRIKMEVLNKKKMYWERKLQTFTKEWPVSSFNRPFPNSP

SEQ ID NO: 11695 - protein, 496 aa, Homo sapiens
MDQDYERRLLRQIVIQNENTMPRVTEMRRTLTPASSPVSSPSKHGDRFIPSRAGANWSVNFHRINENEKSPSQNRKAKDATSDNGKDGLAYSALLKNELLGAGIEKVQDPQTEDRRLQPSTPEKKGLFTYSLSTKRSSPDDGNDVSPYSLSPVSNKSQKLLRSPRKPTRKISKIPFKVLDAPELQDDFYLNLVDWSSLNVLSVGLGTCVYLWSACTSQVTRLCDLSVEGDSVTSVGWSERGNLVAVGTHKGFVQIWDAAAGKKLSMLEGHTARVGALAWNAEQLSSGSRDRMILQRDIRTPPLQSERRLQGHRQEVCGLKWSTDHQLLASGGNDNKLLVWNHSSLSPVQQYTEHLAAVKAIAWSPHQHGLLASGGGTADRCIRFWNTLTGQPLQCIDTGSQVCNLAWSKHANELVSTHGYSQNQILVWKYPSLTQVAKLTGHSYRVLYLAMSPDGEAIVTGAGDETLRFWNVFSKTRSTKVKWESVSVLNLFTRIR

SEQ ID NO: 11696 - protein, 626 aa, Homo sapiens
MPCVQAQYSPSPPGSSYAAQTYSSEYTTEIMNPDYTKLTMDLGSTEITATATTSLPSISTFVEGYSSNYELKPSCVYQMQRPLIKVEEGRAPSYHHHHHHHHHHHHHHQQQHQQPSIPPASSPEDEVLPSTSMYFKQSPPSTPTTPAFPPQAGALWDEALPSAPGCIAPGPLLDPPMKAVPTVAGARFPLFHFKPSPPHPPAPSPAGGHHLGYDPTAAAALSLPLGAAAAAGSQAAALESHPYGLPLAKRAAPLAFPPLGLTPSPTASSLLGESPSLPSPPSRSSSSGEGTCAVCGDNAACQHYGVRTCEGCKGFFKRTVQKNAKYVCLANKNCPVDKRRRNRCQYCRFQKCLSVGMVKEVVRTDSLKGRRGRLPSKPKSPLQQEPSQPSPPSPPICMMNALVRALTDSTPRDLDYSRYCPTDQAAAGTDAEHVQQFYNLLTASIDVSRSWAEKIPGFTDLPKEDQTLLIESAFLELFVLRLSIRSNTAEDKFVFCNGLVLHRLQCLRGFGEWLDSIKDFSLNLQSLNLDIQALACLSALSMITERHGLKEPKRVEELCNKITSSLKDHQSKGQALEPTESKVLGALVELRKICTLGLQRIFYLKLEDLVSPPSIIDKLFLDTLPF

SEQ ID NO: 11697 - protein, 556 aa, Homo sapiens
MRVFCVGLLLFSVTWAAPTFQPQTEKTKQSCVEEQRITYKGHYEKHGHYVFKCVYMSPEKKNQTDVKQEEKNKDNIGFHHLGKRINQELSSKENIVQERKKDLSLSEASENKGSSKSQNYFTNRQRLNKEYSISNKENTHNGLRMSIYPKSTGNKGFEDGDDAISKLHDQEEYGAALIRNNMQHIMGPVTAIKLLGEENKENTPRNVLNIIPASMNYAKAHSKDKKKPQRDSQAQKSPVKSKSTHRIQHNIDYLKHLSKVKKIPSDFEGSGYTDLQERGDNDISPFSGDGQPFKDIPGKGEATGPDLEGKDIQTGFAGPSEAESTHLDTKKPGYNEIPEREENGGNTIGTRDETAKEADAVDVSLVEGSNDIMGSTNFKELPGREGNRVDAGSQNAHQGKVEFHYPPAPSKEKRKEGSSDAAESTNYNEIPKNGKGSTRKGVDHSNRNQATLNEKQRFPSKGKSQGLPIPSRGLDNEIKNEMDSFNGPSHENIITHGRKYHYVPHRQNNSTRNKGMPQGKGSWGRQPHSNRRFSSRRRDDSSESSDSGSSSESDGD

SEQ ID NO: 11698 - protein, 905 aa, Homo sapiens
RILFAQSEPLVPSAAALARMDAYALAPYAGAGPLVGVPGVGAPTPFSFPKRAHLLFPPPREEGLGFPSFLDPDRHFLSAFRREEPPRMPGGALEPHAGLRPLSRRLEAEAGPAGELAGARGFFQARHLEMDAFKRHSFATEGAGAVENFAAARQVSRQTFLSHGDDFRFQTSHFHRDQLYQQQYQWDPQLTPARPQGLFEKLRGGRAGFADPDDFTLGAGPRFPELGPDGHQRLDYVPSSASREVRHGSDPAFAPGPRGLEPSGAPRPNLTQRFPCQAAARPGPDPAPEAEPERRGGPEGRAGLRRWRLASYLSGCHGEDGGDDGLPAPMEAEAYEDDVLAPGGRAPAGDLLPSAFRVPAAFPTKVPVPGPGSGGNGPEREGPEEPGLAKQDSFRSRLNPLVQRSSRLRSSLIFSTSQAEGAAGAAAATEKVQLLHKEQTVSETLGPGGEAVRSAASTKVAELLEKYKGPARDPGGGAGAITVASHSKAVVSQAWREEVAAPGAVGGERRSLESCLLDLRDSFAQQLHQEAERQPGAASLTAAQLLDTLGRSGSDRLPSRFLSAQSHSTSPQGLDSPLPLEGSGAHQVLHNESKGSPTSAYPERKGSPTPGFSTRRGSPTTGFIEQKGSPTSAYPERRGSPVPPVPERRSSPVPPVPERRGSLTLTISGESPKAGPAEEGPSGPMEVLRKGSLRLRQLLSPKGERRMEDEGGFPVPQENGQPESPRRLSLGQGDSTEAATEERGPRARLSSATANALYSSNLRDDTKAILEQISAHGQKHRAVPAPSPGPTHNSPELGRPPAAGVLAPDMSDKDKCSAIFRSDSLGTQGRLSRTLPASAEERDRLLRRMESMRKEKRVYSRFEVFCKKEEASSPGAGEGPAEEGTRDSKVGKFVPKILGTFKSKK

SEQ ID NO: 11699 - protein, 193 aa, Homo sapiens
MLPGLRRLLQAPASACLLLMLLALPLAAPSCPMLCTCYSSPPTVSCQANNFSSVPLSLPPSTQRLFLQNNLIRTLRPGTFGSNLLTLWLFSNNLSTIYPGTFRHLQALEELDLGDNRHLRSLEPDTFQGLERLQSLHLYRCQLSSLPGNIFRGLVSLQYLYLQENSLLHLQGPLPKGLCSCFSHPPSSLPTSR

SEQ ID NO: 11700 - protein, 1078 aa, Homo sapiens
MAPRKRGGRGISFIFCCFRNNDHPEITYRLRNDSNFALQTMEPALPMPPVEELDVMFSELVDELDLTDKHREAMFALPAEKKWQIYCSKKKDQEENKGATSWPEFYIDQLNSMAARKSLLALEKEEEEERSKTIESLKTALRTKPMRFVTRFIDLDGLSCILNFLKTMDYETSESRIHTSLIGCIKALMNNSQGRAHVLAHSESINVIAQSLSTENIKTKVAVLEILGAVCLVPGGHKKVLQAMLHYQKYASERTRFQTLINDLDKSTGRYRDEVSLKTAIMSFINAVLSQGAGVESLDFRLHLRYEFLMLGIQPVIDKLREHENSTLDRHLDFFEMLRNEDELEFAKRFELVHIDTKSATQMFELTRKRLTHSEAYPHFMSILHHCLQMPYKRSGNTVQYWLLLDRIIQQIVIQNDKGQDPDSTPLENFNIKNVVRMLVNENEVKQWKEQAEKMRKEHNELQQKLEKKERECDAKTQEKEEMMQTLNKMKEKLEKETTEHKQVKQQVADLTAQLHELSRRAVCASIPGGPSPGAPGGPFPSSVPGSLLPPPPPPPLPGGMLPPPPPPLPPGGPPPPPGPPPLGAIMPPPGAPMGLALKKKSIPQPTNALKSFNWSKLPENKLEGTVWTEIDDTKVFKILDLEDLERTFSAYQRQQDFFVNSNSKQKEADAIDDTLSSKLKVKELSVIDGRRAQNCNILLSRLKLSNDEIKRAILTMDEQEDLPKDMLEQLLKFVPEKSDIDLLEEHKHELDRMAKADRFLFEMSRINHYQQRLQSLYFKKKFAERVAEVKPKVEAIRSGSEEVFRSGALKQLLEVVLAFGNYMNKGQRGNAYGFKISSLNKIADTKSSIDKNITLLHYLITIVENKYPSVLNLNEELRDIPQAAKVNMTELDKEISTLRSGLKAVETELEYQKSQPPQPGDKFVSVVSQFITVASFSFSDVEDLLAEAKDLFTKAVKHFGEEAGKIQPDEFFGIFDQFLQAVSEAKQENENMRKKKEEEERRARMEAQLKEQRERERKMRKAKENSEESGEFDDLVSALRSGEVFDKDLSKLKRNRKRITNQMTDSSRERPITKLNF

SEQ ID NO: 11701 - protein, 435 aa, Homo sapiens
MEPAPARSPRPQQDPARPQEPTMPPPETPSEGRQPSPSPSPTERAPASEEEFQFLRCQQCQAEAKCPKLLPCLHTLCSGCLEASGMQCPICQAPWPLGADTPALDNVFFESLQRRLSVYRQIVDAQAVCTRCKESADFWCFECEQLLCAKCFEAHQWFLKHEARPLAELRNQSVREFLDGTRKTNNIFCSNPNHRTPTLTSIYCRGCSKPLCCSCALLDSSHSELKCDISAEIQQRQEELDAMTQALQEQDSAFGAVHAQMHAAVGQLGRARAETEELIRERVRQVVAHVRAQERELLEAVDARYQRDYEEMASRLGRLDAVLQRIRTGSALVQRMKCYASDQEVLDMHGFLRQALCRLRQEEPQSLQAAVRTDGFDEFKVRLQDLSSCITQGKDAAVSKKASPEAASTPRDPIDVDLLPPPAHALTGPAQSSTH

SEQ ID NO: 11702 - protein, 633 aa, Homo sapiens
MEPAPARSPRPQQDPARPQEPTMPPPETPSEGRQPSPSPSPTERAPASEEEFQFLRCQQCQAEAKCPKLLPCLHTLCSGCLEASGMQCPICQAPWPLGADTPALDNVFFESLQRRLSVYRQIVDAQAVCTRCKESADFWCFECEQLLCAKCFEAHQWFLKHEARPLAELRNQSVREFLDGTRKTNNIFCSNPNHRTPTLTSIYCRGCSKPLCCSCALLDSSHSELKCDISAEIQQRQEELDAMTQALQEQDSAFGAVHAQMHAAVGQLGRARAETEELIRERVRQVVAHVRAQERELLEAVDARYQRDYEEMASRLGRLDAVLQRIRTGSALVQRMKCYASDQEVLDMHGFLRQALCRLRQEEPQSLQAAVRTDGFDEFKVRLQDLSSCITQGKDAAVSKKASPEAASTPRDPIDVDLPEEAERVKAQVQALGLAEAQPMAVVQSVPGAHPVPVYAFSIKGPSYGEDVSNTTTAQKRKCSQTQCPRKVIKMESEEGKEARLARSSPEQPRPSTSKAVSPPHLDGPPSPRSPVIGSEVFLPNSNHVASGAGEAEERVVVISSSEDSDAENSSSRELDDSSSESSDLQLEGPSTLRVLDENLADPQAEDRPLVFFDLKIDNESGFSWGYPHPFLI

SEQ ID NO: 11703 - protein, 389 aa, Homo sapiens [sequence omitted]

SEQ ID NO: 11704 - protein, 1218 aa, Homo sapiens
MAFTERVNSSGNSLYNDDRNLLRIREKERRNQEAHQEKEAFPEKIPLFGEPYKTAKGDELSSRIQNMLGNYEEVKEFLSTKSHTHRLDASENRLGKPKYPLIPDKGSSIPSSSFHTSVHHQSIHTPASGPLSVGNISHNPKMAQPRTEPMPSLHAKSCGPPDSQHLTQDRLGQEGFGSSHHKKGDRRADGDHCASVTDSAPERELSPLISLPSPVPPLSPIHSNQQTLPRTQGSSKVHGSSNNSKGYCPAKSPKDLAVKVHDKETPQDSLVAPAQPPSQTFPPPSLPSKSVAMQQKPTAYVRPMDGQDQAPSESPELKPLPEDYRQQTFEKTDLKVPAKAKLTKLKMPSQSVEQTYSNEVHCVEEILKEMTHSWPPPLTAIHTPSTAEPSKFPFPTKDSQHVSSVTQNQKQYDTSSKTHSNSQQGTSSMLEDDLQLSDSEDSDSEQTPEKPPSSSAPPSAPQSLPEPVASAHSSSAESESTSDSDSSSDSESESSSSDSEENEPLETPAPEPEPPTTNKWQLDNWLTKVSQPAAPPEGPRSTEPPRRHPESKGSSDSATSQEHSESKDPPPKSSSKAPRAPPEAPHPGKRSCQKSPAQQEPPQRQTVGTKQPKKPVKASARAGSRTSLQGEREPGLLPYGSRDQTSKDKPKVKTKGRPRAAASNEPKPAVPPSSEKKKHKSSLPAPSKALSGPEPAKDNVEDRTPEHFALVPLTESQGPPHSGSGSRTSGCRQAVVVQEDSRKDRLPLPLRDTKLLSPLRDTPPPQSLMVKITLDLLSRIPQPPGKGSRQRKAEDKQPPAGKKHSSEKRSSDSSSKLAKKRKGEAERDCDNKKIRLEKEIKSQSSSSSSSHKESSKTKPSRPSSQSSKKEMLPPPPVSSSSQKPAKPALKRSRREADTCGQDPPKSASSTKSNHKDSSIPKQRRVEGKGSRSSSEHKGSSGDTANPFPVPSLPNGNSKPGKPQVKFDKQQADLHMREAKKMKQKAELMTDRVGKAFKYLEAVLSFIECGIATESESQSSKSAYSVYSETVDLIKFIMSLKSFSDATAPTQEKIFAVLCMRCQSILNMAMFRCKKDIAIKYSRTLNKHFESSSKVAQAPSPCIARSTGTPSPLSPMPSPASSVGSQSSAGSVGSSGVAATISTPVTIQNMTSSYVTITSHVLTAFDLWEQAEALTRKNKEFFARLSTNVCTLALNSSLVDLVHYTRQGFQQLQELTKTP

SEQ ID NO: 11705 - protein, 799 aa, Homo sapiens
MKPSPAGTAKELEPPAPARGEQRTAEPEGRWREKGEADTERQRTRERQEATLAGLAELEYLRQRQELLVRGALRGAGGAGAAAPRAGELLGEAAQRSRLEEKFLEENILLLRKQLNCLRRRDAGLLNQLQELDKQISDLRLDVEKTSEEHLETDSRPSSGFYELSDGASGSLSNSSNSVFSECLSSCHSSTCFCSPLEATLSLSDGCPKSADVNPKYQCDLVSKNGNDVYRYPSPLHAVAVQSPMFLLCLTGNPLREEDRLGNHASDICGGSELDAVKTDSSLPSPSSLWSASHPSSSKKMDGYILSLVQKKTHPVRTNKPRTSVNADPTKGLLRNGSVCVRAPGGVSQGNSVNLKNSKQACLPSGGIPSLNNGTFSPPKQWSKESKAEQAESKRVPLPEGCPSGAASDLQSKHLPKTAKPASQEHARCSAIGTGESPKESAQLSGASPKESPSRGPAPPQENKVVQPLKKMSQKNSLQGVPPATPPLLSTAFPVEERPALDFKSEGSSQSLEEAHLVKAQFIPGQQPSVRLHRGHRNMGVVKNSSLKHRGPALQGLENGLPTVREKTRAGSKKCRFPDDLDTNKKLKKASSKGRKSGGGPEAGVPGRPAGGGHRAGSRAHGHGREAVVAKPKHKRTDYRRWKSSAEISYEEALRRARRGRRENVGLYPAPVPLPYASPYAYVASDSEYSAECESLFHSTVVDTSEDEQSNYTTNCFGDSESSVSEGEFVGESTTTSDSEESGGLIWSQFVQTLPIQTVTAPDLHNHPAKTFVKIKASHNLKKKILRFRSGSLKLMTTV

SEQ ID NO: 11706 - protein, 1203 aa, Homo sapiens
MKAADEPAYLTVGTDVSAKYRGAFCEAKIKTVKRLVKVKVLLKQDNTTQLVQDDQVKGPLRVGAIVETRTSDGSFQEAIISKLTDASWYTVVFDDGDERTLRRTSLCLKGERHFAESETLDQLPLTNPEHFGTPVIAKKTNRGRRSSLPVTEDEKEEESSEEEDEDKRRLNDELLGKVVSVVSATERTEWYPALVISPSCNDDITVKKDQCLVRSFIDSKFYSIARKDIKEVDILNLPESELSTKPGLQKASIFLKTRVVPDNWKMDISEILESSSSDDEDGPAEENDEEKEKEAKKTEEEVPEEELDPEERDNFLQQLYKFMEDRGTPINKPPVLGYKDLNLFKLFRLVYHQGGCDNIDSGAVWKQIYMDLGIPILNSAASYNVKTAYRKYLYGFEEYCRSANIQFRTVHHHEPKVKEEKKDLEESMEEALKLDQEMPLTEVKSEPEENIDSNSESEREEIELKSPRGRRRIARDVNSIKKEIEEEKTEDKLKDNDTENKDVDDDYETAEKKENELLLGRKNTPKQKEKKIKKQEDSDKDSDEEEEKSQEREETESKCDSEGEEDEEDMEPCLTGTKVKVKYGRGKTQKIYEASIKSTEIDDGEVLYLVHYYGWNVRYDEWVKADRIIWPLDKGGPKKKQKKKAKNKEDSEKDEKRDEERQKSKRGRPPLKSTLSSNMPYGLSKTANSEGKSDSCSSDSETEDALEKNLINEELSLKDELEKNENLNDDKLDEENPKISAHILKENDRTQMQPLETLKLEVGENEQIVQIFGNKMEKTEEVKKEAEKSPKGKGRRSKTKDLSLEIIKISSFGQNEAGSEPHIEAHSLELSSLDNKNFSSATEDEIDQCVKEKKLKRKILGQSSPEKKIRIENGMEMTNTVSQERTSDCIGSEGMKNLNFEQHFERENEGMPSLIAESNQCIQQLTSERFDSPAEETVNIPLKEDEDAMPLIGPETLVCHEVDLDDLDEKDKTSIEDVAVESSESNSLVSIPPALPPVVQHNFSVASPLTLSQDESRSVKSESDITIEVDSIAEESQEGLCERESANGFETNVASGTCSIIVQERESREKGQKRPSDGNSGLMAKKQKRTPKRTSAAAKNEKNGTGQSSDSEDLPVLDNSNELDNMNSTERISFLQEKLQEIRKYYMSLKSEVATIDRRRKRLKKKDREVSHAGASMSSASSDTGMSPSSSSPPQNVLAVECR

SEQ ID NO: 11707 - protein, 226 aa, Homo sapiens
MAAMRWRWWQRLLPWRLLQARGFPQNSAPSLGLGARTYSQGDCSYSRTALYDLLGVPSTATQAQIKAAYYRQCFLYHPDRNSGSAEAAERFTRISQAYVVLGSATLRRKYDRGLLSDEDLRGPGVRPSRTPAPDPGSPRTPPPTSRTHDGSRASPGANRTMFNFDAFYQAHYGEQLERERRLRARREALRKRQEYRSMKGLRWEDTRDTAAIFLIFSIFIIIGFYI

SEQ ID NO: 11708 - protein, 748 aa, Homo sapiens
MEENNDSTENPQQGQGRQNAIKCGWLRKQGGFVKTWHTRWFVLKGDQLYYFKDEDETKPLGTIFLPGNKVSEHPCNEENPGKFLFEVVPGGDRDRMTANHESYLLMASTQNDMEDWVKSIRRVIWGPFGGGIFGQKLEDTVRYEKRYGNRLAPMLVEQCVDFIRQRGLKEEGLFRLPGQANLVKELQDAFDCGEKPSFDSNTDVHTVASLLKLYLRELPEPVIPYAKYEDFLSCAKLLSKEEEAGVKELAKQVKSLPVVNYNLLKYICRFLDEVQSYSGVNKMSVQNLATVFGPNILRPKVEDPLTIMEGTVVVQQLMSVMISKHDCLFPKDAELQSKPQDGVSNNNEIQKKATMGQLQNKENNNTKDSPSRQCSWDKSESPQRSSMNNGSPTALSGSKTNSPKNSVHKLDVSRSPPLMVKKNPAFNKGSGIVTNGSFSSSNAEGLEKTQTTPNGSLQARRSSSLKVSGTKMGTHSVQNGTVRMGILNSDTLGNPTNVRNMSWLPNGYVTLRDNKQKEQAGELGQHNRLSTYDNVHQQFSMMNLDDKQSIDSATWSTSSCEISLPENSNSCRSSTTTCPEQDFFGGNFEDPVLDGPPQDDLSHPRDYESKSDHRSVGGRSSRATSSSDNSETFVGNSSSNHSALHSLVSSLKQEMTKQKIEYESRIKSLEQRNLTLETEMMSLHDELDQERKKFTMIEIKMRNAERAKEDAEKRNDMLQKEMEQFFSTFGELTVEPRRTERGNTIWIQ

SEQ ID NO: 11709 - protein, 1057 aa, Homo sapiens
MLCWGNASFGQLGLGGIDEEIVLEPRKSDFFINKRVRDVGCGLRHTVFVLDDGTVYTCGCNDLGQLGHEKSRKKPEQVVALDAQNIVAVSCGEAHTLALNDKGQVYAWGLDSDGQLGLVGSEECIRVPRNIKSLSDIQIVQVACGYYHSLALSKASEVFCWGQNKYGQLGLGTDCKKQTSPQLLKSLLGIPFMQVAAGGAHSFVLTLSGAIFGWGRNKFGQLGLNDENDRYVPNLLKSLRSQKIVYICCGEDHTAALTKEGGVFTFGAGGYGQLGHNSTSHEINPRKVFELMGSIVTEIACGRQHTSAFVPSSGRIYSFGLGGNGQLGTGSTSNRKSPFTVKGNWYPYNGQCLPDIDSEEYFCVKRIFSGGDQSFSHYSSPQNCGPPDDFRCPNPTKQIWTVNEALIQKWLSYPSGRFPVEIANEIDGTFSSSGCLNGSFLAVSNDDHYRTGTRFSGVDMNAARLLFHKLIQPDHPQISQQVAASLEKNLIPKLTSSLPDVEALRFYLTLPECPLMSDSNNFTTIAIPFGTALVNLEKAPLKVLENWWSVLEPPLFLKIVELFKEVVVHLLKLYKIGIPPSERRIFNSFLHTALKVLEILHRVNEKMGQIIQYDKFYIHEVQELIDIRNDYINWVQQQAYGMDVNHGLTELADIPVTICTYPFVFDAQAKTTLLQTDAVLQMQMAIDQAHRQNVSSLFLPVIESVNPCLILVVRRENIVGDAMEVLRKTKNIDYKKPLKVIFVGEDAVDAGGVRKEFFLLIMRELLDPKYGMFRYYEDSRLIWFSDKTFEDSDLFHLIGVICGLAIYNCTIVDLHFPLALYKKLLKKKPSLDDLKELMPDVGRSMQQLLDYPEDDIEETFCLNFTITVENFGATEVKELVLNGADTAVNKQNRQEFVDAYVDYIFNKSVASLFDAFHAGFHKVCGGKVLLLFQPNELQAMVIGNTNYDWKELEKNTEYKGEYWAEHPTIKIFWEVFHELPLEKKKQFLLFLTGSDRIPILGMKSLKLVIQSTGGGEEYLPVSHTCFNLLDLPKYTEKETLRSKLIQAIDHNEGFSLI

SEQ ID NO: 11710 - protein, 347 aa, Homo sapiens
MLGKIHLLEGDLDKAIEVYKKAVEFSPENTELLTTLGLLYLQLGIYQKAFEHLGNALTYDPTNYKAILAAGSMMQTHGDFDVALTKYRVVACAVPESPPLWNNIGMCFFGKKKYVAAISCLKRANYLAPFDWKILYNLGLVHLTMQQYASAFHFLSAAINFQPKMGELYMLLAVALTNLEDIENAKRAYAEAVHLDKCNPLVNLNYAVLLYNQGEKKNALAQYQEMEKKVSLLKDNSSLEFDSEMVEMAQKLGAALQVGEALVWTKPVKDPKSKHQTTSTSKPASFQQPLGSNQALGQAMSSAAAYRTLPSGAGGTSQFTKPPSLPLEPEPAVESSPTETSEQIREK

SEQ ID NO: 11711 - protein, 957 aa, Homo sapiens
MQPMVMQGCPYTLPRCHDWQAADQFHHSSSLRSTCPHPQVRAAVTSPAPPQDGAGVPCLSLKLLNGSVGASGPLEPPAMNLCWNEIKKKSHNLRARLEAFSDHSGKLQLPLQEIIDWLSQKDEELSAQLPLQGDVALVQQEKETHAAFMEEVKSRGPYIYSVLESAQAFLSQHPFEELEEPHSESKDTSPKQRIQNLSRFVWKQATVASELWEKLTARCVDQHRHIERTLEQLLEIQGAMEELSTTLSQAEGVRATWEPIGDLFIDSLPEHIQAIKLFKEEFSPMKDGVKLVNDLAHQLAISDVHLSMENSQALEQINVRWKQLQASVSERLKQLQDAHRDFGPGSQHFLSSSVQVPWERAISPNKVPYYINHQAQTTCWDHPKMTELYQTLADLNNIKFSAYRTAMKLRRVQKALRLDLVTLTTALEIFNEHDLQASEHVMDVVEVIHCLTALYERLEEERGILVNVPLCVDMSLNWLLNVFDSGRSGKMRALSFKTGIACLCGTEVKEKLQYLFSQVANSGSQCDQRHLGVLLHEAIQVPRQLGEVAAFGGSNVEPSVRSCFRFSTGKPVIEASQFLEWVNLEPQSMVWLAVLHRVTIAEQVKHQTKCSICRQCPIKGFRYRSLKQFNVDICQTCFLTGRASKGNKLHYPIMEYYTPTTSSENMRDFATTLKNKFRSKHYFSKHPQRGYLPVQSVLEADYSETPASSPMWPHADTHSRIEHFASRLAEMESQNCSFFNDSLSPDDSIDEDQYLLRHSSPITDREPAFGQQAPCSVATESKGELQKILAHLEDENRILQGELRRLKWQHEEAAEAPSLADGSTEAATDHRNEELLAEARILRQHKSRLETRMQILEDHNKQLESQLQRLRELLLQPPTESDGSGSAGSSLASSPQQSEGSHPREKGQTTPDTEAADDVGSKSQDVSLCLEDIMEKLRHAFPSVRSSDVTANTLLAS

SEQ ID NO: 11712 - protein, 1006 aa, Homo sapiens
MAAAYLDPNLNHTPNSSTKTHLGTGMERSPGAMERVLKVFHYFESNSEPTTWASIIRHGDATDVRGIIQKIVDSHKVKHVACYGFRLSHLRSEEVHWLHVDMGVSSVREKYELAHPPEEWKYELRIRYLPKGFLNQFTEDKPTLNFFYQQVKSDYMLEIADQVDQEIALKLGCLEIRRSYWEMRGNALEKKSNYEVLEKDVGLKRFFPKSLLDSVKAKTLRKLIQQTFRQFANLNREESILKFFEILSPVYRFDKECFKCALGSSWIISVELAIGPEEGISYLTDKGCNPTHLADFTQVQTIQYSNSEDKDRKGMLQLKIAGAPEPLTVTAPSLTIAENMADLIDGYCRLVNGTSQSFIIRPQKEGERALPSIPKLANSEKQGMRTHAVSVSETDDYAEIIDEEDTYTMPSTRDYEIQRERIELGRCIGEGQFGDVHQGIYMSPENPALAVAIKTCKNCTSDSVREKFLQEALTMRQFDHPHIVKLIGVITENPVWIIMELCTLGELRSFLQVRKYSLDLASLILYAYQLSTALAYLESKRFVHRDIAARNVLVSSNDCVKLGDFGLSRYMEDSTYYKASKGKLPIKWMAPESINFRRFTSASDVWMFGVCMWEILMHGVKPFQGVKNNDVIGRIENGERLPMPPNCPPTLYSLMTKCWAYDPSRRPRFTELKAQLSTILEEEKAQQEERMRMESRRQATVSWDSGGSDEAPPKPSRPGYPSPRSSEGFYPSPQHMVQTNHYQDSTVLDLRGIGQVLPTHLMEERLIRQQQEMEEDQRWLEKEERFLKPDVRLSRGSIDREDGSLQGPIGNQHIYQPVGKPDPAAPPKKPPRPGAPGHLGSLASLSSPADSYNEGVKLQPQEISPPPTANLDRSNDKVYENVTGLVKAVIEMSSKIQPAPPEEYVPMVKEVGLALRTLLATVDETIPLLPASTHREIEMAQKLLNSDLGELINKMKLAQQYVMTSLQQEYKKQMLTAAHALAVDAKNLLDVIDQARLKMLGQTRPH

SEQ ID NO: 11713 - protein, 368 aa, Homo sapiens
MISDPPSNNSWNSVLYLLEDRKLFVGMLGKQQGEEDVRRLFQPFGHIEECTVLRSPDGTSKGCAFVKFGSQGEAQAAIRGLHGSRTMAGASSSLVVKLADTDRERALRRMQQMAGHLGAFHPAPLPLGACGAYTTAILQHQAALLAAAQGPGLGPVAAVAAQMQHVAAFSLVAAPLLPAAAANSPPGSGPGTLPGLPAPIGVNGFGPLTPQTNGQPGSDTLYNNGLSPYPAQSPGVADPLQQAYAGMHHYAAAYPSAYAPVSTAFPQQPSALPQQQREGPEGCNLFIYHLPQEFGDAELIQTFLPFGAVVSAKVFVDRATNQSKCFGFVSFDNPTSAQTAIQAMNGFQIGMKRLKVQLKRPKDANRPY

SEQ ID NO: 11714 - protein, 999 aa, Homo sapiens
MVCSPVTVRIAPPDRRFSRSAIPEQIISSTLSSPSSNAPDPCAKETVLSALKEKEKKRTVEEEDQIFLDGQENKRRRHDSSGSGHSAFEPLVANGVPASFVPKPGSLKRGLNSQSSDDHLNKRSRSSSMSSLTGAYASGIPSSSRNAITSSYSSTRGISQLWKRNGPSSSPFSSPASSRSQTPERPAKKIREEELCHHSSSSTPLAADRESQGEKAADTTPRKKQNSNSQSTPGSSGQRKRKVQLLPSRRGEQLTLPPPPQLGYSITAEDLDLEKKASLQWFNQALEDKSDAASNSVTETPPITQPSFTFTLPAAAPASPPTSLLAPSTNPLLESLKKMQTPPSLPPCPESAGAATTEALSPPKTPSLLPPLGLSQSGPPGLLPSPSFDSKPPTTLLGLIPAPSMVPATDTKAPPTLQAETATKPQATSAPSPAPKQSFLFGTQNTSPSSPAAPAASSAPPMFKPIFTAPPKSEKEGPTPPGPSVTATAPSSSSLPTTTSTTAPTFQPVFSSMGPPASVPLPAPFFKQTTTPATAPTTTAPLFTGLASATSAVAPITSASPSTDSASKPAFGFGINSVSSSSVSTTTSTATAASQPFLFGAPQASAASFTPAMGSIFQFGKPPALPTTTTVTTFSQSLHTAVPTATSSSAADFSGFGSTLATSAPATSSQPTLTFSNTSTPTFNIPFGSSAKSPLPSYPGANPQPAFGAAEGQPPGAAKPALAPSFGSSFTFGNSAAPAAAPTPAPPSMIKVVPAYVPTPIHPIFGGATHSAFGLKATASAFGAPASSQPAFGGSTAVFFGAATSSGFGATTQTASSGSSSSVFGSTTPSPFTFGGSAAPAGSGSFGINVATPGSSTTTGAFSFGAGQSGSTATSTPFAGGLGQNALGTTGQSTPFAFNVSSTTESKPVFGGTATPTFGLNTPAPGVGTSGSSLSFGASSAPAQGFVGVAPFGNTFAHQQEHSPRKGPNNLSKRKLLPAVRAQGLPRRGQASSFPTRKE

SEQ ID NO: 11715 - protein, 261 aa, Homo sapiens
MRLPEQPGEGKPENEKKGDGGALGGGEEPPRSQAPDFPTWEKMPFHHVTAGLLYKGNYLNRSLSAGSDSEQLANISVEELDEIREAFRVLDRDGNGFISKQELGMAMRSLGYMPSEVELAIIMQRLDMDGDGQVDFDEFMTILGPKLVSSEGRDGFLGNTIDSIFWQFDMQRITLEELKHILYHAFRDHLTMKDIENIIINEEESLNETSGNCQTEFEGVHSQKQNRQTCVRKSLICAFAMAFIISVMLIAANQILRSGME

SEQ ID NO: 11716 - protein, 836 aa, Homo sapiens
MLQNVTPHNKLPGEGNAGLLGLGPEAAAPGKRIRKPSLLYEGFESPTMASVPALQLTPANPPPPEVSNPKKPGRVTNQLQYLHKVVMKALWKHQFAWPFRQPVDAVKLGLPDYHKIIKQPMDMGTIKRRLENNYYWAASECMQDFNTMFTNCYIYNKPTDDIVLMAQTLEKIFLQKVASMPQEEQELVVTIPKNSHKKGAKLAALQGSVTSAHQVPAVSSVSHTALYTPPPEIPTTVLNIPHPSVISSPLLKSLHSAGPPLLAVTAAPPAQPLAKKKGVKRKADTTTPTPTAILAPGSPASPPGSLEPKAARLPPMRRESGRPIKPPRKDLPDSQQQHQSSKKGKLSEQLKHCNGILKELLSKKHAAYAWPFYKPVDASALGLHDYHDIIKHPMDLSTVKRKMENRDYRDAQEFAADVRLMFSNCYKYNPPDHDVVAMARKLQDVFEFRYAKMPDEPLEPGPLPVSTAMPPGLAKSSSESSSEESSSESSSEEEEEEDEEDEEEEESESSDSEEERAHRLAELQEQLRAVHEQLAALSQGPISKPKRKREKKEKKKKRKAEKHRGRAGADEDDKGPRAPRPPQPKKSKKASGSGGGSAALGPSGFGPSGGSGTKLQAGVQWRDLGLLQPPLLGFKRFSCLSLPSSQDYRLPKKATKTAPPALPTGYDSEEEEESRPMSYDEKRQLSLDINKLPGEKLGRVVHIIQAREPSLRDSNPEEIEIDFETLKPSTLRELERYVLSCLRKKPRKPYTIKKPVGKTKEELALEKKRELEKRLQDVSGQLNSTKKPPKKANEKTESSSAQQVAVSRLSASSSSSDSSSSSSSSSSSDTSDSDSG

SEQ ID NO: 11717 - protein, 1406 aa, Homo sapiens
MSEIQGTVEFSVELHKFYNVDLFQRGYYQIRVTLKVSSRIPHRLSASIAGQTESSSLHSACVHDSTVHSRVFQILYRNEEVPINDAVVFRVHLLLGGERMEDALSEVDFQLKVDLHFTDSEQQLRDVAGAPMVSSRTLGLHFHPRNGLHHQVPVMFDYFHLSVISVTVHAALVALQQPLISFTRPGRGSWLGKGGPDTGQEQSIISLENLVFGAGYCKPTSSEGSFYITSENCMQHAHKWHRDLCLLLLHAYRGLRLHFLVIMRDIPELPHTELEALAVEETLSQLCSELQMLNNPEKIAEQISKDLAWLTSHMMTLWTQFLDTVTLHSQVTTYLTQEHHTLRVRRFSEAFFYMEHQKLAVLTFQENLIQTHSQLSLDIRNSEYLTSMPPLPAECLDIDGDWNTLPVIFEDRYVDCPATGHNLSVYPNFDVPVTSPTIMNLKDKEDNCMVNSNLSFREDLVLSTIKPSQMDSDEEVIRCPEPGENVATQNHMDMCSESQVYISIGEFQNKAGVPEDECWTGQTSDAGTYPVADVDTSRRSPGPEDGQAPVLTYIDVKSSNKNPSRAEPLVAFNAQHESRSSRDKYGLDRTGLSKVVVGGSHQNAISSDKTTLHELSTLGKGIDQEGKMVLLSLKLTPSEPCDPLSSTLREPLDIRSSLKDSHTEEQEELSVLSGVIKRSSSIISDSGIESEPSSVAWSEARSRALELPSDREVLHPFVRRHALHRNSLEGGHTESNTSLPSGIQASLTSISSLPFEEDEREVALTKLTKSVSAPHISSPEEAAEDADTKQQDGGFAEPSDMHSKSQGSPGSCSQLCGDSGTDAGADHPLVEIVLDADNQQGPGYIDIPKGKGKQFDAQGHCLPDGRTENTPGVETKGLNLKIPRVIALENPRTRSLHRALEETPKGMPKDLNVGQQALSNSGISEVEGLSQHQVPELSCTSAADAINRNSTGQQSQSGSPCIMDDTAFNRGVNAFPEAKHKAGTVCPTVTHSVHSQVLKNQELKAGTSIMGSHLTSAETFTLDSLKAVEVVNLSVSCTATCLPFSSVPKETPARAGFSSKQTLFPITHQPLGSFGVVSTHSSTLDEEVSERMFSFYQAKEKFKKELKIEGFLYSDLTVLASDIPYFPPEEEEENLEDGIHLVVCVHGLDGNSADLRLVKTFIELGLPGGKLDFLMSEKNQMDTFADFDTMTDRLLDEIIQHIQLYNLSISRISFIGHSLGNIIIRSVLTRPRFRYYLNKLHTFLSLSGPHLGTLYNNSTLVSTGLWLMQKLKKSGSLLQLTFRDNADLRKCFLYQLSQKTGLQYFKNVVLVASPQDRYVPFHSARIEMCKTALKDRHTGPVYAEMINNLLGPLVEAKDCTLIRHNVFHALPNTANTLIGRAAHIAVLDSELFLEKFFLVAGLNYFK

SEQ ID NO: 11718 - protein, 1306 aa, Homo sapiens
MEFYESAYFIVLIPSIVITVIFLFFWLFMKETLYDEVLAKQKREQKLIPTKTDKKKAEKKKNKKKEIQNGNLHESDSESVPRDFKLSDALAVEDDQVAPVPLNVVETSSSVRERKKKEKKQKPVLEEQVIKESDASKIPGKKVEPVPVTKQPTPPSEAAASKKKPGQKKSKNGSDDQDKKVETLMVPSKRQEALPLHQETKQESGSGKKKASSKKQKTENVFVDEPLIHATTYIPLMDNADSSPVVDKREVIDLLKPDQVEGIQKSGTKKLKTETDKENAEVKFKDFLLSLKTMMFSEDEALCVVDLLKEKSGVIQDALKKSSKGELTTLIHQLQEKDKLLAAVKEDAAATKDRCKQLTQEMMTEKERSNVVITRMKDRIGTLEKEHNVFQNKIHVSYQETQQMQMKFQQVREQMEAEIAHLKQENGILRDAVSNTTNQLESKQSAELNKLRQDYARLVNELTEKTGKLQQEEVQKKNAEQAATQLKVQLQEAERRWEEVQSYIRKRTAEHEAAQQDLQSKFVAKENEVQSLHSKLTDTLVSKQQLEQRLMQLMESEQKRVNKEESLQMQVQDILEQNEALKAQIQQFHSQIAAQTSASVLAEELHKVIAEKDKQIKQTEDSLASERDRLTSKEEELKDIQNMNFLLKAEVQKLQALANEQAAAAHELEKMQQSVYVKDDKIRLLEEQLQHEISNKMEEFKILNDQNKALKSEVQKLQTLVSEQPNKDVVEQMEKCIQEKDEKLKTVEELLETGLIQVATKEEELNAIRTENSSLTKEVQDLKAKQNDQVSFASLVEELKKVIHEKDGKIKSVEELLEAELLKVANKEKTVQLSITSKVQELQNLLKGKEEQMNTMKAVLEEKEKDLANTGKWLQDLQEENESLKAHVQEVAQHNLKEASSASQFEELEIVLKEKENELKRLEAMLKERESDLSSKTQLLQDVQDENKLFKSQIEQLKQQNYQQASSFPPHEELLKVISEREKEISGLWNELDSLKDAVEHQRKKNNDLREKNWEAMEALASTEKMLQDKVNKTSKERQQQVEAVELEAKEVLKKLFPKVSVPSNLSYGEWLHGFEKKAKECMAGTSGSEEVKVLEHKLKEADEMHTLLQLECEKYKSVLAETEGILQKLQRSVEQEENKWKVKVDESHKTIKQMQSSFTSSEQELERLRSENKDIENLRREREHLEMELEKAEMERSTYVTEVRELKAQLNETLTKLRTEQNERQKVAGDLHKAQQSLELIQSKIVKAAGDTTVIENSDVSPETESSEKETMSVSLNQTVTQLQQLLQAVNQQLTKEKEHYQVLE

SEQ ID NO: 11719 - protein, 1306 aa, Homo sapiens; identical to SEQ ID NO: 11718

SEQ ID NO: 11720 - protein, 1357 aa, Homo sapiens
MEFYESAYFIVLIPSIVITVIFLFFWLFMKETLYDEVLAKQKREQKLIPTKTDKKKAEKKKNKKKEIQNGNLHESDSESVPRDFKLSDALAVEDDQVAPVPLNVVETSSSVRERKKKEKKQKPVLEEQVIKESDASKIPGKKVEPVPVTKQPTPPSEAAASKKKPGQKKSKNGSDDQDKKVETLMVPSKRQEALPLHQETKQESGSGKKKASSKKQKTENVFVDEPLIHATTYIPLMDNADSSPVVDKREVIDLLKPDQVEGIQKSGTKKLKTETDKENAEVKFKDFLLSLKTMMFSEDEALCVVDLLKEKSGVIQDALKKSSKGELTTLIHQLQEKDKLLAAVKEDAAATKDRCKQLTQEMMTEKERSNVVITRMKDRIGTLEKEHNVFQNKIHVSYQETQQMQMKFQQVREQMEAEIAHLKQENGILRDAVSNTTNQLESKQSAELNKLRQDYARLVNELTEKTGKLQQEEVQKKNAEQAATQLKVQLQEAERRWEEVQSYIRKRTAEHEAAQQDLQSKFVAKENEVQSLHSKLTDTLVSKQQLEQRLMQLMESEQKRVNKEESLQMQVQDILEQNEALKAQIQQFHSQIAAQTSASVLAEELHKVIAEKDKQIKQTEDSLASERDRLTSKEEELKDIQNMNFLLKAEVQKLQALANEQAAAAHELEKMQQSVYVKDDKIRLLEEQLQHEISNKMEEFKILNDQNKALKSEVQKLQTLVSEQPNKDVVEQMEKCIQEKDEKLKTVEELLETGLIQVATKEEELNAIRTENSSLTKEVQDLKAKQNDQVSFASLVEELKKVIHEKDGKIKSVEELLEAELLKVANKEKTVQDLKQEIKALKEEIGNVQLEKAQQLSITSKVQELQNLLKGKEEQMNTMKAVLEEKEKDLANTGKWLQDLQEENESLKAHVQEVAQHNLKEASSASQFEELEIVLKEKENELKRLEAMLKERESDLSSKTQLLQDVQDENKLFKSQIEQLKQQNYQQASSFPPHEELLKVISEREKEISGLWNELDSLKDAVEHQRKKNNDLREKNWEAMEALASTEKMLQDKVNKTSKERQQQVEAVELEAKEVLKKLFPKVSVPSNLSYGEWLHGFEKKAKECMAGTSGSEEVKVLEHKLKEADEMHTLLQLECEKYKSVLAETEGILQKLQRSVEQEENKWKVKVDESHKTIKQMQSSFTSSEQELERLRSENKDIENLRREREHLEMELEKAEMERSTYVTEVRELKDLLTELQKKLDDSYSEAVRQNEELNLLKAQLNETLTKLRTEQNERQKVAGDLHKAQQSLELIQSKIVKAAGDTTVIENSDVSPETESSEKETMSVSLNQTVTQLQQLLQAVNQQLTKEKEHYQVLE

SEQ ID NO: 11721 - protein, 913 aa, Homo sapiens
MKDSENKGASSPDMEPSYGGGLFDMVKGGAGRLFSNLKDNLKDTLKDTSSRVIQSVTSYTKGDLDFTYVTSRIIVMSFPLDNVDIGFRNQVDDIRSFLDSRHLDHYTVYNLSPKSYRTAKFHSRVSECSWPIRQAPSLHNLFAVCRNMYNWLLQNPKNVCVVHCLDGRAASSILVGAMFIFCNLYSTPGPAIRLLYAKRPGIGLSPSHRRYLGYMCDLLADKPYRPHFKPLTIKSITVSPIPFFNKQRNGCRPYCDVLIGETKIYSTCTDFERMKEYRVQDGKIFIPLNITVQGDVVVSMYHLRSTIGSRLQAKVTNTQIFQLQFHTGFIPLDTTVLKFTKPELDACDVPEKYPQLFQVTLDVELQPHDKVIDLTPPWEHYCTKDVNPSILFSSHQEHQDTLALGGQAPIDIPPDNPRHYGQSGFFASLCWQDQKSEKSFCEEDHAALVNQESEQSDDELLTLSSPHGNANGDKPHGVKKPSKKQQEPAAPPPPEDVDLLGLEGSAMSNSFSPPAAPPTNSELLSDLFGGGGAAGPTQAGQSGVEDVFHPSGPASTQSTPRRSATSTSASPTLRVGEGATFDPFGAPSKPSGQDLLGSFLNTSSASSDPFLQPTRSPSPTVHASSTPAVNIQPDVSGGWDWHAKPGGFGMGSKSAATSPTGSSHGTPTHQSKPQTLDPFADLGTLGSSSFASKPTTPTGLGGGFPPLSSPQKASPQPMGGGWQQGGAYNWQQPQPKPQPSMPHSSPQNRPNYNVSFSAMPGGQNERGKGSSNLEGKQKAADFEDLLSGQGFNAHKDKKGPRTIAEMRKEEMAKEMDPEKLKILEWIEGKERNIRALLSTMHTVLWAGETKWKPVGMADLVTPEQVKKVYRKAVLVVHPDKATGQPYEQYAKMIFMELNDAWSEFENQGQKPLY

SEQ ID NO: 11722 - protein, 1581 aa, Homo sapiens
MVQKKKFCPRLLDYLVIVGARHPSSDSVAQTPELLRRYPLEDHTEFPLPPDVVFFCQPEGCLSVRQRRMSLRDDTSFVFTLTDKDTGVTRYGICVNFYRSFQKRISKEKGEGGAGSRGKEGTHATCASEEGGTESSESGSSLQPLSADSTPDVNQSPRGKRRAKAGSRSRNSTLTSLCVLSHYPFFSTFRECLYTLKRLVDCCSERLLGKKLGIPRGVQRDTMWRIFTGSLLVEEKSSALLHDLREIEAWIYRLLRSPVPVSGQKRVDIEVLPQELQPALTFALPDPSRFTLVDFPLHLPLELLGVDACLQVLTCILLEHKVVLQSRDYNALSMSVMAFVAMIYPLEYMFPVIPLLPTCMASAEQLLLAPTPYIIGVPASFFLYKLDFKMPDDVWLVDLDSNRVIAPTNAEVLPILPEPESLELKKHLKQALASMSLNTQPILNLEKFHEGQEIPLLLGRPSNDLQSTPSTEFNPLIYGNDVDSVDVATRVAMVRFFNSANVLQGFQMHTRTLRLFPRPVVAFQAGSFLASRPRQTPFAEKLARTQAVEYFGEWILNPTNYAFQRIHNNMFDPALIGDKPKWYAHQLQPIHYRVYDSNSQLAEALSVPPERDSDSEPTDDSGSDSMDYDDSSSSYSSLGDFVSEMMKCDINGDTPNVDPLTHAALGDASEVEIDELQNQKEAEEPGPDSENSQENPPLRSSSSTTASSSPSTVIHGANSEPADSTEMDDKAAVGVSKPLPSVPPSIGKSNVDRRQAEIGEGSVRRRIYDNPYFEPQYGFPPEEDEDEQGESYTPRFSQHVSGNRAQKLLRPNSLRLASDSDAESDSRASSPNSTVSNTSTEGFGGIMSFASSLYRNHSTSFSLSNLTLPTKGAREKATPFPSLKVFGLNTLMEIVTEAGPGSGEGNRRALVDQKSSVIKHSPTVKREPPSPQGRSSNSSENQQFLKEVVHSVLDGQGVGWLNMKKVRRLLESEQLRVFVLSKLNRMVQSEDDARQDIIPDVEISRKVYKGMLDLLKCTVLSLEQSYAHAGLGGMASIFGLLEIAQTHYYSKEPDKRKRSPTESVNTPVGKDPGLAGRGDPKAMAQLRVPQLGPRAPSATGKGPKELDTRSLKEENFIASIELWNKHQEVKKQKALEKQRPEVIKPVFDLGETEEKKSQISADSGVSLTSSSQRTDQDSVIGVSPAVMIRSSSQDSEVSTVVSNSSGETLGADSDLSSNAGDGPGGEGSVHLASSRGTLSDSEIETNSATSTIFGKAHSLKPSIKEKLAGSPIRTSEDVSQRVYLYEGLLGRDKGSMWDQLEDAAMETFSISKERSTLWDQMQFWEDAFLDAVMLEREGMGMDQGPQEMIDRYLSLGEHDRKRLEDDEDRLLATLLHNLISYMLLMKVNKNDIRKKVRRLMGKSHIGLVYSQQINEVLDQLANLNGRDLSIWSSGSRHMKKQTFVVHAGTDTNGDIFFMEVCDDCVVLRSNIGTVYERWWYEKLINMTYCPKTKVLCLWRRNGSETQLNKFYTKKCRELYYCVKDSMERAAARQQSIKPGPELGGEFPVQDLKTGEGGLLQVTLEGINLKFMHNQFLKLKKW

SEQ ID NO: 11723 - protein, 386 aa, Homo sapiens
MQRAVSVVARLGFRLQAFPPALCRPLSCAQEVLRRTPLYDFHLAHGGKMVAFAGWSLPVQYRDSHTDSHLHTRQHCSLFDVSHMLQTKILGSDRVKLMESLVVGDIAELRPNQGTLSLFTNEAGGILDDLIVTNTSEGHLYVVSNAGCWEKDLALMQDKVRELQNQGRDVGLEVLDNALLALQGPTAAQVLQAGVADDLRKLPFMTSAVMEVFGVSGCRVTRCGYTGEDGVEISVPVAGAVHLATAILKNPEVKLAGLAARDSLRLEAGLCLYGNDIDEHTTPVEGSLSWTLGKRRRAAMDFPGAKVIVPQLKGRVQRRRVGLMCEGAPMRAHSPILNMEGTKIGTVTSGCPSPSLKKNVAMGYVPCEYSRPGTMLLVELPSGPCF

SEQ ID NO: 11724 - protein, 252 aa, Homo sapiens
MALLDVCGAPRGQRPESALPVAGSGRRSDPGHYSFSMRSPELALPRGMQPTEFFQSLGGDGERNVQIEMAHGTTTLAFKFQHGVIAAVDSRASAGSYINCQYWERLLAKECRLYYLRNGERISVSAASKLLSNMMCQYRGMGLSMGSMICGWDKKGPGLYYVDEHGTRLSGNMFSTGSGNTYAYGVMDSGYRPNLSPEEAYDLGRRAIAYATHRDSYSGGVVNMYHMKEDGWVKVESTDVSDLLHQYREANQ

SEQ ID NO: 11725 - protein, 1189 aa, Homo sapiens
MDDKGDPSNEEAPKAIKPTSKEFRKTWGFRRTTIAKREGAGDAEADPLEPPPPQQQLGLSLRRSGRQPKRTERVEQFLTIARRRGRRSMPVSLEDSGEPTSCPATDAETASEGSVESASETRSGPQSASTAVKERPASSEKVKGGDDHDDTSDSDSDGLTLKELQNRLRRKREQEPTERPLKGIQSRLRKKRREEGPAETVGSEASDTVEGVLPSKQEPENDQGVVSQAGKDDRESKLEGKAAQDIKDEEPGDLGRPKPECEGYDPNALYCICRQPHNNRFMICCDRCEEWFHGDCVGISEARGRLLERNGEDYICPNCTILQVQDETHSETADQQEAKWRPGDADGTDCTSIGTIEQKSSEDQGIKGRIEKAANPSGKKKLKIFQPVIEAPGASKCIGPGCCHVAQPDSVYCSNDCILKHAAATMKFLSSGKEQKPKPKEKMKMKPEKPSLPKCGAQAGIKISSVHKRPAPEKKETTVKKAVVVPARSEALGKEAACESSTPSWASDHNYNAVKPEKTAAPSPSLLYKSTKEDRRSEEKAAAMAASKKTAPPGSAVGKQPAPRNLVPKKSSFANVAAATPAIKKPPSGFKGTIPKRPWLSATPSSGASAARQAGPAPAAATAASKKFPGSAALVGAVRKPVVPSVPMASPAPGRLGAMSAAPSQPNSQIRQNIRRSLKEILWKRVNDSDDLIMTENEVGKIALHIEKEMFNLFQVTDNRYKSKYRSIMFNLKDPKNQGLFHRVLREEISLAKLVRLKPEELVSKELSTWKERPARSVMESRTKLHNESKKTAPRQEAIPDLEDSPPVSDSEEQQESARAVPEKSTAPLLDVFSSMLKDTTSQHRAHLFDLNCKICTGQVPSAEDEPAPKKQKLSASVKKEDLKSKHDSSAPDPAPDSADEVMPEAVPEVASEPGLESASHPNVDRTYFPGPPGDGHPEPSPLEDLSPCPASCGSGVVTTVTVSGRDPRTAPSSSCTAVASAASRPDSTHMVEARQDVPKPVLTSVMVPKSILAKPSSSPDPRYLSVPPSPNISTSESRSPPEGDTTLFLSRLSTIWKGFINMQSVAKFVTKAYPVSGCFDYLSEDLPDTIHIGGRIAPKTVWDYVGKLKSSVSKELCLIRFHPATEEEEVAYISLYSYFSSRGRFGVVANNNRHVKDLYLIPLSAQDPVPSKLLPFEGPGKRRLSGWR

SEQ ID NO: 11726 - protein, 1541 aa, Homo sapiens
MVQKKKFCPRLLDYLVIVGARHPSSDSVAQTPELLRRYPLEDHTEFPLPPDVVFFCQPEGCLSVRQRRMSLRDDTSFVFTLTDKDTGVTRYGICVNFYRSFQKRISKEKGEGGAGSRGKEGTHATCASEEGGTESSESGSSLQPLSADSTPDVNQSPRGKRRAKAGSRSRNSTLTSLCVLSHYPFFSTFRECLYTLKRLVDCCSERLLGKKLGIPRGVQRDTMWRIFTGSLLVEEKSSALLHDLREIEAWIYRLLRSPVPVSGQKRVDIEVLPQELQPALTFALPDPSRFTLVDFPLHLPLELLGVDACLQVLTCILLEHKVVLQSRDYNALSMSVMAFVAMIYPLEYMFPVIPLLPTCMASAEQLLLAPTPYIIGVPASFFLYKLDFKMPDDVWLVDLDSNRVIAPTNAEVLPILPEPESLELKKHLKQALASMSLNTQPILNLEKFHEGQEIPLLLGRPSNDLQSTPSTEFNPLIYGNDVDSVDVATRVAMVRFFNSANVLQGFQMHTRTLRLFPRPVVAFQAGSFLASRPRQTPFAEKLARTQAVEYFGEWILNPTNYAFQRIHNNMFDPALIGDKPKWYAHQLQPIHYRVYDSNSQLAEALSVPPERDSDSEPTDDSGSDSMDYDDSSSSYSSLGDFVSEMMKCDINGDTPNVDPLTHAALGDASEVEIDELQNQKEAEEPGPDSENSQENPPLRSSSSTTASSSPSTVIHGANSEPADSTEMDDKAAVGVSKPLPSVPPSIGKSNVDRRQAEIGEGAQKLLRPNSLRLASDSDAESDSRASSPNSTVSNTSTEGFGGIMSFASSLYRNHSTSFSLSNLTLPTKGAREKATPFPSLKGNRRALVDQKSSVIKHSPTVKREPPSPQGRSSNSSENQQFLKEVVHSVLDGQGVGWLNMKKVRRLLESEQLRVFVLSKLNRMVQSEDDARQDIIPDVEISRKVYKGMLDLLKCTVLSLEQSYAHAGLGGMASIFGLLEIAQTHYYSKEPDKRKRSPTESVNTPVGKDPGLAGRGDPKAMAQLRVPQLGPRAPSATGKGPKELDTRSLKEENFIASIGPEVIKPVFDLGETEEKKSQISADSGVSLTSSSQRTDQDSVIGVSPAVMIRSSSQDSEVSNSSGETLGADSDLSSNAGDGPGGEGSVHLASSRGTLSDSEIETNSATSTIFGKAHSLKPSIKEKLAGSPIRTSEDVSQRVYLYEGLLGKERSTLWDQMQFWEDAFLDAVMLEREGMGMDQGPQEMIDRYLSLGEHDRKRLEDDEDRLLATLLHNLISYMLLMKVNKNDIRKKVRRLMGKSHIGLVYSQQINEVLDQLANLNGRDLSIWSSGSRHMKKQTFVVHAGTDTNGDIFFMEVCDDCVVLRSNIGTVYERWWYEKLINMTYCPKTKVLCLWRRNGSETQLNKFYTKKCRELYYCVKDSMERAAARQQSIKPGPELGGEFPVQDLKTGEGGLLQVTLEGINLKFMHNQVFIELNHIKKCNTVRGVFVLEEFVPEIKEVVSHKYKTPMAHEICYSVLCLFSYVAAVHSSEEDLRTPPRPVSS

SEQ ID NO: 11727 - protein, 509 aa, Homo sapiens
MELKKSPDGGWGWVIVFVSFLTQFLCYGSPLAVGVLYIEWLDAFGEGKGKTAWVGSLASGVGLLASPVCSLCVSSFGARPVTIFSGFMVAGGLMLSSFAPNIYFLFFSYGIVVGLGCGLLYTATVTITCQYFDDRRGLALGLISTGSSVGLFIYAALQRMLVEFYGLDGCLLIVGALALNILACGSLMRPLQSSDCPLPKKIAPEDLPDKYSIYNEKGKNLEENINILDKSYSSEEKCRITLANGDWKQDSLLHKNPTVTHTKEPETYKKKVAEQTYFCKQLAKRKWQLYKNYCGETVALFKNKVFSALFIAILLFDIGGFPPSLLMEDVARSSNVKEEEFIMPLISIIGIMTAVGKLLLGILADFKWINTLYLYVATLIIMGLALCAIPFAKSYVTLALLSGILGFLTGNWSIFPYVTTKTVGIEKLAHAYGILMFFAGLGNSLGPPIVGWFYDWTQTYDIAFYFSGFCVLLGGFILLLAALPSWDTCNKQLPKPAPTTFLYKVASNV

SEQ ID NO: 11728 - protein, 598 aa, Homo sapiens
MKVGWPGESCWQVGLAVEDSPALGAPRVGALPDVVPEGTLLNMVLRRMHRPRSCSYQLLLEHQRPSCIQGLRWTPLTNSEESLDFSESLEQASTERVLRAGRQLHRHLLATCPNLIRDRKYHLRLYRQCCSGRELVDGILALGLGVHSRSQVVGICQVLLDEGALCHVKHDWAFQDRDAQFYRFPGPEPEPVRTHEMEEELAEAVALLSQRGPDALLTVALRKPPGQRTDEELDLIFEELLHIKAVAHLSNSVKRELAAVLLFEPHSKAGTVLFSQGDKGTSWYIIWKGSVNVVTHGKGLVTTLHEGDDFGQLALVNDAPRAATIILREDNCHFLRVDKQDFNRIIKDVEAKTMRLEEHGKVVLVLERASQGAGPSRPPTPGRNRYTVMSGTPEKILELLLEAMGPDSSAHDPTETFLSDFLLTHRVFMPSAQLCAALLHHFHVEPAGGSEQERSTYVCNKRQQILRLVSQWVALYGSMLHTDPVATSFLQKLSDLVGRDTRLSNLLREQWPERRRCHRLENGCGNASPQMKVSAWPQFLSSAPPGLQAPPSPPDPEGLCGRGKLSSHRHTLGSLIGVHGALAACGALGQAVPGGAEA

SEQ ID NO: 11729 - protein, 218 aa, Homo sapiens
ELCTGCGSRLRSPFSFVYLPRWFSSVLASCPKKPVSSYLRFSKEQLPIFKAQNPDAKTTELIRRIAQRWRELPDSKKKIYQDAYRAEWQVYKEEISRFKEQLTPSQIMSLEKEIMDKHLKRKAMTKKKELTLLGKPKRPRSAYNVYVAERFQEAKGDSPQEKLKTVKENWKNLSDSEKEVSITVVSLKCLLRISVRECIRARLDSCEDNLVLLIIQVF

SEQ ID NO: 11730 - protein, 1017 aa, Homo sapiens
MSKKPPNRPGITFEIGARLEALDYLQKWYPSRIEKIDYEEGKMLVHFERWSHRYDEWIYWDSNRLRPLERPALRKEGLKDEEDFFDFKAGEEVLARWTDCRYYPAKIEAINKEGTFTVQFYDGVIRCLKRMHIKAMPEDAKGQVKSQHPLSWCCPIDPAGSCNQSMGSEDWIALVKAAAAAAAKNKTGSKPRTSANSNKDKDKDERKWFKVPSKKEETSTCIATPDVEKKEDLPTSSETFGLHVENVPKMVFPQPESTLSNKRKNNQGNSFQAKRARLNKITGLLASKAVGVDGAEKKEDYNETAPMLEQAISPKPQSQKKNEADISSSANTQKPALLSSTLSSGKARSKKCKHESGDSSGCIKPPKSPLSPELIQVEDLTLVSQLSSSVINKTSPPQPVNPPRPFKHSERRRRSQRLATLPMPDDSVEKVSSPSPATDGKVFSISSQNQQESSVPEVPDVAHLPLEKLGPCLPLDLSRGSEVTAPVASDSSYRNECPRAEKEDTQMLPNPSSKAIADGRGAPAAAGISKTEKKVKLEDKSSTAFGKRKEKDKERREKRDKDHYRPKQKKKKKKKKKSKQHDYSDYEDSSLEFLERCSSPLTRSSGSSLASRSMFTEKTTTYQYPRAILSVDLSGENLSDVDFLDDSSTESLLLSGDEYNQDFDSTNFEESQDEDDALNEIVRCICEMDEENGFMIQCEECLCWQHSVCMGLLEESIPEQYICYICRDPPGQRWSAKYRYDKEWLNNGRMCGLSFFKENYSHLNAKKIVSTHHLLADVYGVTEVLHGLQLKIGILKNKHHPDLHLWACSGKRKDQDQIIAGVEKKIAQDTVNREEKKYVQNHKEPPRLPLKMEGTYITSEHSYQKPQSFGQDCKSLADPGSSDDDDVSSLEEEQEFHMRSKNSLQYSAKEHGMPEKNPAEGNTVFVYNDKKGTEDPGDSHLQWQLNLLTHIENVQNEVTSRMDLIEKEVDVLESWLDFTGELEPPDPLARLPQLKRHIKQLLIDMGKVQQIATLCSV

SEQ ID NO: 11731 - protein, 254 aa, Homo sapiens
MAISGVPVLGFFIIAVLMSAQESWAIKEEHVIIQAEFYLNPDQSGEFMFDFDGDEIFHVDMAKKETVWRLEEFGRFASFEAQGALANIAVDKANLEIMTKRSNYTPITNVPPEVTVLTNSPVELREPNVLICFIDKFTPPVVNVTWLRNGKPVTTGVSETVFLPREDHLFRKFHYLPFLPSTEDVYDCRVEHWGLDEPLLKHWEFDAPSPLPETTENVVCALGLTVGLVGIIIGTIFIIKGLRKSNAAERRGPL

SEQ ID NO: 11732 - protein, 992 aa, Homo sapiens
MSKKPPNRPGITFEIGARLEALDYLQKWYPSRIEKIDYEEGKMLVHFERWSHRYDEWIYWDSNRLRPLERPALRKEGLKDEEDFFDFKAGEEVLARWTDCRYYPAKIEAINKEGTFTVQFYDGVIRCLKRMHIKAMPEDAKGQDWIALVKAAAAAAAKNKTGSKPRTSANSNKDKDKDERKWFKVPSKKEETSTCIATPDVEKKEDLPTSSETFVGLHVENVPKMVFPQPESTLSNKRKNNQGNSFQAKRARLNKITGLLASKAVGVDGAEKKEDYNETAPMLEQAISPKPQSQKKNEADISSSANTQKPALLSSTLSSGKARSKKCKHESGDSSGCIKPPKSPLSPELIQVEDLTLVSQLSSSVINKTSPPQPVNPPRPFKHSERRRRSQRLATLPMPDDSVEKVSSPSPATDGKVFSISSQNQQESSVPEVPDVAHLPLEKLGPCLPLDLSRGSEVTAPVASDSSYRNECPRAEKEDTQMLPNPSSKAIADGRGAPAAAGISKTEKKVKLEDKSSTAFGKRKEKDKERREKRDKDHYRPKQKKKKKKKKKSKQHDYSDYEDSSLEFLERCSSPLTRSSGSSLASRSMFTEKTTTYQYPRAILSVDLSGENLSDVDFLDDSSTESLLLSGDEYNQDFDSTNFEESQDEDDALNEIVRCICEMDEENGFMIQCEECLCWQHSVCMGLLEESIPEQYICYICRDPPGQRWSAKYRYDKEWLNNGRMCGLSFFKENYSHLNAKKIVSTHHLLADVYGVTEVLHGLQLKIGILKNKHHPDLHLWACSGKRKDQDQIIAGVEKKIAQDTVNREEKKYVQNHKEPPRLPLKMEGTYITSEHSYQKPQSFGQDCKSLADPGSSDDDDVSSLEEEQEFHMRSKNSLQYSAKEHGMPEKNPAEGNTVFVYNDKKGTEDPGDSHLQWQLNLLTHIENVQNEVTSRMDLIEKEVDVLESWLDFTGELEPPDPLARLPQLKRHIKQLLIDMGKVQQIATLCSV

SEQ ID NO: 11733 - protein, 952 aa, Homo sapiens
MKSARAKTPRKPTVKKGSQTNLKDPVGVYCRVRPLGFPDQECCIEVINNTTVQLHTPEGYRLNRNGDYKETQYSFKQVFGTHTTQKELFDVVANPLVNDLIHGKNGLLFTYGVTGSGKTHTMTGSPGEGGLLPRCLDMIFNSIGSFQAKRYVFKSNDRNSMDIQCEVDALLERQKREAMPNPKTSSSKRQVDPEFADMITVQEFCKAEEVDEDSVYGVFVSYIEIYNNYIYDLLEEVPFDPIKPKPPQSKLLREDKNHNMYVAGCTEVEVKSTEEAFEVFWRGQKKRRIANTHLNRESSRSHSVFNIKLVQAPLDADGDNVLQEKEQITISQLSLVDLAGSERTNRTRAEGNRLREAGNINQSLMTLRTCMDVLRENQMYGTNKMVPYRDSKLTHLFKNYFDGEGKVRMIVCVNPKAEDYEENLQVMRFAEVTQEVEVARPVDKAICGLTPGRRYRNQPRGPVGNEPLVTDVVLQSFPPLPSCEILDINDEQTLPRLIEALEKRHNLRQMMIDEFNKQSNAFKALLQEFDNAVLSKENHMQGKLNEKEKMISGQKLEIERLEKKNKTLEYKIEILEKTTTIYEEDKRNLQQELETQNQKLQRQFSDKRRLEARLQGMVTETTMKWEKECERRVAAKQLEMQNKLWVKDEKLKQLKAIVTEPKTEKPERPSRERDREKVTQRSVSPSPVPLSSNYIAQISNGQQLMSQPQLHRRSNSCSSISVASCISEWEQKIPTYNTPLKVTSIARRRQQEPGQSKTCIVSDRRRGMYWTEGREVVPTFRNEIEIEEDHCGRNAPPIRLRHRRSRSAGDRWVDHKPASNMQTETVMQPHVPHAITVSVANEKALAKCEKYMLTHQELASDGEIETKLIKGDIYKTRGGGQSVQFTDIETLKQESPNGRKRRSSTVAPAQPDGAESEWTDVETRCSVAVEMRAGSQLGPGYQHHAQPKRKKP

SEQ ID NO: 11734 - protein, 603 aa, Homo sapiens
MSPGLLTTRKEALMAFRDVAVAFTQKEWKLLSSAQRTLYREVMLENYSHLVSLGIAFSKPKLIEQLEQGDEPWREENEHLLDLCPEPRTEFQPSFPHLVAFSSSQLLRQYALSGHPTQIFPSSSAGGDFQLEAPRCSSEKGESGETEGPDSSLRKRPSRISRTFFSPHQGDPVEWVEGNREGGTDLRLAQRMSLGGSDTMLKGADTSESGAVIRGNYRLGLSKKSSLFSHQKHHVCPECGRGFCQRSDLIKHQRTHTGEKPYLCPECGRRFSQKASLSIHQRKHSGEKPYVCRECGRHFRYTSSLTNHKRIHSGERPFVCQECGRGFRQKIALLLHQRTHLEEKPFVCPECGRGFCQKASLLQHQSSHTGERPFLCLECGRSFRQQSLLLSHQVTHSGEKPYVCAECGHSFRQKVTLIRHQRTHTGEKPYLCPQCGRGFSQKVTLIGHQRTHTGEKPYLCPDCGRGFGQKVTLIRHQRTHTGEKPYLCPKCGRAFGFKSLLTRHQRTHSEEELYVDRVCGQGLGQKSHLISDQRTHSGEKPCICDECGRGFGFKSALIRHQRTHSGEKPYVCRECGRGFSQKSHLHRHRRTKSGHQLLPQEVF

SEQ ID NO: 11735 - protein, 402 aa, Homo sapiens
MPHSAGGTAGVGLEAAEPTALLTRAEPPSEPTEIRPQKRKKGPAPKMLGNELCSVCGDKASGFHYNVLSCEGCKGFFRRSVIKGAHYICHSGGHCPMDTYMRRKCQECRLRKCRQAGMREECVLSEEQIRLKKLKRQEEEQAHATSLPPRASSPPQILPQLSPEQLGMIEKLVAAQQQCNRRSFSDRLRVTPWPMAPDPHSREARQQRFAHFTELAIVSVQEIVDFAKQLPGFLQLSREDQIALLKTSAIEVMLLETSRRYNPGSESITFLKDFSYNREDFAKAGLQVEFINPIFEFSRAMNELQLNDAEFALLIAISIFSADRPNVQDQLQVERLQHTYVEALHAYVSIHHPHDRLMFPRMLMKLVSLRTLSSVHSEQVFALRLQDKKLPPLLSEIWDVHE

SEQ ID NO: 11736 - protein, 508 aa, Homo sapiens
MSPPGMWQPGVQQPGISQQVPSHPDMSQPGMSQQVPSQPGIRQPDTSQSCKNQTDMSQPDANQSSLSDSNQTGIIQPSPSLLGMNQMDMNQWSASLYEMNQVDMKQPSMSQAGMRQSGTNLPDINQPGMKQPGTWQLGRSQPGMWPQSLSELVLSEASISQPGPPQRAPSQSGPRQSSTSQAGTNQSGISQPVMWQLDMRQSGGSQPSMRQVGTSQSGTSQIGMSQPGTWQTGLSQPVPRQPNKSPPGMWQRGMWQPGMSQQVPSQLGMRQPGTSQSSKNQTGMSHPGRGQPGIWEPGPSQPGLSQQDLNQLVLSQPGLSQPGRSQPSVSQMGMRQTSMDYFQIRHAEAGDCPEILRLIKELAACENMLDAMELTAADLLRDGFGDNPLFYCLIAEVNDQQKPSGKLTVGFAMYYFTYDSWTGKVLYLEDFYVTQAYQGLGIGAEMLKRLSQIAITTQCNCMHFLVVIWNQASINYYTSRGALDLSSEEGWHLFRFNREELLDMAWEE

SEQ ID NO: 11737 - protein, 1952 aa, Homo sapiens
MFRQFYLWTCLASGIILGSLFEICLGQYDDDCKLARGGPPATIVAIDEESRNGTILVDNMLIKGTAGGPDPTIELSLKDNVDYWVLMDPVKQMLFLNSTGRVLDRDPPMNIHSIVVQVQCINKKVGTIIYHEVRIVVRDRNDNSPTFKHESYYATVNELTPVGTTIFTGFSGDNGATDIDDGPNGQIEYVIQYNPDDPTSNDTFEIPLMLTGNIVLRKRLNYEDKTRYFVIIQANDRAQNLNERRTTTTTLTVDVLDGDDLGPMFLPCVLVPNTRDCRPLTYQAAIPELRTPEELNPIIVTPPIQAIDQDRNIQPPSDRPGILYSILVGTPEDYPRFFHMHPRTAELSLLEPVNRDFHQKFDLVIKAEQDNGHPLPAFAGLHIEILDENNQSPYFTMPSYQGYILESAPVGATISDSLNLTSPLRIVALDKDIEDTKDPELHLFLNDYTSVFTVTQTGITRYLTLLQPVDREEQQTYTFSITAFDGVQESEPVIVNIQVMDANDNTPTFPEISYDVYVYTDMRPGDSVIQLTAVDADEGSNGEITYEILVGAQGDFIINKTTGLITIAPGVEMIVGRTYALTVQAADNAPPAERRNSICTVYIEVLPPNNQSPPRFPQLMYSLEISEAMRVGAVLLNLQATDREGDSITYAIENGDPQRVFNLSETTGILTLGKALDRESTDRYILIITASDGRPDGTSTATVNIVVTDVNDNAPVFDPYLPRNLSVVEEEANAFVGQVKATDPDAGINGQVHYSLGNFNNLFRITSNGSIYTAVKLNREVRDYYELVVVATDGAVHPRHSTLTLAIKVLDIDDNSPVFTNSTYTVLVEENLPAGTTILQIEAKDVDLGANVSYRIRSPEVKHFFALHPFTGELSLLRSLDYEAFPDQEASITFLVEAFDIYGTMPPGIATVTVIVKDMNDYPPVFSKRIYKGMVAPDAVKGTPITTVYAEDADPPGLPASRVRYRVDDVQFPYPASIFEVEEDSGRVITRVNLNEEPTTIFKLVVVAFDDGEPVMSSSATVKILVLHPGEIPRFTQEEYRPPPVSELATKGTMVGVISAAAINQSIVYSIVSGNEEDTFGINNITGVIYVNGPLDYETRTSYVLRVQADSLEVVLANLRVPSKSNTAKVYIEIQDENNHPPVFQKKFYIGGVSEDARMFTSVLRVKATDKDTGNYSVMAYRLIIPPIKEGKEGFVVETYTGLIKTAMLFHNMRRSYFKFQVIATDDYGKGLSGKADVLVSVVNQLDMQVIVSNVPPTLVEKKIEDLTEILDRYVQEQIPGAKVVVESIGARRHGDAFSLEDYTKCDLTVYAIDPQTNRAIDRNELFKFLDGKLLDINKDFQPYYGEGGRILEIRTPEAVTSIKKRGESLGYTEGALLALAFIIILCCIPAILVVLVSYRQRQAECTKTARIQAALPAAKPAVPAPAPVAAPPPPPPPPPGAHLYEELGDSSILFLLYHFQQSRGNNSVSEDRKHQQVVMPFSSNTIEAHKSAHVDGSLKSNKLKSARKFTFLSDEDDLSAHNPLYKENISQVSTNSDISQRTDFVDPFSPKIQAKSKSLRGPREKIQRLWSQSVSLPRRLMRKVPNRPEIIDLQQWQGTRQKAENENTGICTNKRGSSNPLLTTEEANLTEKEEIRQGETLMIEGTEQLKSLSSDSSFCFPRPHFSFSTLPTVSRTVELKSEPNVISSPAECSLELSPSRPCVLHSSLSRRETPICMLPIETERNIFENFAHPPNISPSACPLPPPPPISPPSPPPAPAPLAPPPDISPFSLFCPPPSPPSIPLPLPPPTFFPLSVSTSGPPTPPLLPPFPTPLPPPPPSIPCPPPPSASFLSTECVCITGVKCTTNLMPAEKIKSSMTQLSTTTVCKTDPQREPKGILRHVKNLAELEKSVANMYSQIEKNYLRTNVSELQTMCPSEVTNMEITSEQNKGSLNNIVEGTEKQSHSQSTSL

SEQ ID NO: 11738 - protein, 1915 aa, Homo sapiens
MFRQFYLWTCLASGIILGSLFEICLGQYDDDCKLARGGPPATIVAIDEESRNGTILVDNMLIKGTAGGPDPTIELSLKDNVDYWVLMDPVKQMLFLNSTGRVLDRDPPMNIHSIVVQVQCINKKVGTIIYHEVRIVVRDRNDNSPTFKHESYYATVNELTPVGTTIFTGFSGDNGATDIDDGPNGQIEYVIQYNPDDPDRAQNLNERRTTTTTLTVDVLDGDDLGPMFLPCVLVPNTRDCRPLTYQAAIPELRTPEELNPIIVTPPIQAIDQDRNIQPPSDRPGILYSILVGTPEDYPRFFHMHPRTAELSLLEPVNRDFHQKFDLVIKAEQDNGHPLPAFAGLHIEILDENNQSPYFTMPSYQGYILESAPVGATISDSLNLTSPLRIVALDKDIEDTKDPELHLFLNDYTSVFTVTQTGITRYLTLLQPVDREEQQTYTFSITAFDGVQESEPVIVNIQVMDANDNTPTFPEISYDVYVYTDMRPGDSVIQLTAVDADEGSNGEITYEILVGAQGDFIINKTTGLITIAPGVEMIVGRTYALTVQAADNAPPAERRNSICTVYIEVLPPNNQSPPRFPQLMYSLEISEAMRVGAVLLNLQATDREGDSITYAIENGDPQRVFNLSETTGILTLGKALDRESTDRYILIITASDGRPDGTSTATVNIVVTDVNDNAPVFDPYLPRNLSVVEEEANAFVGQVKATDPDAGINGQVHYSLGNFNNLFRITSNGSIYTAVKLNREVRDYYELVVVATDGAVHPRHSTLTLAIKVLDIDDNSPVFTNSTYTVLVEENLPAGTTILQIEAKDVDLGANVSYRIRSPEVKHFFALHPFTGELSLLRSLDYEAFPDQEASITFLVEAFDIYGTMPPGIATVTVIVKDMNDYPPVFSKRIYKGMVAPDAVKGTPITTVYAEDADPPGLPASRVRYRVDDVQFPYPASIFEVEEDSGRVITRVNLNEEPTTIFKLVVVAFDDGEPVMSSSATVKILVLHPGEIPRFTQEEYRPPPVSELATKGTMVGVISAAAINQSIVYSIVSGNEEDTFGINNITGVIYVNGPLDYETRTSYVLRVQADSLEVVLANLRVPSKSNTAKVYIEIQDENNHPPVFQKKFYIGGVSEDARMFTSVLRVKATDKDTGNYSVMAYRLIIPPIKEGKEGFVVETYTGLIKTAMLFHNMRRSYFKFQVIATDDYGKGLSGKADVLVSVVNQLDMQVIVSNVPPTLVEKKIEDLTEILDRYVQEQIPGAKVVVESIGARRHGDAFSLEDYTKCDLTVYAIDPQTNRAIDRNELFKFLDGKLLDINKDFQPYYGEGGRILEIRTPEAVTSIKKRGESLGYTEGALLALAFIIILCCIPAILVVLVSYRQRQAECTKTARIQAALPAAKPAVPAPAPVAAPPPPPPPPPGAHLYEELGDSSILFLLYHFQQSRGNNSVSEDRKHQQVVMPFSSNTIEAHKSAHVDGSLKSNKLKSARKFTFLSDEDDLSAHNPLYKENISQVSTNSDISQRTDFVDPFSPKIQAKSKSLRGPREKIQRLWSQSVSLPRRLMRKVPNRPEIIDLQQWQGTRQKAENENTGICTNKRGSSNPLLTTEEANLTEKEEIRQGETLMIEGTEQLKSLSSDSSFCFPRPHFSFSTLPTVSRTVELKSEPNVISSPAECSLELSPSRPCVLHSSLSRRETPICMLPIETERNIFENFAHPPNISPSACPLPPPPPISPPSPPPAPAPLAPPPDISPFSLFCPPPSPPSIPLPLPPPTFFPLSVSTSGPPTPPLLPPFPTPLPPPPPSIPCPPPPSASFLSTECVCITGVKCTTNLMPAEKIKSSMTQLSTTTVCKTDPQREPKGILRHVKNLAELEKSVANMYSQIEKNYLRTNVSELQTMCPSEVTNMEITSEQNKGSLNNIVEGTEKQSHSQSTSL

SEQ ID NO: 11739 - protein, 1932 aa, Homo sapiens
MFRQFYLWTCLASGIILGSLFEICLGQYDDGTILVDNMLIKGTAGGPDPTIELSLKDNVDYWVLMDPVKQMLFLNSTGRVLDRDPPMNIHSIVVQVQCINKKVGTIIYHEVRIVVRDRNDNSPTFKHESYYATVNELTPVGTTIFTGFSGDNGATDIDDGPNGQIEYVIQYNPDDPTSNDTFEIPLMLTGNIVLRKRLNYEDKTRYFVIIQANDRAQNLNERRTTTTTLTVDVLDGDDLGPMFLPCVLVPNTRDCRPLTYQAAIPELRTPEELNPIIVTPPIQAIDQDRNIQPPSDRPGILYSILVGTPEDYPRFFHMHPRTAELSLLEPVNRDFHQKFDLVIKAEQDNGHPLPAFAGLHIEILDENNQSPYFTMPSYQGYILESAPVGATISDSLNLTSPLRIVALDKDIEDTKDPELHLFLNDYTSVFTVTQTGITRYLTLLQPVDREEQQTYTFSITAFDGVQESEPVIVNIQVMDANDNTPTFPEISYDVYVYTDMRPGDSVIQLTAVDADEGSNGEITYEILVGAQGDFIINKTTGLITIAPGVEMIVGRTYALTVQAADNAPPAERRNSICTVYIEVLPPNNQSPPRFPQLMYSLEISEAMRVGAVLLNLQATDREGDSITYAIENGDPQRVFNLSETTGILTLGKALDRESTDRYILIITASDGRPDGTSTATVNIVVTDVNDNAPVFDPYLPRNLSVVEEEANAFVGQVKATDPDAGINGQVHYSLGNFNNLFRITSNGSIYTAVKLNREVRDYYELVVVATDGAVHPRHSTLTLAIKVLDIDDNSPVFTNSTYTVLVEENLPAGTTILQIEAKDVDLGANVSYRIRSPEVKHFFALHPFTGELSLLRSLDYEAFPDQEASITFLVEAFDIYGTMPPGIATVTVIVKDMNDYPPVFSKRIYKGMVAPDAVKGTPITTVYAEDADPPGLPASRVRYRVDDVQFPYPASIFEVEEDSGRVITRVNLNEEPTTIFKLVVVAFDDGEPVMSSSATVKILVLHPGEIPRFTQEEYRPPPVSELATKGTMVGVISAAAINQSIVYSIVSGNEEDTFGINNITGVIYVNGPLDYETRTSYVLRVQADSLEVVLANLRVPSKSNTAKVYIEIQDENNHPPVFQKKFYIGGVSEDARMFTSVLRVKATDKDTGNYSVMAYRLIIPPIKEGKEGFVVETYTGLIKTAMLFHNMRRSYFKFQVIATDDYGKGLSGKADVLVSVVNQLDMQVIVSNVPPTLVEKKIEDLTEILDRYVQEQIPGAKVVVESIGARRHGDAFSLEDYTKCDLTVYAIDPQTNRAIDRNELFKFLDGKLLDINKDFQPYYGEGGRILEIRTPEAVTSIKKRGESLGYTEGALLALAFIIILCCIPAILVVLVSYRQRQAECTKTARIQAALPAAKPAVPAPAPVAAPPPPPPPPPGAHLYEELGDSSMHNLFLLYHFQQSRGNNSVSEDRKHQQVVMPFSSNTIEAHKSAHVDGSLKSNKLKSARKFTFLSDEDDLSAHNPLYKENISQVSTNSDISQRTDFVDPFSPKIQAKSKSLRGPREKIQRLWSQSVSLPRRLMRKVPNRPEIIDLQQWQGTRQKAENENTGICTNKRGSSNPLLTTEEANLTEKEEIRQGETLMIEGTEQLKSLSSDSSFCFPRPHFSFSTLPTVSRTVELKSEPNVISSPAECSLELSPSRPCVLHSSLSRRETPICMLPIETERNIFENFAHPPNISPSACPLPPPPPISPPSPPPAPAPLAPPPDISPFSLFCPPPSPPSIPLPLPPPTFFPLSVSTSGPPTPPLLPPFPTPLPPPPPSIPCPPPPSASFLSTECVCITGVKCTTNLMPAEKIKSSMTQLSTTTVCKTDPQREPKGILRHVKNLAELEKSVANMYSQIEKNYLRTNVSELQTMCPSEVTNMEITSEQNKGSLNNIVEGTEKQSHSQSTSL

SEQ ID NO: 11740 - protein, 286 aa, Homo sapiens
MARHGLPLLPLLSLLVGAWLKLGNGQATSMVQLQGGRFLMGTNSPDSRDGDGPVREATVKPFAIDIFPVTNKDFRDFVREKKYRTEAEMFGWSFVFEDFVSDELRNKATQPMKPAGPGSGIRERLEHPVLHVSWNDARAYCAWRGKRLPTEEEWEFAARGGLKGQVYPWGNWFQPNRTNLWQGKFPKGDKAEDGFHGVSPVNAFPAQNNYGLYDLLGNVWEWTASPYQAAEQDMRVLRGASWIDTADGSANHRARVTTRMGNTPDSASDNLGFRCAADAGRPPGEL

SEQ ID NO: 11741 - protein, 1540 aa, Homo sapiens
MFRQFYLWTCLASGIILGSLFEICLGQYDDDCKLARGGPPATIVAIDEESRNGTILVDNMLIKGTAGGPDPTIELSLKDNVDYWVLMDPVKQMLFLNSTGRVLDRDPPMNIHSIVVQVQCINKKVGTIIYHEVRIVVRDRNDNSPTFKHESYYATVNELTPVGTTIFTGFSGDNGATDIDDGPNGQIEYVIQYNPDDPTSNDTFEIPLMLTGNIVLRKRLNYEDKTRYFVIIQANDRAQNLNERRTTTTTLTVDVLDGDDLGPMFLPCVLVPNTRDCRPLTYQAAIPELRTPEELNPIIVTPPIQAIDQDRNIQPPSDRPGILYSILVGTPEDYPRFFHMHPRTAELSLLEPVNRDFHQKFDLVIKAEQDNGHPLPAFAGLHIEILDENNQSPYFTMPSYQGYILESAPVGATISDSLNLTSPLRIVALDKDIEDTKDPELHLFLNDYTSVFTVTQTGITRYLTLLQPVDREEQQTYTFSITAFDGVQESEPVIVNIQVMDANDNTPTFPEISYDVYVYTDMRPGDSVIQLTAVDADEGSNGEITYEILVGAQGDFIINKTTGLITIAPGVEMIVGRTYALTVQAADNAPPAERRNSICTVYIEVLPPNNQSPPRFPQLMYSLEISEAMRVGAVLLNLQATDREGDSITYAIENGDPQRVFNLSETTGILTLGKALDRESTDRYILIITASDGRPDGTSTATVNIVVTDVNDNAPVFDPYLPRNLSVVEEEANAFVGQVKATDPDAGINGQVHYSLGNFNNLFRITSNGSIYTAVKLNREVRDYYELVVVATDGAVHPRHSTLTLAIKVLDIDDNSPVFTNSTYTVLVEENLPAGTTILQIEAKDVDLGANVSYRIRSPEVKHFFALHPFTGELSLLRSLDYEAFPDQEASITFLVEAFDIYGTMPPGIATVTVIVKDMNDYPPVFSKRIYKGMVAPDAVKGTPITTVYAEDADPPGLPASRVRYRVDDVQFPYPASIFEVEEDSGRVITRVNLNEEPTTIFKLVVVAFDDGEPVMSSSATVKILVLHPGEIPRFTQEEYRPPPVSELATKGTMVGVISAAAINQSIVYSIVSGNEEDTFGINNITGVIYVNGPLDYETRTSYVLRVQADSLEVVLANLRVPSKSNTAKVYIEIQDENNHPPVFQKKFYIGGVSEDARMFTSVLRVKATDKDTGNYSVMAYRLIIPPIKEGKEGFVVETYTGLIKTAMLFHNMRRSYFKFQVIATDDYGKGLSGKADVLVSVVNQLDMQVIVSNVPPTLVEKKIEDLTEILDRYVQEQIPGAKVVVESIGARRHGDAFSLEDYTKCDLTVYAIDPQTNRAIDRNELFKFLDGKLLDINKDFQPYYGEGGRILEIRTPEAVTSIKKRGESLGYTEGALLALAFIIILCCIPAILVVLVSYRQVFKGRQAECTKTARIQAALPAAKPAVPAPAPVAAPPPPPPPPPGAHLYEELGDSSMNRNYPWSLELILARNMDKIITVMSMGMKCLNMGVAVDCYHQLDRRNMVRWLVKLRKNMRRKRKSQRKLKNQRLKLESLVRRKK

SEQ ID NO: 11742 - protein, 719 aa, Homo sapiens
MFRQFYLWTCLASGIILGSLFEICLGQYDDDCKLARGGPPATIVAIDEESRNGTILVDNMLIKGTAGGPDPTIELSLKDNVDYWVLMDPVKQMLFLNSTGRVLDRDPPMNIHSIVVQVQCINKKVGTIIYHEVRIVVRDRNDNSPTFKHESYYATVNELTPVGTTIFTGFSGDNGATDIDDGPNGQIEYVIQYNPDDPTSNDTFEIPLMLTGNIVLRKRLNYEDKTRYFVIIQANDRAQNLNERRTTTTTLTVDVLDGDDLGPMFLPCVLVPNTRDCRPLTYQAAIPELRTPEELNPIIVTPPIQAIDQDRNIQPPSDRPGILYSILVGTPEDYPRFFHMHPRTAELSLLEPVNRDFHQKFDLVIKAEQDNGHPLPAFAGLHIEILDENNQSPYFTMPSYQGYILESAPVGATISDSLNLTSPLRIVALDKDIEDEEPKKIKKPKVEIREPSEEEEVVVTIEKPPAAEPTYTTWKRARIFPMIFKKVRGLADKRGIVDLEGEEWQRRLEEEDKDYLKLTLDQEEATESTVESEEESSSDYTEYSEEESEFSESETTEEESESETPSEEEESSTPESEESESTESEGEKARKNIVLARRRPMVEEVKEVKGRKEEPQEEQKEPKMEEEEHSEEEESGPAPVEESTDPEAQDIPEEGSAESASVEGGVESEEESESGSSSSSSESQSGGPWGYQVPAYDRSKNANQKKSPGANSEGYNTAL

SEQ ID NO: 11743 - protein, 650 aa, Homo sapiens
MFRQFYLWTCLASGIILGSLFEICLGQYDDDCKLARGGPPATIVAIDEESRNGTILVDNMLIKGTAGGPDPTIELSLKDNVDYWVLMDPVKQMLFLNSTGRVLDRDPPMNIHSIVVQVQCINKKVGTIIYHEVRIVVRDRNDNSPTFKHESYYATVNELTPVGTTIFTGFSGDNGATDIDDGPNGQIEYVIQYNPDDPTSNDTFEIPLMLTGNIVLRKRLNYEDKTRYFVIIQANDRAQNLNERRTTTTTLTVDVLDGDDLGPMFLPCVLVPNTRDCRPLTYQAAIPELRTPEELNPIIVTPPIQAIDQDRNIQPPSDRPGILYSILVGTPEDYPRFFHMHPRTAELSLLEPVNRDFHQKFDLVIKEEPKKIKKPKVEIREPSEEEEVVVTIEKPPAAEPTYTTWKRARIFPMIFKKVRGLADKRGIVDLEGEEWQRRLEEEDKDYLKLTLDQEEATESTVESEEESSSDYTEYSEEESEFSESETTEEESESETPSEEEESSTPESEESESTESEGEKARKNIVLARRRPMVEEVKEVKGRKEEPQEEQKEPKMEEEEHSEEEESGPAPVEESTDPEAQDIPEEGSAESASVEGGVESEEESESGSSSSSSESQSGGPWGYQVPAYDRSKNANQKKSPGANSEGYNTAL

SEQ ID NO: 11744 - protein, 1783 aa, Homo sapiens
MFRQFYLWTCLASGIILGSLFEICLGQYDDDCKLARGGPPATIVAIDEESRNGTILVDNMLIKGTAGGPDPTIELSLKDNVDYWVLMDPVKQMLFLNSTGRVLDRDPPMNIHSIVVQVQCINKKVGTIIYHEVRIVVRDRNDNSPTFKHESYYATVNELTPVGTTIFTGFSGDNGATDIDDGPNGQIEYVIQYNPDDPTSNDTFEIPLMLTGNIVLRKRLNYEDKTRYFVIIQANDRAQNLNERRTTTTTLTVDVLDGDDLGPMFLPCVLVPNTRDCRPLTYQAAIPELRTPEELNPIIVTPPIQAIDQDRNIQPPSDRPGILYSILVGTPEDYPRFFHMHPRTAELSLLEPVNRDFHQKFDLVIKAEQDNGHPLPAFAGLHIEILDENNQSPYFTMPSYQGYILESAPVGATISDSLNLTSPLRIVALDKDIEDVPPSGVPTKDPELHLFLNDYTSVFTVTQTGITRYLTLLQPVDREEQQTYTFSITAFDGVQESEPVIVNIQVMDANDNTPTFPEISYDVYVYTDMRPGDSVIQLTAVDADEGSNGEITYEILVGAQGDFIINKTTGLITIAPGVEMIVGRTYALTVQAADNAPPAERRNSICTVYIEVLPPNNQSPPRFPQLMYSLEISEAMRVGAVLLNLQATDREGDSITYAIENGDPQRVFNLSETTGILTLGKALDRESTDRYILIITASDGRPDGTSTATVNIVVTDVNDNAPVFDPYLPRNLSVVEEEANAFVGQVKATDPDAGINGQVHYSLGNFNNLFRITSNGSIYTAVKLNREVRDYYELVVVATDGAVHPRHSTLTLAIKVLDIDDNSPVFTNSTYTVLVEENLPAGTTILQIEAKDVDLGANVSYRIRSPEVKHFFALHPFTGELSLLRSLDYEAFPDQEASITFLVEAFDIYGTMPPGIATVTVIVKDMNDYPPVFSKRIYKGMVAPDAVKGTPITTVYAEDADPPGLPASRVRYRVDDVQFPYPASIFEVEEDSGRVITRVNLNEEPTTIFKLVVVAFDDGEPVMSSSATVKILVLHPGEIPRFTQEEYRPPPVSELATKGTMVGVISAAAINQSIVYSIVSGNEEDTFGINNITGVIYVNGPLDYETRTSYVLRVQADSLEVVLANLRVPSKSNTAKVYIEIQDENNHPPVFQKKFYIGGVSEDARMFTSVLRVKATDKDTGNYSVMAYRLIIPPIKEGKEGFVVETYTGLIKTAMLFHNMRRSYFKFQVIATDDYGKGLSGKADVLVSVVNQLDMQVIVSNVPPTLVEKKIEDLTEILDRYVQEQIPGAKVVVESIGARRHGDAFSLEDYTKCDLTVYAIDPQTNRAIDRNELFKFLDGKLLDINKDFQPYYGEGGRILEIRTPEAVTSIKKRGESLGYTEGALLALAFIIILCCIPAILVVLVSYRQFKVRQAECTKTARIQAALPAAKPAVPAPAPVAAPPPPPPPPPGAHLYEELGDSSMYEMPQYGSRRRLLPPAGQEEYGEVVGEAEEEYEEEEEEPKKIKKPKVEIREPSEEEEVVVTIEKPPAAEPTYTTWKRARIFPMIFKKVRGLADKRGIVDLEGEEWQRRLEEEDKDYLKLTLDQEEATESTVESEEESSSDYTEYSEEESEFSESETTEEESESETPSEEEESSTPESEESESTESEGEKARKNIVLARRRPMVEEVKEVKGRKEEPQEEQKEPKMEEEEHSEEEESGPAPVEESTDPEAQDIPEEGSAESASVEGGVESEEESESGSSSSSSESQSGGPWGYQVPAYDRSKNANQKKSPGANSEGYNTAL

SEQ ID NO: 11745 - protein, 981 aa, Homo sapiens
MFRQFYLWTCLASGIILGSLFEICLGQYDDDCKLARGGPPATIVAIDEESRNGTILVDNMLIKGTAGGPDPTIELSLKDNVDYWVLMDPVKQMLFLNSTGRVLDRDPPMNIHSIVVQVQCINKKVGTIIYHEVRIVVRDRNDNSPTFKHESYYATVNELTPVGTTIFTGFSGDNGATDIDDGPNGQIEYVIQYNPDDPTSNDTFEIPLMLTGNIVLRKRLNYEDKTRYFVIIQANDRAQNLNERRTTTTTLTVDVLDGDDLGPMFLPCVLVPNTRDCRPLTYQAAIPELRTPEELNPIIVTPPIQAIDQDRNIQPPSDRPGILYSILVGTPEDYPRFFHMHPRTAELSLLEPVNRDFHQKFDLVIKAEQDNGHPLPAFAGLHIEILDENNQSPYFTMPSYQGYILESAPVGATISDSLNLTSPLRIVALDKDIEDTKDPELHLFLNDYTSVFTVTQTGITRYLTLLQPVDREEQQTYTFSITAFDGVQESEPVIVNIQVMDANDNTPTFPEISYDVYVYTDMRPGDSVIQLTAVDADEGSNGEITYEILVGAQGDFIINKTTGLITIAPGVEMIVGRTYALTVQAADNAPPAERRNSICTVYIEVLPPNNQSPPRFPQLMYSLEISEAMRVGAVLLNLQATDREGDSITYAIENGDPQRVFNLSETTGILTLGKALDRESTDRYILIITASDGRPDGEEPKKIKKPKVEIREPSEEEEVVVTIEKPPAAEPTYTTWKRARIFPMIFKKVRGLADKRGIVDLEGEEWQRRLEEEDKDYLKLTLDQEEATESTVESEEESSSDYTEYSEEESEFSESETTEEESESETPSEEEESSTPESEESESTESEGEKARKNIVLARRRPMVEEVKEVKGRKEEPQEEQKEPKMEEEEHSEEEESGPAPVEESTDPEAQDIPEEGSAESASVEGGVESEEESESGSSSSSSESQSGGPWGYQVPAYDRSKNANQKKSPGANSEGYNTAL

SEQ ID NO: 11746 - protein, 588 aa, Homo sapiens
MEAPEYLDLDEIDFSDDISDNRSQGNRLQKLGLEDTDREDAMGFGSHRAKLTVVAALGACHCPENEYSVTSLKTIPELCRRCDTQNEDRSVSSSSWNCGISTLITNTQKPTGIADVYSKFRPVKRVSPLKHQPETLENNESDDQKNQKVVEYQKGGESDLGPQPQELGPGDGVGGPPGKSSEPSTSLGELEHYDLDMDEILDVPYIKSSQQLASFTKVTSEKRILGLCTTINGLSGKACSTGSSESSSSNMAPFCVLSPVKSPHLRKASAVIHDQHKLSTEETEISPPLVKCGSAYEPENQSKDFLNKTFSDPHGRKVEKTTPDCQLRAFHLQSSAAESKPEEQVSGLNRTSSQGPEERSEYLKKVKSILNIVKEGQISLLPHLAADNLDKIHDENGNNLLHIAASQGHAECLQHLTSLMGEDCLNERNTEKLTPAGLAIKNGQLECVRWMVSETEAIAELSCSKDFPSLIHYAGCYGQEKILLWLLQFMQEQGISLDEVDQDGNSAVHVASQHGYLGCIQTRLKIQGTWNGSETCLFTHHFSSYPPISSGLQCQGQEGVLFIPDQVGAATNKQVLFQNQLPETKSSY

SEQ ID NO: 11747 - protein, 1151 aa, Homo sapiens
MGSAARWEGSFSREFSSLLSRGCLSTSRIDMDALEDYVWPRATSELILLPVTGLECVGDRLLAGEGPDVLVYSLDFGGHLRMIKRVQNLLGHYLIHGFRVRPEPNGDLDLEAMVAVFGSKGLRVVKISWGQGHFWELWRSGLWNMSDWIWDARWLEGNIALALGHNSVVLYDPVVGCILQEVPCTDRCTLSSACLIGDAWKELTIVAGAVSNQLLVWYPATALADNKPVAPDRRISGHVGIIFSMSYLESKGLLATASEDRSVRIWKVGDLRVPGGRVQNIGHCFGHSARVWQVKLLENYLISAGEDCVCLVWSHEGEILQAFRGHQGRGIRAIAAHERQAWVITGGDDSGIRLWHLVGRGYRGLGVSALCFKSRSRPGTLKAVTLAGSWRLLAVTDTGALYLYDVEVKCWEQLLEDKHFQSYCLLEAAPGPEGFGLCAMANGEGRVKVVPINTPTAAVDQTLFPGKVHSLSWALRGYEELLLLASGPGGVVACLEISAAPSGKAIFVKERCRYLLPPSKQRWHTCSAFLPPGDFLVCGDRRGSVLLFPSRPGLLKDPGVGGKARAGAGAPVVGSGSSGGGNAFTGLGPVSTLPSLHGKQGVTSVTCHGGYVYTTGRDGAYYQLFVRDGQLQPVLRQKSCRGMNWLAGLRIVPDGSMVILGFHANEFVVWNPRSHEKLHIVNCGGGHRSWAFSDTEAAMAFAYLKDGDVMLYRALGGCTRPHVILREGLHGREITCVKRVGTITLGPEYGVPSFMQPDDLEPGSEGPDLTDIVITCSEDTTVCVLALPTTTGSAHALTAVCNHISSVRAVAVWGIGTPGGPQDPQPGLTAHVVSAGGRAEMHCFSIMVTPDPSTPSRLACHVMHLSSHRLDEYWDRQRNRHRMVKVDPETRYMSLAVCELDQPGLGPLVAAACSDGAVRLFLLQDSGRILQLLAETFHHKRCVLKVHSFTHEAPNQRRRLLLCSAATDGSLAFWDLTTMLDHDSTVLEPPVDPGLPYRLGTPSLTLQAHSCGINSLHTLPTREGHHLVASGSEDGSLHVFVLAVEMLQLEEAVGEAGLVPQLRVLEEYSVPCAHAAHVTGLKILSPSIMVSASIDQRLTFWRLGHGEPTFMNSTVFHVPDVADMDCWPVSPEFGHRCALGGQGLEVYNWYD

SEQ ID NO: 11748 - protein, 438 aa, Homo sapiens
MLWLALGPFPAMENQVLVIRIKIPNSGAVDWTVHSGPQLLFRDVLDVIGQVLPEATTTAFEYEDEDGDRITVRSDEEMKAMLSYYYSTVMEQQVNGQLIEPLQIFPRACKPPGERNIHGLKVNTRAGPSQHSSPAVSDSLPSNSLKKSSAELKKILANGQMNEQDIRYRDTLGHGNGGTVYKAYHVPSGKILAVKVILLDITLELQKQIMSELEILYKCDSSYIIGFYGAFFVENRISICTEFMDGGSLDVYRKMPEHVLGRIAVAVVKGLTYLWSLKILHRDVKPSNMLVNTRGQVKLCDFGVSTQLVNSIAKTYVGTNAYMAPERISGEQYGIHSDVWSLGISFMEIQKNQGSLMPLQLLQCIVDEDSPVLPVGEFSEPFVHFITQCMRKQPKERPAPEELMGHPFIVQFNDGNAAVVSMWVCRALEERRSQQGPP

SEQ ID NO: 11749 - protein, 2217 aa, Homo sapiens
MDGDGGRRDVPGTLMEPGRGAGPAGMAEPRAKAARPGPQRFLRRSVVESDQEEPPGLEAAEAPGPQPPQPLQRRVLLLCKTRRLIAERARGRPAAPAPAALVAQPGAPGAPADAGPEPVGTQEPGPDPIAAAVETAPAPDGGPREEAAATVRKEDEGAAEAKPEPGRTRRDEPEEEEDDEDDLKAVATSLDGRFLKFDIELGRGSFKTVYKGLDTETWVEVAWCELQDRKLTKLERQRFKEEAEMLKGLQHPNIVRFYDFWESSAKGKRCIVLVTELMTSGTLKTYLKRFKVMKPKVLRSWCRQILKGLLFLHTRTPPIIHRDLKCDNIFITGPTGSVKIGDLGLATLKRASFAKSVIGTPEFMAPEMYEEHYDESVDVYAFGMCMLEMATSEYPYSECQNAAQIYRKVTCGIKPASFEKVHDPEIKEIIGECICKNKEERYEIKDLLSHAFFAEDTGVRVELAEEDHGRKSTIALRLWVEDPKKLKGKPKDNGAIEFTFDLEKETPDEVAQEMIESGFFHESDVKIVAKSIRDRVALIQWRRERIWPALQPKEQQDVGSPDKARGPPVPLQVQVTYHAQAGQPGPPEPEEPEADQHLLPPTLPTSATSLASDSTFDSGQGSTVYSDSQSSQQSVMLGSLADAAPSPAQCVCSPPVSEGPVLPQSLPSLGAYQQPTAAPGLPVGSVPAPACPPSLQQHFPDPAMSFAPVLPPPSTPMPTGPGQPAPPGQQPPPLAQPTPLPQVLAPQPVVPLQPVPPHLPPYLAPASQVGAPAQLKPLQMPQAPLQPLAQVPPQMPPIPVVPPITPLAGIDGLPPALPDLPTATVPPVPPPQYFSPAVILPSLAAPLPPASPALPLQAVKLPHPPGAPLAMPCRTIVPNAPATIPLLAVAPPGVAALSIHSAVAQLPGQPVYPAAFPQMAPTDVPPSPHHTVQNMRATPPQPALPPQPTLPPQPVLPPQPTLPPQPVLPPQPTRPPQPVLPPQPMLPPQPVLPPQPALPVRPEPLQPHLPEQAAPAATPGSQILLGHPAPYAVDVAAQVPTVPVPPAAVLSPPLPEVLLPAAPELLPQFPSSLATVSASVQSVPTQTATLLPPANPPLPGGPGIASPCPTVQLTVEPVQEEQASQDKPPGLPQSCESYGGSDVTSGKELSDSCEGAFGGGRLEGRAARKHHRRSTRARSRQERASRPRLTILNVCNTGDKMVECQLETHNHKMVTFKFDLDGDAPDEIATYMVEHDFILQAERETFIEQMKDVMDKAEDMLSEDTDADRGSDPGTSPPHLSTCGLGTGEESRQSQANAPVYQQNVLHTGKRWFIICPVAEHPAPEAPESSPPLPLSSLPPEASQDSAPYKDQLSSKEQPSFLASQQLLSQAGPSNPPGAPPAPLAPSSPPVTALPQDGAAPATSTMPEPASGTASQAGGPGTPQGLTSELETSQPLAETHEAPLAVQPLVVGLAPCTPAPEAASTRDASAPREPLPPPAPEPSPHSGTPQPALGQPAPLLPAAVGAVSLATSQLPSPPLGPTVPPQPPSALESDGEGPPPRVGFVDSTIKSLDEKLRTLLYQEHVPTSSASAGTPVEVGDRDFTLEPLRGDQPRSEVCGGDLALPPVPKEAVSGRVQLPQPLVEKSELAPTRGAVMEQGTSSSMTAESSPRSMLGYDRDGRQVASDSHVVPSVPQDVPAFVRPARVEPTDRDGGEAGESSAEPPPSDMGTVGGQASHPQTLGARALGSPRKRPEQQDVSSPAKTVGRFSVVSTQDEWTLASPHSLRYSAPPDVYLDEAPSSPDVKLAVRRAQTASSIEVGVGEPVSSDSGDEGPRARPPVQKQASLPVSGSVAGDFVKKATAFLQRPSRAGSLGPETPSRVGMKVPTISVTSFHSQSSYISSDNDSELEDADIKKELQSLREKHLKEISELQSQQKQEIEALYRRLGKPLPPNVGFFHTAPPTGRRRKTSKSKLKAGKLLNPLVRQLKVVASSTGHLADSSRGPPAKDPAQASVGLTADSTGLSGKAVQTQQPCSVRASLSSDICSGLASDGGGARGQGWTVYHPTSERVTYKSSSKPRARFLSGPVSVSIWSALKRLCLGKEHSSRSSTSSLAPGPEPGPQPALHVQAQVNNSNNKKGTFTDDLHKLVDEWTSKTVGAAQLKPTLNQLKQTQKLQDMEAQAGWAAPGEARAMTAPRAGVGMPRLPPAPGPLSTTVIPGAAPTLSVPTPDPESEKPD

SEQ ID NO: 11750 - protein, 815 aa, Homo sapiens
METGLGAPLFKAWLLISVWGLGVDPSLQIDVLTELELGESTTGVRQVPGLHNGTKAFLFQDTPRSIKASTATAEQFFQKLRNKHEFTILVTLKQTHLNSGVILSIHHLDHRYLELESSGHRNEVRLHYRSGSHRPHTEVFPYILADDKWHKLSLAISASHLILHIDCNKIYERVVEKPSTDLPLGTTFWLGQRNNAHGYFKGIMQDVQLLVMPQGFIAQCPDLNRTCPTCNDFHGLVQKIMELQDILAKTSAKLSRAEQRMNRLDQCYCERTCTMKGTTYREFESWIDGCKNCTCLNGTIQCETLICPNPDCPLKSALAYVDGKCCKECKSICQFQGRTYFEGERNTVYSSSGVCVLYECKDQTMKLVESSGCPALDCPESHQITLSHSCCKVCKGYDFCSERHNCMENSICRNLNDRAVCSCRDGFRALREDNAYCEDIDECAEGRHYCRENTMCVNTPGSFMCICKTGYIRIDDYSCTEHDECITNQHNCDENALCFNTVGGHNCVCKPGYTGNGTTCKAFCKDGCRNGGACIAANVCACPQGFTGPSCETDIDECSDGFVQCDSRANCINLPGWYHCECRDGYHDNGMFSPSGESCEDIDECGTGRHSCANDTICFNLDGGYDCRCPHGKNCTGDCIHDGKVKHNGQIWVLENDRCSVCSCQNGFVMCRRMVCDCENPTVDLFCCPECDPRLSSQCLHQNGETLYNSGDTWVQNCQQCRCLQGEVDCWPLPCPDVECEFSILPENECCPRCVTDPCQADTIRNDITKTCLDEMNVVRFTGSSWIKHGTECTLCQCKNGHICCSVDPQCLQEL

SEQ ID NO: 11751 - protein, 602 aa, Homo sapiens
MEAVCLGTCPEPEASMSTAIPGLKKGNNALQSIILQTLLEKENGQRKYGGPPPGWDAAPPERGCEIFIGKLPRDLFEDELIPLCEKIGKIYEMRMMMDFNGNNRGYAFVTFSNKVEAKNAIKQLNNYEIRNGRLLGVCASVDNCRLFVGGIPKTKKREEILSEMKKVTEGVVDVIVYPSAADKTKNRGFAFVEYESHRAAAMARRKLLPGRIQLWGHGIAVDWAEPEVEVDEDTMSSVKILYVRNLMLSTSEEMIEKEFNNIKPGAVERVKKIRDYAFVHFSNREDAVEAMKALNGKVLDGSPIEVTLAKPVDKDSYVRYTRGTGGRGTMLQGEYTYSLGQVYDPTTTYLGAPVFYAPQTYAAIPSLHFPATKGHLSNRAIIRAPSVREIYMNVPVGAAGVRGLGGRGYLAYTGLGRGYQVKGDKREDKLYDILPGMELTPMNPVTLKPQGIKLAPQILEEICQKNNWGQPVYQLHSAIGQDQRQLFLYKITIPALASQNPAIHPFTPPKLSAFVDEAKTYAAEYTLQTLGIPTDGGDGTMATAAAAATAFPGYAVPNATAPVSAAQLKQAVTLGQDLAAYTTYEVYPTFAVTARGDGYGTF

SEQ ID NO: 11752 - protein, 994 aa, Homo sapiens
MEAAHAKTTEECLAYFGVSETTGLTPDQVKRNLEKYGLNELPAEEGKTLWELVIEQFEDLLVRILLLAACISFVLAWFEEGEETITAFVEPFVILLILIANAIVGVWQERNAENAIEALKEYEPEMGKVYRADRKSVQRIKARDIVPGDIVEVAVGDKVPADIRILAIKSTTLRVDQSILTGESVSVIKHTEPVPDPRAVNQDKKNMLFSGTNIAAGKALGIVATTGVGTEIGKIRDQMAATEQDKTPLQQKLDEFGEQLSKVISLICVAVWLINIGHFNDPVHGGSWFRGAIYYFKIAVALAVAAIPEGLPAVITTCLALGTRRMAKKNAIVRSLPSVETLGCTSVICSDKTGTLTTNQMSVCKMFIIDKVDGDICLLNEFSITGSTYAPEGEVLKNDKPVRPGQYDGLVELATICALCNDSSLDFNEAKGVYEKVGEATETALTTLVEKMNVFNTDVRSLSKVERANACNSVIRQLMKKEFTLEFSRDRKSMSVYCSPAKSSRAAVGNKMFVKGAPEGVIDRCNYVRVGTTRVPLTGPVKEKIMAVIKEWGTGRDTLRCLALATRDTPPKREEMVLDDSARFLEYETDLTFVGVVGMLDPPRKEVTGSIQLCRDAGIRVIMITGDNKGTAIAICRRIGIFGENEEVADRAYTGREFDDLPLAEQREACRRACCFARVEPSHKSKIVEYLQSYDEITAMTGDGVNDAPALKKAEIGIAMGSGTAVAKTASEMVLADDNFSTIVAAVEEGRAIYNNMKQFIRYLISSNVGEVVCIFLTAALGLPEALIPVQLLWVNLVTDGLPATALGFNPPDLDIMDRPPRSPKEPLISGWLFFRYMAIGGYVGAATVGAAAWWFLYAEDGPHVNYSQLTHFMQCTEDNTHFEGIDCEVFEAPEPMTMALSVLVTIEMCNALNSLSENQSLLRMPPWVNIWLLGSICLSMSLHFLILYVDPLPMIFKLRALDLTQWLMVLKISLPVIGLDEILKFVARNYLEG

SEQ ID NO: 11753 - protein, 703 aa, Homo sapiens
MGNHSGRPEDPEPGAFTTTKRTGIPAPREFSVTVSRERSVPRGPSNPRKSVSSPTSSNTPTPTKHLRTPSTKPKQENEGGEKAALESQVRELLAEAKAKDSEINRLRSELKKYKEKRTLNAEGTDALGPNVDGTSVSPGDTEPMIRALEEKNKNFQKELSDLEEENRVLKEKLIYLEHSPNSEGAASHTGDSSCPTSITQESSFGSPTGNQMSSDIDEYKKNIHGNALRTSGSSSSDVTKASLSPDASDFEHITAETPSRPLSSTSNPFKSSKCSTAGSSPNSVSELSLASLTEKIQKMEENHHSTAEELQATLQELSDQQQMVQELTAENEKLVDEKTILETSFHQHRERAEQLSQENEKLMNLLQERVKNEEPTTQEGKIIELEQKCTGILEQGRFEREKLLNIQQQLTCSLRKVEEENQGALEMIKRLKEENEKLNEFLELERHNNNMMAKTLEECRVTLEGLKMENGSLKSHLQGEKQKATEASAVEQTAESCEVQEMLKVARAEKDLLELSCNELRQELLKANGEIKHVSSLLAKVEKDYSYLKEICDHQAEQLSRTSLKLQEKASESDAEIKDMKETIFELEDQVEQHRAVKLHNNQLISELESSVIKLEEQKSDLERQLKTLTKQMKEETEEWRRFQADLQTAVVVANDIKCEAQQELRTVKRKLLEEEEKNARLQKELGDVQGHGRVVTSRAAPP

SEQ ID NO: 11754 - protein, 709 aa, Homo sapiens
MGNHSGRPEDPEPGAFTTTKRTGIPAPREFSVTVSRERSVPRGPSNPRKSVSSPTSSNTPTPTKHLRTPSTKPKQENEGGEKAALESQVRELLAEAKAKDSEINRLRSELKKYKEKRTLNAEGTDALGPNVDGTSVSPGDTEPMIRALEEKNKNFQKELSDLEEENRVLKEKLIYLEHSPNSEGAASHTGDSSCPTSITQESSFGSPTGNQMSSDIDEYKKNIHGNALRTSGSSSSDVTKASLSPDASDFEHITAETPSRPLSSTSNPFKSSKCSTAGSSPNSVSELSLASLTEKIQKMEENHHSTAEELQATLQELSDQQQMVQELTAENEKLVDEKTILETSFHQHRERAEQLSQENEKLMNLLQERVKNEEPTTQEGKIIELEQKCTGILEQGRFEREKLLNIQQQLTCSLRKVEEENQGALEMIKRLKEENEKLNEFLELERHNNNMMAKTLEECRVTLEGLKMENGSLKSHLQGEKQKATEASAVEQTAESCEVQEMLKVARAEKDLLELSCNELRQELLKANGEIKHVSSLLAKVEKDYSYLKEICDHQAEQLSRTSLKLQEKASESDAEIKDMKETIFELEDQVEQHRAVKLHNNQLISELESSVIKLEEQKSDLERQLKTLTKQMKEETEEWRRFQADLQTAVVVANDIKCEAQQELRTVKRKLLEEEEKNARLQKELGDVQGHGRVVTSRAAPPSLGSVS

SEQ ID NO: 11755 - protein, 978 aa, Homo sapiens
MGPPSSSGFYVSRAVALLLAGLVAALLLALAVLAALYGHCERVPPSELPGLRDLEAESSPPLRQKPTPTPKPSSARELAVTTTPSNWRPPGPWDQLRLPPWLVPLHYDLELWPQLRPDELPAGSLPFTGRVNITVRCTVATSRLLLHSLFQDCERAEVRGPLSPDDVWFALDTEYMVLELSEPLKPGSSYELQLSFSGLVKEDLREGLFLNVYTDQGERRALLASQLEPTFARYVFPCFDEPALKATFNITMIHHPSYVALSNMPKLGQSEKEDVNGSKWTVTTFSTTPHMPTYLVAFVICDYDHVNRTERGKEIRIWARKDAIANGSADFALNITGPIFSFLEDLFNISYSLPKTDIIALPSFDNHAMENWGLMIFDESGLLLEPKDQLTEKKTLISYVVSHEIGHQWFGNLVTMNWWNNIWLNEGFASYFEFEVINYFNPKLPRNEIFFSNILHNILREDHALVTRAVAMKVENFKTSEIQELFDIFTYSKGASMARMLSCFLNEHLFVSALKSYLKTFSYSNAEQDDLWRHFQMAIDDQSTVILPATIKNIMDSWTHQSGFPVITLNVSTGVMKQEPFYLENIKNRTLLTSNDTWIVPILWIKNGTTQPLVWLDQSSKVFPEMQVSDSDHDWVILNLNMTGYYRVNYDKLGWKKLNQQLEKDPKAIPVIHRLQLIDDAFSLSKNNYIEIETALELTKYLAEEDEIIVWHTVLVNLVTRDLVSEVNIYDIYSLLKRYLLKRLNLIWNIYSTIIRENVLALQDDYLALISLEKLFVTACWLGLEDCLQLSKELFAKWVDHPENEIPYPIKDVVLCYGIALGSDKEWDILLNTYTNTTNKEEKIQLAYAMSCSKDPWILNRYMEYAISTSPFTSNETNIIEVVASSEVGRYVAKDFLVNNWQAVSKRYGTQSLINLIYTIGRTVTTDLQIVELQQFFSNMLEEHQRIRVHANLQTIKNENLKNKKLSARIAAWLRRNT

SEQ ID NO: 11756 - protein, 790 aa, Homo sapiens
MRSAAKPWNPAIRAGGHGPDRVRPLPAASSGMKSSKSSTSLAFESRLSRLKRASSEDTLNKPGSTAASGVVRLKKTATAGAISELTESRLRSGTGAFTTTKRTGIPAPREFSVTVSRERSVPRGPSNPRKSVSSPTSSNTPTPTKHLRTPSTKPKQENEGGEKAALESQVRELLAEAKAKDSEINRLRSELKKYKEKRTLNAEGTDALGPNVDGTSVSPGDTEPMIRALEEKNKNFQKELSDLEEENRVLKEKLIYLEHSPNSEGAASHTGDSSCPTSITQESSFGSPTGNQMSSDIDEYKKNIHGNALRTSGSSSSDVTKASLSPDASDFEHITAETPSRPLSSTSNPFKSSKCSTAGSSPNSVSELSLASLTEKIQKMEENHHSTAEELQATLQELSDQQQMVQELTAENEKLVDEKTILETSFHQHRERAEQLSQENEKLMNLLQERVKNEEPTTQEGKIIELEQKCTGILEQGRFEREKLLNIQQQLTCSLRKVEEENQGALEMIKRLKEENEKLNEFLELERHNNNMMAKTLEECRVTLEGLKMENGSLKSHLQGEKQKATEASAVEQTAESCEVQEMLKVARAEKDLLELSCNELRQELLKANGEIKHVSSLLAKVEKDYSYLKEICDHQAEQLSRTSLKLQEKASESDAEIKDMKETIFELEDQVEQHRAVKLHNNQLISELESSVIKLEEQKSDLERQLKTLTKQMKEETEEWRRFQADLQTAVVVANDIKCEAQQELRTVKRKLLEEEEKNARLQKELGDVQGHGRVVTSRAAPPSLGSVS

SEQ ID NO: 11757 - protein, 987 aa, Homo sapiens
MGNHSGRPEDPEPGAFTTTKRTGIPAPREFSVTVSRERSVPRGPSNPRKSVSSPTSSNTPTPTKHLRTPSTKPKQENEGGEKAALESQVRELLAEAKAKDSEINRLRSELKKYKEKRTLNAEGTDALGPNVDGTSVSPGDTEPMIRALEEKNKNFQKELSDLEEENRVLKEKLIYLEHSPNSEGAASHTGDSSCPTSITQESSFGSPTGNQMSSDIDEYKKNIHGNALRTSGSSSSDVTKASLSPDASDFEHITAETPSRPLSSTSNPFKSSKCSTAGSSPNSVSELSLASLTEKIQKMEENHHSTAEELQATLQELSDQQQMVQELTAENEKLVDEKTILETSFHQHRERAEQLSQENEKLMNLLQERVKNEEPTTQEGKIIELEQKCTGILEQGRFEREKLLNIQQQLTCSLRKVEEENQGALEMIKRLKEENEKLNEFLELERHNNNMMAKTLEECRVTLEGLKMENGSLKSHLQGEKQKATEASAVEQTAESCEVQEMLKVARAEKDLLELSCNELRQELLKANGEIKHVSSLLAKVEKDYSYLKEICDHQAEQLSRTSLKLQEKASESDAEIKDMKETIFELEDQVEQHRAVKLHNNQLISELESSVIKLEEQKSDLERQLKTLTKQMKEETEEWRRFQADLQTAVVVANDIKCEAQQELRTVKRKLLEEEEKNARLQKELGDVQGHGRVVTSRAAPPPVDEEPESSEVDAAGRWPGVCVSRTSPTPPESATTVKSLIKSFDLGRPGGAGQNISVHKTPRSPLSGIPVRTAPAAAVSPMQRHSTYSSVRPASRGVTQRLDLPDLPLSDILKGRTETLKPDPHLRKSPSLESLSRPPSLGFGDTRLLSASTRAWKPQSKLSVERKDPLAALAREYGGSKRNALLKWCQKKTQGYANIDITNFSSSWSDGLAFCALLHTYLPAHIPYQELNSQEKKRNLLLAFEAAESVGIKPSLELSEMLYTDRPDWQSVMQYVAQIYKYFET

SEQ ID NO: 11758 - protein, 604 aa, Homo sapiens
MRGAGPSPRQSPRTLRPDPGPAMSFFRRKVKGKEQEKTSDVKSIKASISVHSPQKSTKNHALLEAAGPSHVAINAISANMDSFSSSRTATLKKQPSHMEAAHFGDLGRSCLDYQTQETKSSLSKTLEQVLHDTIVLPYFIQFMELRRMEHLVKFWLEAESFHSTTWSRIRAHSLNTVKQSSLAEPVSPSKKHETTASFLTDSLDKRLEDSGSAQLFMTHSEGIDLNNRTNSTQNHLLLSQECDSAHSLRLEMARAGTHQVSMETQESSSTLTVASRNSPASPLKELSGKLMKSIEQDAVNTFTKYISPDAAKPIPITEAMRNDIIARICGEDGQVDPNCFVLAQSIVFSAMEQEHFSEFLRSHHFCKYQIEVLTSGTVYLADILFCESALFYFSEYMEKEDAVNILQFWLAADNFQSQLAAKKGQYDGQEAQNDAMILYDKYFSLQATHPLGFDDVVRLEIESNICREGGPLPNCFTTPLRQAWTTMEKSSVKKASIKILKNFDEAIIVDAASLDPESLYQRTYAGKMTFGRVSDLGQFIRESEPEPDVRKSKGSMFSQAMKKWVQGNTDEAQEELAWKIAKMIVSDIMQQAQYDQPLEKSTKL

SEQ ID NO: 11759 - protein, 469 aa, Homo sapiens
MDAPRASAAKPPTGRKMKARAPPPPGKAATLHVHSDQKPPHDGALGSQQNLVRMKEALRASTMDVTVVLPSGLEKRSVLNGSHAMMDLLVELCLQNHLNPSHHALEIRSSETQQPLSFKPNTLIGTLNVHTVFLKEKVPEEKVKPGPPKVPEKSVRLVVNYLRTQKAVVRVSPEVPLQNILPVICAKCEVSPEHVVLLRDNIAGEELELSKSLNELGIKELYAWDNRRETFRKSSLGNDETDKEKKKFLGFFKVNKRSNSKGCLTTPNSPSMHSRSLTLGPSLSLGSISGVSVKSEMKKRRAPPPPGSGPPVQDKASEKVSLGSQIDLQKKKRRAPAPPPPQPPPPSPLIPNRTEDKEENRKSTMVYGAAEAVIRLLSLLLNTTAPGTAKPRTLWMSEGRSSLHNPEIKCSCFSSSSPFPQSLLSLLLGLSSICECMCTLRHTHAHTHNPSCVLPTSEILAFGRQSLIS

SEQ ID NO: 11760 - protein, 1504 aa, Homo sapiens [sequence omitted]

SEQ ID NO: 11761 - protein, 1271 aa, Homo sapiens
MDAPRASAAKPPTGRKMKARAPPPPGKAATLHVHSDQKPPHDGALGSQQNLVRMKEALRASTMDVTVVLPSGLEKRSVLNGSHAMMDLLVELCLQNHLNPSHHALEIRSSETQQPLSFKPNTLIGTLNVHTVFLKEKVPEEKVKPGPPKVPEKSVRLVVNYLRTQKAVVRVSPEVPLQNILPVICAKCEVSPEHVVLLRDNIAGEELELSKSLNELGIKELYAWDNRRETFRKSSLGNDETDKEKKKFLGFFKVNKRSNSKGCLTTPNSPSMHSRSLTLGPSLSLGSISGVSVKSEMKKRRAPPPPGSGPPVQDKASEKVSLGSQIDLQKKKRRAPAPPPPQPPPPSPLIPNRTEDKEENRKSTMGGGRQVPQKPPRGTARGPPQLVLPPPPPYPPPDTDVVEPLSFPGEGAGSEASDPIPKLSLPLGSGSHCSPDGAPQVLSEAEETVSVGSCFASEDTTEDSGVMSSPSDIVSLDSQQDSMKYKDKWATDQEDCSDQDLAGTPDLGPQKSPLWEKNGSENSHLRTEKAVTASNDEEDLLIAGEFRKTLAELDEDLEEMEDSYETDTSSLTSSIHGASNHCPQDAMIPHGDTDAIPVTFIGEVSDDPVDSGLFSNRNNNAGSFDSEGVASRRDSLAPLQAEHSQPHEKAREEVPALHPASHDVGKGIRVALSNISKDGNLMETAPRVTSFASNLHTDNLNAKVKDKVYGCADGERTQATERVNSQPVNEKDSNDKNAALAPTSWHQRGQNPGKSYRLKHGLTTYKIIPPKSEMRCYDRDVSLSTGAIKIDELGNLVSPHATGIRIISLSSSVPEAESQPIGKVREFWRCNSVEKHLGRPSESSARGPPSTPVPTQTQNPESRLQADPKPISPQQKSAHHEGRNPLGEGRNQPPTMGMGHVRVPAAHTTEVTFLKPQRRTSSQYVASAIAKRIGAPKVHADVVRPHGYAEKGYAGKAPVLAAPPVTVKDDRTSSPHSETQGWKDGAQWPCVTPPNNHGEDLAVGAPPRGEVIGPHRKLSTQDRPAAIHRSSCFSLVQSSQRDRVSVGQSCGFSGKQSTSSQEASSASEPRRAPDGTDPPPPHTSDTQACSRELVNGSVRAPGHGEPSHPPGGSGTESHILLEREEKPSVFSTDGNETDSIWPPSIFGPKKKFKPVVQRPVPKDTSLHSALMEAIHSAGGKDRLRKTAEHTGEGRPAKLSYTEAEGERSALLAAIRGHSGTCSLRKALSAPRTASRFSTGTLSNTADARQALMDAIRSGTGAARLRKVPLLV

SEQ ID NO: 11762 - protein, 1097 aa, Homo sapiens
MLKPQPLQQPSQPQQPPPTQQAVARRPPGGTSPPNGGLPGPLATSAAPPGPPAAASPCLGPVAAAGSGLRRGAEGILAPQPPPPQQHQERPGAAAIGSARGQSTGKGPPQSPVFEGVYNNSRMLHFLTAVVGSTCDVKVKNGTTYEGIFKTLSSKFELAVDAVHRKASEPAGGPRREDIVDTMVFKPSDVMLVHFRNVDFNYATKDKFTDSAIAMNSKVNGEHKEKVLQRWEGGDSNSDDYDLESDMSNGWDPNEMFKFNEENYGVKTTYDSSLSSYTVPLEKDNSEEFRQRELRAAQLAREIESSPQYRLRIAMENDDGRTEEEKHSAVQRQGSGRESPSLASREGKYIPLPQRVREGPRGGVRCSSSRGGRPGLSSLPPRGPHHLDNSSPGPGSEARGINGGPSRMSPKAQRPLRGAKTLSSPSNRPSGETSVPPPPAVGRMYPPRSPKSAAPAPISASCPEPPIGSAVPTSSASIPVTSSVSDPGVGSISPASPKISLAPTDVKELSTKEPGRTLEPQELARIAGKVPGLQNEQKRFQLEELRKFGAQFKLQPSSSPENSLDPFPPRILKEEPKGKEKEVDGLLTSEPMGSPVSSKTESVSDKEDKPPLAPSGGTEGPEQPPPPCPSQTGSPPVGLIKGEDKDEGPVAEQVKKSTLNPNAKEFNPTKPLLSVNKSTSTPTSPGPRTHSTPSIPVLTAGQSGLYSPQYISYIPQIHMGPAVQAPQMYPYPVSNSVPGQQGKYRGAKGSLPPQRSDQHQPASAPPMMQAAAAAGPPLVAATPYSSYIPYNPQQFPGQPAMMQPMAHYPSQPVFAPMLQSNPRMLTSGSHPQAIVSSSTPQYPSAEQPTPQALYATVHQSYPHHATQLHAHQPQPATTPTGSQPQSQHAAPSPVQHQAGQAPHLGSGQPQQNLYHPGALTGTPPSLPPGPSAQSPQSSFPQPAAVYAIHHQQLPHGFTNMAHVTQAHVQTGITAAPPPHPGAPHPPQVMLLHPPQSHGGPPQGAVPQSGVPALSASTPSPYPYIGHPQGEQPGQAPGFPGGADDRILCRVGRSHSRRRQGLAPGSVLCFPPSSLSCDPAAPLPTASPALSDPDCLLT

SEQ ID NO: 11763 - protein, 759 aa, Homo sapiens
MGLADASGPRDTQALLSATQAMDLRRRDYHMERPLLNQEHLEELGRWGSAPRTHQWRTWLQCSRARAYALLLQHLPVLVWLPRYPVRDWLLGDLLSGLSVAIMQLPQGLAYALLAGLPPVFGLYSSFYPVFIYFLFGTSRHISVGTFAVMSVMVGSVTESLAPQALNDSMINETARDAARVQVASTLSVLVGLFQVGLGLIHFGFVVTYLSEPLVRGYTTAAAVQVFVSQLKYVFGLHLSSHSGPLSLIYTVLEVCWKLPQSKVGTVVTAAVAGVVLVVVKLLNDKLQQQLPMPIPGELLTLIGATGISYGMGLKHRFEVDVVGNIPAGLVPPVAPNTQLFSKLVGSAFTIAVVGFAIAISLGKIFALRHGYRVDSNQELVALGLSNLIGGIFQCFPVSCSMSRSLVQESTGGNSQVAGAISSLFILLIIVKLGELFHDLPKAVLAAIIIVNLKGMLRQLSDMRSLWKANRADLLIWLVTFTATILLNLDLGLVVAVIFSLLLVVVRTQMPHYSVLGQVPDTDIYRDVAEYSEAKEVRGVKVFRSSATVYFANAEFYSDALKQRCGVDVDFLISQKKKLLKKQEQLKLKQLQKEEKLRKQAASPKGASVSINVNTSLEDMRSNNVEDCKMMQVSSGDKMEDATANGQEDSKAPDGSTLKALGLPQPDFHSLILDLGALSFVDTVCLKSLKNIFHDFREIEVEVYMAACHSPVVSQLEAGHFFDASITKKHLFASVHDAVTFALQHPRPVPDSPVSVTRL

SEQ ID NO: 11764 - protein, 389 aa, Homo sapiens
MSKISEAVKRARAAFSSGRTRPLQFRIQQLEALQRLIQEQEQELVGALAADLHKNEWNAYYEEVVYVLEEIEYMIQKLPEWAADEPVEKTPQTQQDELYIHSEPLGVVLVIGTWNYPFNLTIQPMVGAIAAGNSVVLKPSELSENMASLLATIIPQYLDKDLYPVINGGVPETTELLKERFDHILYTGSTGVGKIIMTAAAKHLTPVTLELGGKSPCYVDKNCDLDVACRRIAWGKFMNSGQTCVAPDYILCDPSIQNQIVEKLKKSLKEIFGPVLPIVCVRSLEEAIQFINQREKPLALYMFSSNDKVIKKMIAETSSGGVAANDVIVHITLHSLPFGGVGNSGMGSYHGKKSFETFSHRRSCLVRPLMNDEGLKVRYPPSPAKMTQH

SEQ ID NO: 11765 - protein, 666 aa, Homo sapiens
MWPECRDEALSTVGPHLCIPAPGLTKTPILEKVPRKMAAKTPSSEESGLPKLPVPPLQQTLATYLQCMRHLVSEEQFRKSQAIVQQFGAPGGLGETLQQKLLERQEKTANWVSEYWLNDMYLNNRLALPVNSSPAVIFARQHFPGTDDQLRFAASLISGVLSYKALLDSHSIPTDCAKGQLSGQPLCMKQYYGLFSSYRLPGHTQDTLVAQNSSIMPEPEHVIVACCNQFFVLDVVINFRRLSEGDLFTQLRKIVKMASNEDERLPPIGLLTSDGRSEWAEARTVLVKDSTNRDSLDMIERCICLVCLDAPGGVELSDTHRALQLLHGGGYSKNGANRWYDKSLQFVVGRDGTCGVVCEHSPFDGIVLVQCTEHLLKHVTQSSRKLIRADSVSELPAPRRLRWKCSPEIQGHLASSAEKLQRIVKNLDFIVYKFDNYGKTFIKKQKCSPDAFIQVALQLAFYRLHRRLVPTYESASIRRFQEGRVDNIRSATPEALAFVRAVTDHKAAVPASEKLLLLKDAIRAQTAYTVMAITGMAIDNHLLALRELARAMCKELPEMFMDETYLMSNRFVLSTSQVPTTTEMFCCYGPVVPNGYGACYNPQPETILFCISSFHSCKETSSSKFAKAVEESLIDMRDLCSLLPPTESKPLATKEKATRPSQGHQP

SEQ ID NO: 11766 - protein, 2454 aa, Homo sapiens
MTAEPMSESKLNTLVQKLHDFLAHSSEESEETSSPPRLAMNQNTDKISGSGSNSDMMENSKEEGTSSSEKSKSSGSSRSKRKPSIVTKYVESDDEKPLDDETVNEDASNENSENDITMQSLPKEDGLHGIVSCTACGQQVNHFQKDSIYRHPSLQVLICKNCFKYYMSDDISRDSDGMDEQCRWCAEGGNLICCDFCHNAFCKKCILRNLGRKELSTIMDENNQWYCYICHPEPLLDLVTACNSVFENLEQLLQQNKKKIKVDSEKSNKVYEHTSRFSPKKTSSNCNGEEKKLDDSCSGSVTYSYSALIVPKEMIKKAKKLIETTANMNSSYVKFLKQATDNSEISSATKLRQLKAFKSVLADIKKAHLALEEDLNSEFRAMDAVNKEKNTKEHKVIDAKFETKARKGEKPCALEKKDISKSEAKLSRKQVDSEHMHQNVPTEEQRTNKSTGGEHKKSDRKEEPQYEPANTSEDLDMDIVSVPSSVPEDIFENLETAMEVQSSVDHQGDGSSGTEQEVESSSVKLNISSKDNRGGIKSKTTAKVTKELYVKLTPVSLSNSPIKGADCQEVPQDKDGYKSCGLNPKLEKCGLGQENSDNEHLVENEVSLLLEESDLRRSPRVKTTPLRRPTETNPVTSNSDEECNETVKEKQKLSVPVRKKDKRNSSDSAIDNPKPNKLPKSKQSETVDQNSDSDEMLAILKEVSRMSHSSSSDTDINEIHTNHKTLYDLKTQAGKDDKGKRKRKSSTSGSDFDTKKGKSAKSSIISKKKRQTQSESSNYDSELEKEIKSMSKIGAARTTKKRIPNTKDFDSSEDEKHSKKGMDNQGHKNLKTSQEGSSDDAERKQERETFSSAEGTVDKDTTIMELRDRLPKKQQASASTDGVDKLSGKEESFTSLEVRKVAETKEKSKHLKTKTCKKVQDGLSDIAEKFLKKDQSDETSEDDKKQSKKGTEEKKKPSDFKKKVIKMEQQYESSSDGTEKLPEREEICHFPKGIKQIKNGTTDGEKKSKKIRDKTSKKKDELSDYAEKSTGKGDSCDSSEDKKSKNGAYGREKKRCKLLGKSSRKRQDCSSSDTEKYSMKEDGCNSSDKRLKRIELRERRNLSSKRNTKEIQSGSSSSDAEESSEDNKKKKQRTSSKKKAVIVKEKKRNSLRTSTKRKQADITSSSSSDIEDDDQNSIGEGSSDEQKIKPVTENLVLSSHTGFCQSSGDEALSKSVPVTVDDDDDDNDPENRIAKKMLLEEIKANLSSDEDGSSDDEPEEGKKRTGKQNEENPGDEEAKNQVNSESDSDSEESKKPRYRHRLLRHKLTVSDGESGEEKKTKPKEHKEVKGRNRRKVSSEDSEDSDFQESGVSEEVSESEDEQRPRTRSAKKAELEENQRSYKQKKKRRRIKVQEDSSSENKSNSEEEEEEKEEEEEEEEEEEEEEEDENDDSKSPGKGRKKIRKILKDDKLRTETQNALKEEEERRKRIAEREREREKLREVIEIEDASPTKCPITTKLVLDEDEETKEPLVQVHRNMVIKLKPHQVDGVQFMWDCCCESVKKTKKSPGSGCILAHCMGLGKTLQVVSFLHTVLLCDKLDFSTALVVCPLNTALNWMNEFEKWQEGLKDDEKLEVSELATVKRPQERSYMLQRWQEDGGVMIIGYEMYRNLAQGRNVKSRKLKEIFNKALVDPGPDFVVCDEGHILKNEASAVSKAMNSIRSRRRIILTGTPLQNNLIEYHCMVNFIKENLLGSIKEFRNRFINPIQNGQCADSTMVDVRVMKKRAHILYEMLAGCVQRKDYTALTKFLPPKHEYVLAVRMTSIQCKLYQYYLDHLTGVGNNSEGGRGKAGAKLFQDFQMLSRIWTHPWCLQLDYISKENKGYFDEDSMDEFIASDSDETSMSLSSDDYTKKKKKGKKGKKDSSSSGSGSDNDVEVIKVWNSRSRGGGEGNVDETGNNPSVSLKLEESKATSSSNPSSPAPDWYKDFVTDADAEVLEHSGKMVLLFEILRMAEEIGDKVLVFSQSLISLDLIEDFLELASREKTEDKDKPLIYKGEGKWLRNIDYYRLDGSTTAQSRKKWAEEFNDETNVRGRLFIISTKAGSLGINLVAANRVIIFDASWNPSYDIQSIFRVYRFGQTKPVYVYRFLAQGTMEDKIYDRQVTKQSLSFRVVDQQQVERHFTMNELTELYTFEPDLLDDPNSEKKKKRDTPMLPKDTILAELLQIHKEHIVGYHEHDSLLDHKEEEELTEEERKAAWAEYEAEKKGLTMRFNIPTGTNLPPVSFNSQTPYIPFNLGALSAMSNQQLEDLINQGREKVVEATNSVTAVRIQPLEDIISAVWKENMNLSEAQVQALALSRQASQELDVKRREAIYNDVLTKQQMLISCVQRILMNRRLQQQYNQQQQQQMTYQQATLGHLMMPKPPNLIMNPSNYQQIDMRGMYQPVAGGMQPPPLQRAPPPMRSKNPGPSQGKSM

SEQ ID NO: 11767 - protein, 1140 aa, Homo sapiens
MVLSLTGLIAFSFLQATLALNPEDPNVCSHWESYAVTVQESYAHPFDQIYYTRCTDILNWFKCTRHRISYKTAYRRGLRTMYRRRSQCCPGYYESGDFCIPLCTEECVHGRCVSPDTCHCEPGWGGPDCSSGCDSDHWGPHCSNRCQCQNGALCNPITGACVCAAGFRGWRCEELCAPGTHGKGCQLPCQCRHGASCDPRAGECLCAPGYTGVYCEELCPPGSHGAHCELRCPCQNGGTCHHITGECACPPGWTGAVCAQPCPPGTFGQNCSQDCPCHHGGQCDHVTGQCHCTAGYMGDRCQEECPFGSFGFQCSQHCDCHNGGQCSPTTGACECEPGYKGPRCQERLCPEGLHGPGCTLPCPCDADNTISCHPVTGACTCQPGWSGHHCNESCPVGYYGDGCQLPCTCQNGADCHSITGGCTCAPGFMGEVCAVSCAAGTYGPNCSSICSCNNGGTCSPVDGSCTCKEGWQGLDCTLPCPSGTWGLNCNESCTCANGAACSPIDGSCSCTPGWLGDTCELPCPDGTFGLNCSEHCDCSHADGCDPVTGHCCCLAGWTGIRCDSTCPPGRWGPNCSVSCSCENGGSCSPEDGSCECAPGFRGPLCQRICPPGFYGHGCAQPCPLCVHSSRPCHHISGICECLPGFSGALCNQVCAGGYFGQDCAQLCSCANNGTCSPIDGSCQCFPGWIGKDCSQACPPGFWGPACFHACSCHNGASCSAEDGACHCTPGWTGLFCTQRCPAAFFGKDCGRVCQCQNGASCDHISGKCTCRTGFTGQHCEQRCAPGTFGYGCQQLCECMNNSTCDHVTGTCYCSPGFKGIRCDQAALMMEELNPYTKISPALGAERHSVGAVTGIMLLLFLIVVLLGLFAWHRRRQKEKGRDLAPRVSYTPAMRMTSTDYSLSDLSQSSSHAHCFSNSSYHALACGGPATSQASTLDRNSPTKLSNKSLDRDTAGWTPYSYVNVLDSHFQISALEARYPPEDFYIELRHLSRPAEPHSPGACGMDRRQNTYIMDKGFKDYMKESVCSSSTCSLNSSENPYATIKDPPILTCKLPESSYVEMKSPVHMGSPYTDVPSLSTSNKNIYEVEPTVSVVQEGCGHNSSYIQNAYDLPRNSHIPGHYDLLPVRQSPANGPSQDKQS

SEQ ID NO: 11768 - protein, 356 aa, Homo sapiens
MSREVAEQEERLRRGDDLRLQMALEESRRDTVKIPKKKEHGSLPQQTTLLDLMDALPSSGPAAQKAEPWGPSASTNQTNPWGGPAAPASTSDPWPSFGTKPAASIDPWGVPTGATVQSVPKNSDPWAASQQPASSAGKRASDAWGAVSTTKPVSVSGSFELFSNLNGTIKDDFSEFDNLRTSKKTAESVTSLPSQNNGTTSPDPFESQPLTVASSKPSSARKTPESFLGPNAALVNLDSLVTRPAPPAQSLNPFLAPGAPATSAPVNPFQVNQPQPLTLNQLRGSPVLGTSTSFGPGPGVESMAVASMTSAAPQPALGATGSSLTPLGPAMMNMVGSVGIPPSAAQATGTTNPFLL

SEQ ID NO: 11769 - protein, 484 aa, Homo sapiens
MTTSSIRRQMKNIVNNYSEAEIKVREATSNDPWGPSSSLMTEIADLTYNVVAFSEIMSMVWKRLNDHGKNWRHVYKALTLLDYLIKTGSERVAQQCRENIFAIQTLKDFQYIDRDGKDQGINVREKSKQLVALLKDEERLKAERAQALKTKERMAQVATGMGSNQITFGRGSSQPNLSTSHSEQEYGKAGGSPASYHGSPEASLCPQHRTGAPLGQSEELQPLSQRHPFLPHLGLASRPNGDWSQPCLTCDRAARATSPRVSSELEQARPQTSGEEELQLQLALAMSREVAEQEERLRRGDDLRLQMALEESRRDTVKIPKKKEHGSLPQQTTLLDLMDALPSSGPAAQKAEPWGPSASTNQTNPWGGPAAPASTSDPWPSFGTKPAASIDPWGVPTGATVQSVPKNSDPWAASQQPASSAGKRASDAWGAVSTTKPVSVSGSFELFSNLNGTIKDDFSEFDNLRTSKKTGMQGLTGLLFTMEI

SEQ ID NO: 11770 - protein, 409 aa, Homo sapiens
MTTSSIRRQMKNIVNNYSEAEIKVREATSNDPWGPSSSLMTEIADLTYNVVAFSEIMSMVWKRLNDHGKNWRHVYKALTLLDYLIKTGSERVAQQCRENIFAIQTLKDFQYIDRDGKDQGINVREKSKQLVALLKDEERLKAERAQALKTKERMAQVATGMGSNQITFGRGSSQPNLSTSHSEQEYGKAGGSPASYHGSTSPRVSSELEQARPQTSGEEELQLQLALAMSREVAEQEERLRRGDDLRLQMALEESRRDTVKIPKKKEHGSLPQQTTLLDLMDALPSSGPAAQKAEPWGPSASTNQTNPWGGPAAPASTSDPWPSFGTKPAASIDPWGVPTGATVQSVPKNSDPWAASQQPASSAGKRASDAWGAVSTTKPVSVSGSFELFSNLNGTIKDDFSEFDNLRT

SEQ ID NO: 11771 - protein, 701 aa, Homo sapiens
MQLVLKMDSSPDNDSWLEDQWERWLTHDISLEEFEDEDLSEITDECGISLQCKDTLSLRPPRAGLLSAGGGGAGSRLQAEMLQMDLIDATGDTPGAEDDEEDDDEERAARRPGAGPPKAESGQEPASRGQGQSQGQSQGPGSGDTYRPKRPTTLNLFPQVPRSQDTLNNNSLGKKHSWQDRVSRSSSPLKTGEQTPPHEHICLSDELPPQSGPAPTTDRGTSTDSPCRRSTATQMAPPGGPPAAPPGGRGHSHRDRIHYQADVRLEATEEIYLTPVQRPPDAAEPTSAFLPPTESRMSVSSDPDPAAYPSTAGRPHPSISEEEEGFDCLSSPERAEPPGGGWRGSLGEPPPPPRASLSSDTSALSYDSVKYTLVVDEHAQLELVSLRPCFGDYSDESDSATVYDNCASVSSPYESAIGEEYEEAPRPQPPACLSEDSTPDEPDVHFSKKFLNVFMSGRSRSSSAESFGLFSCIINGEEQEQTHRAIFRFVPRHEDELELEVDDPLLVELQAEDYWYEAYNMRTGARGVFPAYYAIEVTKEPEHMAALAKNSDWVDQFRVKFLGSVQVPYHKGNDVLCAAMQKIATTRRLTVHFNPPSSCVLEISVRGVKIGVKADDSQEAKGNKCSHFFQLKNISFCGYHPKNNKYFGFITKHPADHRFACHVFVSEDSTKALAESVGRAFQQFYKQFVEYTCPTEDIYLE

SEQ ID NO: 11772 - protein, 285 aa, Homo sapiens
MLSAAHDILSHKRTSGNQSHVDPGPTPIPHNSSSRFDCNSVSTAPPGSRQWDLCCWKLRPGCLFSFCGDQPVCYFLLLTSPEAQDPGGEEEAESAARQPLIRTEAPESKPGSSSSLSLRERWTVFKGLLWYIVPLVVVYFAEYFINQGLFELLFFWNTSLSHAQQYRWYQMLYQAGVFASRSSLRCCRIRFTWALALLQCLNLVFLLADVWFGFLPSIYLVFLIILYEGLLGGAAYVNTFHNIALETSDEHREFAMAATCISDTLGISLSGLLALPLHDFLCQLS

SEQ ID NO: 11773 - protein, 224 aa, Homo sapiens
MEPGLWLLFGLTVTSAAGFVPCSQSGDAGRRGVSQAPTAARSEGDCEETVAGPGEETVAGPGEGTVAPTALQGPSPGSPGQEQAAEGAPEHHRSRRCTCFTYKDKECVYYCHLDIIWINTPEQTVPYGLSNYRGSFRGKRSAGPLPGNLQLSHRPHLRCACVGRYDKACLHFCTQTLDVSRQVEVKDQQSKQALDLHHPKLMPGSGLALAPSTCPRCLFQEGAP

SEQ ID NO: 11774 - protein, 1052 aa, Homo sapiens
MENLESRLKNAPYFRCEKGTDSIPLCRKCETCVLAWKIFSTKEWFCRINDISQRRFLVGILKQLNSLYLLHYFQNILQTTQGKDFIYNRSRINLSKKEGKVVKSSLNQMLDKTVEQKMKEILYWFANSTQWTKANYTLLLLQMCNPKLLLTAANVIRVLFLREENNISGLNQDITDVCFSPEKDHSSKSATSQVYWTAKTQHTSLPLSKAPENEHLLGAASNPEEPWRNSLRCISEMNRLFSGKGDITKPGYDPCNLLVDLDDIRDLSSGFSKYRDFIRYLPIHLSKYILRMLDRHTLNKCASVSQHWAAMAQQVKMDLSAHGFIQNQITFLQGSYTRGIDPNYANKVSIPVPKMVDDGKSMRVKHPKWKLRTKNEYNLWTAYQNEETQQVLIEERNVFCGTYNVRILSDTWDQNRVIHYSGGDLIAVSSNRKIHLLDIIQVKAIPVEFRGHAGSVRALFLCEEENFLLSGSYDLSIRYWDLKSGVCTRIFGGHQGTITCMDLCKNRLVSGGRDCQVKVWDVDTGKCLKTFRHKDPILATRINDTYIVSSCERGLVKVWHIAMAQLVKTLSGHEGAVKCLFFDQWHLLSGSTDGLVMAWSMVGKYERCLMAFKHPKEVLDVSLLFLRVISACADGKIRIYNFLNGNCMKVLKANGRGDPVLSFFIQGNRMVVNTESNVLMFQFEHIKWQYAVEKTKQKKNKEKEEEKEENSLMEILSKCNIQVHSPRESVSSKQTVIQELLPGKPPKSRVLLKPAKFSSAVLIEELQSQGKSKSPRRDADDVEKAQKQGQLETPGKLPSHPKKKSWKIPMSPDQFLLTVSALQHAHNSGEFAYPCRPQTEITDVWGPSISYPRKVLNFKGKSIQRAVDRLRLSNPPIDVKRTSIPLEIQKLQPNLKISLHSPRVQSTIPQPMIIRSRFSGSLKGGDQVTSSIERAVCSTGPLTSMQVIKPNRMLAPQVGTATLSLKKERPRIYTALDPFRVNTEFVLLTVKEEKEHQEAKMKEYQARESTGVVDPGKVSKAAWIRKIKGLPIDNFTKQGKTAAPELGQNVFI

SEQ ID NO: 11775 - protein, 594 aa, Homo sapiens
MVLRSHPFPRQDRPQGSVPRAVPGSPVGPSTSTHSEDRHGPSSSVGTVIGTGTGGLVEAGGQPQPRSSETNGSPSPDPPPGLRGEGTREKSLDPLPQAAMPRGPAQPPAQRPPGPAASSSARRSQPVPQLRKRSRCEIAPSSEQEVRPAASGDPQGEAPGEGGSPAGRSGALTEKQEEARKLMVFLQRPGGWGVVEGPRKPSSRALEPATAAALRRRLDLGSCLDVLAFAQQHGEPGLAQETYALMSDNLLRVLGDPCLYRRLSAADRERILSLRTGRGRAVLGVLVLPSLYQGGRSGLPRGPRGEEPPAAAPVSLPLPAHLHVFNPRENTWRPLTQVPEEAPLRGCGLCTMHNYLFLAGGIRGSGAKAVCSNEVFCYNPLTNIWSQVRPMQQARAQLKLVALDGLLYAIGGECLYSMECYDPRTDAWTPRAPLPAGTFPVAHEAVACRGDIYVTGGHLFYRLLRYSPVKDAWDECPYSASHRRSSDIVALGGFLYRFDLLRGVGAAVMRYNTVTGSWSRAASLPLPAPAPLHCTTLGNTIYCLNPQVTATFTVSGGTAQFQAKELQPFPLGSTGVLSPFILTLPPEDRLQTSL

SEQ ID NO: 11776 - protein, 487 aa, Homo sapiens
MAALMTPGTGAPPAPGDFSGEGSQGLPDPSPEPKQLPELIRMKRDGGRLSEADIRGFVAAVVNGSAQGAQIGAMLMAIRLRGMDLEETSVLTQALAQSGQQLEWPEAWRQQLVDKHSTGGVGDKVSLVLAPALAACGCKVPMISGRGLGHTGGTLDKLESIPGFNVIQSPEQMQVLLDQAGCCIVGQSEQLVPADGILYAARDVTATVDSLPLITASILSKKLVEGLSALVVDVKFGGAAVFPNQEQARELAKTLVGVGASLGLRVAAALTAMDKPLGRCVGHALEVEEALLCMDGAGPPDLRDLVTTLGGALLWLSGHAGTQAQGAARVAAALDDGSALGRFERMLAAQGVDPGLARALCSGSPAERRQLLPRAREQEELLAPADAPLPAGTVELVRALPLALVLHELGAGRSRAGEPLRLGVGAELLVDVGQRLRRGTPWLRVHRDGPALSGPQSRALQEALVLSDRAPFAAPSPFAELVLPPQQ

SEQ ID NO: 11777 - protein, 468 aa, Homo sapiens
MGRGWGFLFGLLGAVWLLSSGHGEEQPPETAAQRCFCQVSGYLDDCTCDVETIDRFNNYRLFPRLQKLLESDYFRYYKVNLKRPCPFWNDISQCGRRDCAVKPCQSDEVPDGIKSASYKYSEEANNLIEECEQAERLGAVDESLSEETQKAVLQWTKHDDSSDNFCEADDIQSPEAEYVDLLLNPERYTGYKGPDAWKIWNVIYEENCFKPQTIKRPLNPLASGQGTSEENTFYSWLEGLCVEKRAFYRLISGLHASINVHLSARYLLQETWLEKKWGHNITEFQQRFDGILTEGEGPRRLKNLYFLYLIELRALSKVLPFFERPDFQLFTGNKIQDEENKMLLLEILHEIKSFPLHFDENSFFAGDKKEAHKLKEDFRLHFRNISRIMDCVGCFKCRLWGKLQTQGLGTALKILFSEKLIANMPESGPSYEFHLTRQEIVSLFNAFGRISTSVKELENFRNLLQNIH

SEQ ID NO: 11778 - protein, 1030 aa, Homo sapiens
MALSPGANLVFHEDPKMTPSPPSCGAPGLGSGTIPQPHPDMAQVPMLNLLPSPGLALVPDLNDSLSPVSGEASGLVSENTPRPDDSRAIAPASLQITSSCSGEALDLDSKDVSRPDSQGRLCPASNPILSPSSTEAPRLSSGNHPQSNSEDAFKCLSSKIFKLGQRNSNPSRHELNPFIRHHSREGLVLGHCISRPSSKALLIPTSNSSLDLDSNPLLNMGSRNTSKLNLNVAPDSHGTLIPDTNETITLASHNISESVSKGAFSTTWSTSSKETMNVASSGHSRSDLSVTITQASYVTLIPGSSYGISLHSSTHEPNSTISPPSCMTLILGSNETLSLDSSLLFSDTSTLTLSSQQDDAKDNSIHTVPLEENLESWSEMASIKVGQFPLGFPISNPAGKDAVTLQGIPEGAFDEVTSCLVKVPEKTEGGNNMALVENVTTLQKSQDLLEAEGEKKTMIKKIMRQIQEEPLDSLSSSVRKQAMEILTQLSHTQPTLGMRERSELVNVCVHSVFSLPSVQAMQEKDEAKAETIQALYHQTLEALQTLLKALFIEDPTPAGLKSILEALGPWMNSGKAHERARAVNTNVSVLNHMLLTLPFFMPLGFPALGLLLGRLILHIGDPDEEIGCEALDGIIILYTILELQKRARDKEETNKKELYESNKHFLGPYNPVSPCQNILRVIEEFGDFLGPQQIKDLLLAALEGLKGSSEAPGKDSREMMQLASEVMLSSVLEWYRHRALEVIPEIMQGIYMQLSHIQEPRARQVALLPVSLLASSFMTEVVVALLMCPLPLNSNGAEMWRQLILCKPSCDVRDLLDLLLGSLKEKPVTKEGRASIVPLAAASGLCELLSVNSCMGRVRRIYPQLLLALLIQVHYHIGLNLPGCVAPPKDTKKGAQPSPFVPVRWVVKVVKTLLLRMGCSYETTFLEDQGGWELMEQVESHHRGVALLARAMVQYSCQELCRILYLLIPLLERGDEKHRITATAFFVEQPCEEGIVILMLRPQDLMGKATTSSHRGSELESDTLSFATWC

SEQ ID NO: 11779 - protein, 411 aa, Homo sapiens
MMGRSPGFAMQHIVGVPHVLVRRGLLGRDLFMTRTLCSPGPSQPGEKRPEEVALGLHHRLPALGRALGHSIQQRATSTAKTWWDRYEEFVGLNEVREAQGKVTEAEKVFMVARGLVREAREDLEVHQAKLKEVRDRLDRVSREDSQYLELATLEHRMLQEEKRLRTAYLRAEDSEREKFSLFSAAVRESHEKERTRAERTKNWSLIGSVLGALIGVAGSTYVNRVRLQELKALLLEAQKGPVSLQEAIREQASSYSRQQRDLHNLMVDLRGLVHAAGPGQDSGSQAGSPPTRDRDVDVLSAALKEQLSHSRQVHSCLEGLREQLDGLEKTCSQMAGVVQLVKSAAHPGLVEPADGAMPSFLLEQGSMILALSDTEQRLEAQVNRNTIYSTLVTCVTFVATLPVLYMLFKAS

SEQ ID NO: 11780 - protein, 650 aa, Homo sapiens
MSNRNNNKLPSNLPQLQNLIKRDPPAYIEEFLQQYNHYKSNVEIFKLQPNKPSKELAELVMFMAQISHCYPEYLSNFPQEVKDLLSCNHTVLDPDLRMTLYTHIVTDIKNINAKHKNNKVNVVLQNFMYTMLRDSNATAAKMSLDVMIELYRRNIWNDAKTVNVITTACFSKVTKILVAALTFFLGKDEDEKQDSDSESEDDGPTARDLLVQYATGKKSSKNKKKLEKAMKVLKKQKKKKKPEVFNFSAIHLIHDPQDFAEKLLKQLECCKERFEVKMMLMNLISRLVGIHELFLFNFYPFLQRFLQPHQREVTKILLFAAQASHHLVPPEIIQSLLMTVANNFVTDKNSGEVMTVGINAIKEITARCPLAMTEELLQDLAQYKTHKDKNVMMSARTLIHLFRTLNPQMLQKKFRGKPTEASIEARVQEYGELDAKDYIPGAEVLEVEKEENAENDEDGWESTSLSEEEDADGEWIDVQHSSDEEQQEISKKLNSMPMEERKAKAAAISTSRVLTQEDFQKIRMAQMRKELDAAPGKSQKRKYIEIDSDEEPRGELLSLRDIERLHKKPKSDKETRLATAMAGKTDRKEFVRKKTKTNPFSSSTNKEKKKQKNFMMMRYSQNVRSKNKRSFREKQLALRDALLKKRKRMK

SEQ ID NO: 11781 - protein, 1294 aa, Homo sapiens
MPYEVNAGYDFTNMVRKKNPPLRNVASEGEGQILEPIGTESKVSGKNKEFSADQMSENTDQSDAAELNHKEEHSLHVQDPSSSSKKDLKSAVLSEKAGFNYESPSKGGNFPSFPHDEVTDRNMLAFSSPAAGGVCEPLKSPQRAEADDPQDMACTPSGDSLETKEDQKMSPKATEETGQAQSGQANCQGLSPVSVASKNPQVPSDGGVRLNKSKTDLLVNDNPDPAPLSPELQDFKCNICGYGYYGNDPTDLIKHFRKYHLGLHNRTRQDAELDSKILALHNMVQFSHSKDFQKVNRSVFSGVLQDINSSRPVLLNGTYDVQVTSGGTFIGIGRKTPDCQGNTKYFRCKFCNFTYMGNSSTELEQHFLQTHPNKIKASLPSSEVAKPSEKNSNKSIPALQSSDSGDLGKWQDKITVKAGDDTPVGYSVPIKPLDSSRQNGTEATSYYWCKFCSFSCESSSSLKLLEHYGKQHGAVQSGGLNPELNDKLSRGSVINQNDLAKSSEGETMTKTDKSSSGAKKKDFSSKGAEDNMVTSYNCQFCDFRYSKSHGPDVIVVGPLLRHYQQLHNIHKCTIKHCPFCPRGLCSPEKHLGEITYPFACRKSNCSHCALLLLHLSPGAAGSSRVKHQCHQCSFTTPDVDVLLFHYESVHESQASDVKQEANHLQGSDGQQSVKESKEHSCTKCDFITQVEEEISRHYRRAHSCYKCRQCSFTAADTQSLLEHFNTVHCQEQDITTANGEEDGHAISTIKEEPKIDFRVYNLLTPDSKMGEPVSESVVKREKLEEKDGLKEKVWTESSSDDLRNVTWRGADILRGSPSYTQASLGLLTPVSGTQEQTKTLRDSPNVEAAHLARPIYGLAVETKGFLQGAPAGGEKSGALPQQYPASGENKSKDESQSLLRRRRGSGVFCANCLTTKTSLWRKNANGGYVCNACGLYQKLHSTPRPLNIIKQNNGEQIIRRRTRKRLNPEALQAEQLNKQQRGSNEEQVNGSPLERRSEDHLTESHQREIPLPSLSKYEAQGSLTKSHSAQQPVLVSQTLDIHKRMQPLHIQIKSPQESTGDPGNSSSVSEGKGSSERGSPIEKYMRPAKHPNYSPPGSPIEKYQYPLFGLPFVHNDFQSEADWLRFWSKYKLSVPGNPHYLSHVPGLPNPCQNYVPYPTFNLPPHFSAVGSDNDIPLDLAIKHSRPGPTANGASKEKTKAPPNVKNEGPLNVVKTEKVDRSTQDELSTKCVHCGIVFLDEVMYALHMSCHGDSGPFQCSICQHLCTDKYDFTTHIQRGLHRNNAQVEKNGKPKE

SEQ ID NO: 11782 - protein, 1267 aa, Homo sapiens
MRGLPRGRGLMRARGRGRAAPPGSRGRGRGGPHRGRGRPRSLLSLPRAQASWTPQLSTGLTSPPVPCLPSQGEAPAEMGALLLEKETRGATERVHGSLGDTPRSEETLPKATPDSLEPAGPSSPASVTVTVGDEGADTPVGATPLIGDESENLEGDGDLRGGRILLGHATKSFPSSPSKGGSCPSRAKMSMTGAGKSPPSVQSLAMRLLSMPGAQGAAAAGSEPPPATTSPEGQPKVHRARKTMSKPGNGQPPVPEKRPPEIQHFRMSDDVHSLGKVTSDLAKRRKLNSGGGLSEELGSARRSGEVTLTKGDPGSLEEWETVVGDDFSLYYDSYSVDERVDSDSKSEVEALTEQLSEEEEEEEEEEEEEEEEEEEEEEEEDEESGNQSDRSGSSGRRKAKKKWRKDSPWVKPSRKRRKREPPRAKEPRGVNGVGSSGPSEYMEVPLGSLELPSEGTLSPNHAGVSNDTSSLETERGFEELPLCSCRMEAPKIDRISERAGHKCMATESVDGELSGCNAAILKRETMRPSSRVALMVLCETHRARMVKHHCCPGCGYFCTAGTFLECHPDFRVAHRFHKACVSQLNGMVFCPHCGEDASEAQEVTIPRGDGVTPPAGTAAPAPPPLSQDVPGRADTSQPSARMRGHGEPRRPPCDPLADTIDSSGPSLTLPNGGCLSAVGLPLGPGREALEKALVIQESERRKKLRFHPRQLYLSVKQGELQKVILMLLDNLDPNFQSDQQSKRTPLHAAAQKGSVEICHVLLQAGANINAVDKQQRTPLMEAVVNNHLEVARYMVQRGGCVYSKEEDGSTCLHHAAKIGNLEMVSLLLSTGQVDVNAQDSGGWTPIIWAAEHKHIEVIRMLLTRGADVTLTDNEENICLHWASFTGSAAIAEVLLNARCDLHAVNYHGDTPLHIAARESYHDCVLLFLSRGANPELRNKEGDTAWDLTPERSDVWFALQLNRKLRLGVGNRAIRTEKIICRDVARGYENVPIPCVNGVDGEPCPEDYKYISENCETSTMNIDRNITHLQHCTCVDDCSSSNCLCGQLSIRCWYDKDGRLLQEFNKIEPPLIFECNQACSCWRNCKNRVVQSGIKVRLQLYRTAKMGWGVRALQTIPQGTFICEYVGELISDAEADVREDDSYLFDLDNKDGEVYCIDARYYGNISRFINHLCDPNIIPVRVFMLHQDLRFPRIAFFSSRDIRTGEELGFDYGDRFWDIKSKYFTCQCGSEKCKHSAEAIALEQSRLARLDPHPELLPELGSLPPVNT

SEQ ID NO: 11783 - protein, 178 aa, Homo sapiens
MDRAARCSGASSLPLLLALALGLVILHCVVADGNSTRSPETNGLLCGDPEENCAATTTQSKRKGHFSRCPKQYKHYCIKGRCRFVVAEQTPSCVCDEGYIGARCERVDLFYLRGDRGQILVICLIAVMVVFIILVIGVCTCCHPLRKRRKRKKKEEEMETLGKDITPINEDIEETNIA

SEQ ID NO: 11784 - protein, 518 aa, Homo sapiens
MATTVTCTRFTDEYQLYEDIGKGAFSVVRRCVKLCTGHEYAAKIINTKKLSARDHQKLEREARICRLLKHSNIVRLHDSISEEGFHYLVFDLVTGGELFEDIVAREYYSEADASHCIQQILEAVLHCHQMGVVHRDLKPENLLLASKCKGAAVKLADFGLAIEVQGDQQAWFGFAGTPGYLSPEVLRKEAYGKPVDIWACGVILYILLVGYPPFWDEDQHKLYQQIKAGAYDFPSPEWDTVTPEAKNLINQMLTINPAKRITAHEALKHPWVCQRSTVASMMHRQETVECLKKFNARRKLKGAILTTMLATRNFSAAKSLLNKKADGVKPQTNSTKNSAAATSPKGTLPPAALEPQTTVIHNPVDGIKESSDSANTTIEDEDAKARKQEIIKTTEQLIEAVNNGDFEAYAKICDPGLTSFEPEALGNLVEGMDFHRFYFENLLAKNSKPIHTTILNPHVHVIGEDAACIAYIRLTQYIDGQGRPRTSQSEETRVWHRRDGKWQNVHFHCSGAPVAPLQ

SEQ ID NO: 11785 - protein, 666 aa, Homo sapiens
MATTVTCTRFTDEYQLYEDIGKGAFSVVRRCVKLCTGHEYAAKIINTKKLSARDHQKLEREARICRLLKHSNIVRLHDSISEEGFHYLVFDLVTGGELFEDIVAREYYSEADASHCIQQILEAVLHCHQMGVVHRDLKPENLLLASKCKGAAVKLADFGLAIEVQGDQQAWFGFAGTPGYLSPEVLRKEAYGKPVDIWACGVILYILLVGYPPFWDEDQHKLYQQIKAGAYDFPSPEWDTVTPEAKNLINQMLTINPAKRITAHEALKHPWVCQRSTVASMMHRQETVECLKKFNARRKLKGAILTTMLATRNFSVGRQTTAPATMSTAASGTTMGLVEQAKSLLNKKADGVKPQTNSTKNSAAATSPKGTLPPAALEPQTTVIHNPVDGIKESSDSANTTIEDEDAKAPRVPDILSSVRRGSGAPEAEGPLPCPSPAPFSPLPAPSPRISDILNSVRRGSGTPEAEGPLSAGPPPCLSPALLGPLSSPSPRISDILNSVRRGSGTPEAEGPSPVGPPPCPSPTIPGPLPTPSRKQEIIKTTEQLIEAVNNGDFEAYAKICDPGLTSFEPEALGNLVEGMDFHRFYFENLLAKNSKPIHTTILNPHVHVIGEDAACIAYIRLTQYIDGQGRPRTSQSEETRVWHRRDGKWQNVHFHCSGAPVAPLQ

SEQ ID NO: 11786 - protein, 1071 aa, Homo sapiens
MDEPPFSEAALEQALGEPCDLDAALLTDIEDMLQLINNQDSDFPGLFDPPYAGSGAGGTDPASPDTSSPGSLSPPPATLSSSLEAFLSGPQAAPSPLSPPQPAPTPLKMYPSMPAFSPGPGIKEESVPLSILQTPTPQPLPGALLPQSFPAPAPPQFSSTPVLGYPSPPGGFSTGSPPGNTQQPLPGLPLASPPGVPPVSLHTQVQSVVPQQLLTVTAAPTAAPVTTTVTSQIQQVPVLLQPHFIKADSLLLTAMKTDGATVKAAGLSPLVSGTTVQTGPLPTLVSGGTILATVPLVVDAEKLPINRLAAGSKAPASAQSRGEKRTAHNAIEKRYRSSINDKIIELKDLVVGTEAKLNKSAVLRKAIDYIRFLQHSNQKLKQENLSLRTAVHKSKSLKDLVSACGSGGNTDVLMEGVKTEVEDTLTPPPSDAGSPFQSSPLSLGSRGSGSGGSGSDSEPDSPVFEDSKAKPEQRPSLHSRGMLDRSRLALCTLVFLCLSCNPLASLLGARGLPSPSDTTSVYHSPGRNVLGTESRDGPGWAQWLLPPVVWLLNGLLVLVSLVLLFVYGEPVTRPHSGPAVYFWRHRKQADLDLARGDFAQAAQQLWLALRALGRPLPTSHLDLACSLLWNLIRHLLQRLWVGRWLAGRAGGLQQDCALRVDASASARDAALVYHKLHQLHTMGKHTGGHLTATNLALSALNLAECAGDAVSVATLAEIYVAAALRVKTSLPRALHFLTRFFLSSARQACLAQSGSVPPAMQWLCHPVGHRFFVDGDWSVLSTPWESLYSLAGNPVDPLAQVTQLFREHLLERALNCVTQPNPSPGSADGDKEFSDALGYLQLLNSCSDAAGAPAYSFSISSSMATTTGVDPVAKWWASLTAVVIHWLRRDEEAAERLCPLVEHLPRVLQESERPLPRAALHSFKAARALLGCAKAESGPASLTICEKASGYLQDSLATTPASSSIDKAVQLFLCDLLLVVRTSLWRQQQPPAPAPAAQGTSSRPQASALELRGFQRDLSSLRRLAQSFRPAMRRLMDVLTSESAWALPQHLGKGFPSPSGHKVPGWHGRMD

SEQ ID NO: 11787 - protein, 825 aa, Homo sapiens
MGWLCSGLLFPVSCLVLLQVASSGNMKVLQEPTCVSDYMSISTCEWKMNGPTNCSTELRLLYQLVFLLSEAHTCIPENNGGAGCVCHLLMDDVVSADNYTLDLWAGQQLLWKGSFKPSEHVKPRAPGNLTVHTNVSDTLLLTWSNPYPPDNYLYNHLTYAVNIWSENDPADFRIYNVTYLEPSLRIAASTLKSGISYRARVRAWAQCYNTTWSEWSPSTKWHNSYREPFEQHLLLGVSVSCIVILAVCLLCYVSITKIKKEWWDQIPNPARSRLVAIIIQDAQGSQWEKRSRGQEPAKCPHWKNCLTKLLPCFLEHNMKRDEDPHKAAKEMPFQGSGKSAWCPVEISKTVLWPESISVVRCVELFEAPVECEEEEEVEEEKGSFCASPESSRDDFQEGREGIVARLTESLFLDLLGEENGGFCQQDMGESCLLPPSGSTSAHMPWDEFPSAGPKEAPPWGKEQPLHLEPSPPASPTQSPDNLTCTETPLVIAGNPAYRSFSNSLSQSPCPRELGPDPLLARHLEEVEPEMPCVPQLSEPTTVPQPEPETWEQILRRNVLQHGAAAAPVSAPTSGYQEFVHAVEQGGTQASAVVGLGPPGEAGYKAFSSLLASSAVSPEKCGFGASSGEEGYKPFQDLIPGCPGDPAPVPVPLFTFGLDREPPRSPQSSHLPSSSPEHLGLEPGEKVEDMPKPPLPQEQATDPLVDSLGSGIVYSALTCHLCGHLKQCHGQEDGGQTPVMASPCCGCCCGDRSSPPTTPLRAPDPSPGGVPLEASLCPASLAPSGISEKSKSSSSFHPAPGNAQSSSQTPKIVNFVSVGPTYMRVS

SEQ ID NO: 11788 - protein, 1011 aa, Homo sapiens
MIENSMFEEEPDVVDLAKEPCLHPLEPDEVEYEPRGSRLLVRGLGEHEMEEDEEDYESSAKLLGMSFMNRSSGLRNSATGYRQSPDGACSVPSARTMVVCAFVIVVAVSVIMVIYLLPRCTFTKEGCHKKNQSIGLIQPFATNGKLFPWAQIRLPTAVVPLRYELSLHPNLTSMTFRGSVTISVQALQVTWNIILHSTGHNISRVTFMSAVSSQEKQAEILEYAYHGQIAIVAPEALLAGHNYTLKIEYSANISSSYYGFYGFSYTDESNEKKYFAATQFEPLAARSAFPCFDEPAFKATFIIKIIRDEQYTALSNMPKKSSVVLDDGLVQDEFSESVKMSTYLVAFIVGEMKNLSQDVNGTLVSIYAVPEKIGQVHYALETTVKLLEFFQNYFEIQYPLKKLDLVAIPDFEAGAMENWGLLTFREETLLYDSNTSSMADRKLVTKIIAHELAHQWFGNLVTMKWWNDLWLNEGFATFMEYFSLEKIFKELSSYEDFLDARFKTMKKDSLNSSHPISSSVQSSEQIEEMFDSLSYFKGSSLLLMLKTYLSEDVFQHAVVLYLHNHSYASIQSDDLWDSFNEVTNQTLDVKRMMKTWTLQKGFPLVTVQKKGKELFIQQERFFLNMKPEIQPSDTSYLWHIPLSYVTEGRNYSKYQSVSLLDKKSGVINLTEEVLWVKVNINMNGYYIVHYADDDWEALIHQLKINPYVLSDKDRANLINNIFELAGLGKVPLKRAFDLINYLGNENHTAPITEALFQTDLIYNLLEKLGYMDLASRLVTRVFKLLQNQIQQQTWTDEGTPSMRELRSALLEFACTHNLGNCSTTAMKLFDDWMASNGTQSLPTDVMTTVFKVGAKTDKGWSFLLGKYISIGSEAEKNKILEALASSEDVRKLYWLMKSSLNGDNFRTQKLSFIIRTVGRHFPGHLLAWDFVKENWNKLVQKFPLGSYTIQNIVAGSTYLFSTKTHLSEVQAFFENQSEATFRLRCVQEALEVIQLNIQWMEKNLKSLTWWL

SEQ ID NO: 11789 - protein, 303 aa, Homo sapiens
MTMMAHQYPSWIFINEKTFITREQLNSLLKTYNIFYENQKNLHILYGETEDGKLIVEGMLDIFWGVKRPIQLKIQDEKPFSSFTSMKSSDVFSSKGMTRWGEFDDLYRISELDRTQIPMSEKRNSQEDYLSYHSNTLKPHAKDEPDSPVLYRTMSEAALVRKRMKPLMMDRKERQKNRASINGHFYNHEIENSPQDFALHIIFATGEQRRLKKTDIPLLQRLLQGPSEKNARIFLMDKDAEEISSDVAQYINFHFSLLESILQRLNEEEKREIQRIVTKFNKEKAIILKCLQNKLVIKTETTV

SEQ ID NO: 11790 - protein, 242 aa, Homo sapiens
MSGCDAREGDCCSRRCGAQDKEHPRYLIPELCKQFYHLGWVTGTGGGISLKHGDEIYIAPSGVQKERIQPEDMFVCDINEKDISGPSPSKKLKKSQCTPLFMNAYTMRGAGAVIHTHSKAAVMATLLFPGREFKITHQEMIKGIKKCTSGGYYRYDDMLVVPIIENTPEEKDLKDRMAHAMNEYPDSCAVLVRRHGVYVWGETWEKAKTMCECYDYLFDIAVSMKKVGLDPSQLPVGENGIV

SEQ ID NO: 11791 - protein, 609 aa, Homo sapiens
MKWVESIFLIFLLNFTESRTLHRNEYGIASILDSYQCTAEISLADLATIFFAQFVQEATYKEVSKMVKDALTAIEKPTGDEQSSGCLENQLPAFLEELCHEKEILEKYGHSDCCSQSEEGRHNCFLAHKKPTPASIPLFQVPEPVTSCEAYEEDRETFMNKFIYEIARRHPFLYAPTILLWAARYDKIIPSCCKAENAVECFQTKAATVTKELRESSLLNQHACAVMKNFGTRTFQAITVTKLSQKFTKVNFTEIQKLVLDVAHVHEHCCRGDVLDCLQDGEKIMSYICSQQDTLSNKITECCKLTTLERGQCIIHAENDEKPEGLSPNLNRFLGDRDFNQFSSGEKNIFLASFVHEYSRRHPQLAVSVILRVAKGYQELLEKCFQTENPLECQDKGEEELQKYIQESQALAKRSCGLFQKLGEYYLQNAFLVAYTKKAPQLTSSELMAITRKMAATAATCCQLSEDKLLACGEGAADIIIGHLCIRHEMTPVNPGVGQCCTSSYANRRPCFSSLVVDETYVPPAFSDDKFIFHKDLCQAQGVALQTMKQEFLINLVKQKPQITEEQLEAVIADFSGLLEKCCQGQEQEVCFAEEGQKLISKTRAALGV

SEQ ID NO: 11792 - protein, 464 aa, Homo sapiens
MPRPRSQLPQPNSQVEQILAEFQLQEEDLKKVMRRMQKEMDRGLRLETHEEASVKMLPTYVRSTPEGSEVGDFLSLDLGGTNFRVMLVKVGEGEEGQWSVKTKHQMYSIPEDAMTGTAEMLFDYISECISDFLDKHQMKHKKLPLGFTFSFPVRHEDIDKGILLNWTKGFKASGAEGNNVVGLLRDAIKRRGDFEMDVVAMVNDTVATMISCYYEDHQCEVGMIVGTGCNACYMEEMQNVELVEGDEGRMCVNTEWGAFGDSGELDEFLLEYDRLVDESSANPGQQLYEKLIGGKYMGELVRLVLLRLVDENLLFHGEASEQLRTRGAFETRFVSQVESDTGDRKQIYNILSTLGLRPSTTDCDIVRRACESVSTRAAHMCSAGLAGVINRMRESRSEDVMRITVGVDGSVYKLHPSFKERFHASVRRLTPSCEITFIESEEGSGRGAALVSAVACKKACMLGQ

SEQ ID NO: 11793 - protein, 1962 aa, Homo sapiens
MRELEAKATKDVERNLSRDLVQEEEQLMEEKKKKKDDKKKKEAAQKKATEQKIKVPEQIKPSVSQPQPANSNNGTSTATSTNNNAKRATANNQQPQQQQQQQQPQQQQPQQQPQPQPQQQQPQQQPQALPRYPREVPPRFRHQEHKQLLKRGQHFPVIAANLGSAVKVLNSQSESSALTNQQPQNNGEVQNSKNQSDINHSTSGSHYENSQRGPVSSTSDSSTNCKNAVVSDLSEKEAWPSAPGSDPELASECMDADSASSSESERNITIMASGNTGGEKDGLRNSTGLGSQNKFVVGSSSNNVGHGSSTGPWGFSHGAIISTCQVSVDAPESKSESSNNRMNAWGTVSSSSNGGLNPSTLNSASNHGAWPVLENNGLALKGPVGSGSSGINIQCSTIGQMPNNQSINSKVSGGSTHGTWGSLQETCESEVSGTQKVSFSGQPQNITTEMTGPNNTTNFMTSSLPNSGSVQNNELPSSNTGAWRVSTMNHPQMQAPSGMNGTSLSHLSNGESKSGGSYGTTWGAYGSNYSGDKCSGPNGQANGDTVNATLMQPGVNGPMGTNFQVNTNKGGGVWESGAANSQSTSWGSGNGANSGGSRRGWGTPAQNTGTNLPSVEWNKLPSNQHSNDSANGNGKTFTNGWKSTEEEDQGSATSQTNEQSSVWAKTGGTVESDGSTESTGRLEEKGTGESQSRDRRKIDQHTLLQSIVNRTDLDPRVLSNSGWGQTPIKQNTAWDTETSPRGERKTDNGTEAWGSSATQTFNSGACIDKTSPNGNDTSSVSGWGDPKPALRWGDSKGSNCQGGWEDDSAATGMVKSNQWGNCKEEKAAWNDSQKNKQGWGDGQKSSQGWSVSASDNWGETSRNNHWGEANKKSSSGGSDSDRSVSGWNELGKTSSFTWGNNINPNNSSGWDESSKPTPSQGWGDPPKSNQSLGWGDSSKPVSSPDWNKQQDIVGSWGIPPATGKPPGTGWLGGPIPAPAKEEEPTGWEEPSPESIRRKMEIDDGTSAWGDPSKYNYKNVNMWNKNVPNGNSRSDQQAQVHQLLTPASAISNKEASSGSGWGEPWGEPSTPATTVDNGTSAWGKPIDSGPSWGEPIAAASSTSTWGSSSVGPQALSKSGPKSMQDGWCGDDMPLPGNRPTGWEEEEDVEIGMWNSNSSQELNSSLNWPPYTKKMSSKGLSGKKRRRERGMMKGGNKQEEAWINPFVKQFSNISFSRDSPEENVQSNKMDLSGGMLQDKRMEIDKHSLNIGDYNRTVGKGPGSRPQISKESSMERNPYFDKDGIVADESQNMQFMSSQSMKLPPSNSALPNQALGSIAGLGMQNLNSVRQNGNPSMFGVGNTAAQPRGMQQPPAQPLSSSQPNLRAQVPPPLLSPQVPVSLLKYAPNNGGLNPLFGPQQVAMLNQLSQLNQLSQISQLQRLLAQQQRAQSQRSVPSGNRPQQDQQGRPLSVQQQMMQQSRQLDPNLLVKQQTPPSQQQPLHQPAMKSFLDNVMPHTTPELQKGPSPINAFSNFPIGLNSNLNVNMDMNSIKEPQSRLRKWTTVDSISVNTSLDQNSSKHGAISSGFRLEESPFVPYDFMNSSTSPASPPGSIGDGWPRAKSPNGSSSVNWPPEFRPGEPWKGYPNIDPETDPYVTPGSVINNLSINTVREVDHLRDRNSGSSSSLNTTLPSTSAWSSIRASNYNVPLSSTAQSTSARNSDSKLTWSPGSVTNTSLAHELWKVPLPPKNITAPSRPPPGLTGQKPPLSTWDNSPLRIGGGWGNSDARYTPGSSWGESSSGRITNWLVLKNLTPQIDGSTLRTLCMQHGPLITFHLNLPHGNALVRYSSKEEVVKAQKSLHMCVLGNTTILAEFASEEEISRFFAQSQSLTPSPGWQSLGSSQSRLGSLDCSHSFSSRTDLNHWNGAGLSGTNCGDLHGTSLWGTPHYSTSLWGPPSSSDPRGISSPSPINAFLSVDHLGGGGESM

SEQ ID NO: 11794 - protein, 905 aa, Homo sapiens
MEVQVSQASLGFELTSVEKSLREWSRLSREVIAWLCPSSPNFILNFPPPPSASSVSMVQLFSSPFGYQSPSGHSEEEREGNMKSAKPQVNHSQHGESQRALSPLQSTLSSAASPSQAYETYIENGLICLKHKIRNIEKKKLKLEDYKDRLKSGEHLNPDQLEAVEKYEEVLHNLEFAKELQKTFSGLSLDLLKAQKKAQRREHMLKLEAEKKKLRTILQVQYVLQNLTQEHVQKDFKGGLNGAVYLPSKELDYLIKFSKLTCPERNESLSVEDQMEQSSLYFWDLLEGSEKAVVGTTYKHLKDLLSKLLNSGYFESIPVPKNAKEKEVPLEEEMLIQSEKKTQLSKTESVKESESLMEFAQPEIQPQEFLNRRYMTEVDYSNKQGEEQPWEADYARKPNLPKRWDMLTEPDGQEKKQESFKSWEASGKHQEVSKPAVSLEQRKQDTSKLRSTLPEEQKKQEISKSKPSPSQWKQDTPKSKAGYVQEEQKKQETPKLWPVQLQKEQDPKKQTPKSWTPSMQSEQNTTKSWTTPMCEEQDSKQPETPKSWENNVESQKHSLTSQSQISPKSWGVATASLIPNDQLLPRKLNTEPKDVPKPVHQPVGSSSTLPKDPVLRKEKLQDLMTQIQGTCNFMQESVLDFDKPSSAIPTSQPPSATPGSPVASKEQNLSSQSDFLQEPLQAAIPPGKQPSSLASPNPPMAKGSEQGFQSPPASSSSVTINTAPFQAMQTVFNVNAPLPPRKEQEIKESPYSPGYNQSFTTASTQTPPQCQLPSIHVEQTVHSQETAQTNVFPRPTQPFVNSRGSVRGCTRGGRLITNSYRSPGGYKGFDTYRGLPSISNGNYSQLQFQAREYSGAPYSQRDNFQQCYKRGGTSGGPRANSRANCFIMRNSLLLIKQQGGVILLR

SEQ ID NO: 11795 - protein, 841 aa, Homo sapiens
MCDLRRPAAGGMMDLAYVCEWEKWSKSTHCPSVPLACAWSCRNLIAFTMDLRSDDQDLTRMIHILDTEHPWDLHSIPSEHHEAITCLEWDQSGSRLLSADADGQIKCWSMADHLANSWESSVGSLVEGDPIVALSWLHNGVKLALHVEKSGASSFGEKFSRVKFSPSLTLFGGKPMEGWIAVTVSGLVTVSLLKPSGQVLTSTESLCRLRGRVALADIAFTGGGNIVVATADGSSASPVQFYKVCVSVVSEKCRIDTEILPSLFMRCTTDLNRKDKFPAITHLKFLARDMSEQVLLCASSQTSSIVECWSLRKEGLPVNNIFQQISPVVGDKQPTILKWRILSATNDLDRVSAVALPKLPISLTNTDLKVASDTQFYPGLGLALAFHDGSVHIVHRLSLQTMAVFYSSAAPRPVDEPAMKRPRTAGPAVHLKAMQLSWTSLALVGIDSHGKLSVLRLSPSMGHPLEVGLALRHLLFLLEYCMVTGYDWWDILLHVQPSMVQSLVEKLHEEYTRQTAALQQVLSTRILAMKASLCKLSPCTVTRVCDYHTKLFLIAISSTLKSLLRPHFLNTPDKSPGDRLTEICTKITDVDIDKVMINLKTEEFVLDMNTLQALQQLLQWVGDFVLYLLASLPNQGSLLRPGHSFLRDGTSLGMLRELMVVIRIWGLLKPSCLPVYTATSDTQDSMSLLFRLLTKLWICCRDEGPASEPDEALVDECCLLPSQLLIPSLDWLPASDGLVSRLQPKQPLRLQFGRAPTLPGSAATLQLDGLARAPGQPKIDHLRRLHLGACPTEECKACTRCGCVTMLKSPNRTTAVKQWEQRWIKNCLCGGLWWRVPLSYP

SEQ ID NO: 11796 - protein, 1038 aa, Homo sapiens
MSAAKENPCRKFQANIFNKSKCQNCFKPRESHLLNDEDLTQAKPIYGGWLLLAPDGTDFDNPVHRSRKWQRRFFILYEHGLLRYALDEMPTTLPQGTINMNQCTDVVDGEGRTGQKFSLCILTPEKEHFIRAETKEIVSGWLEMLMVYPRTNKQNQKKKRKVEPPTPQEPGPAKVAVTSSSSSSSSSSSIPSAEKVPTTKSTLWQEEMRTKDQPDGSSLSPAQSPSQSQPPAASSLREPGLESKEEESAMSSDRMDCGRKVRVESGYFSLEKTKQDLKAEEQQLPPPLSPPSPSTPNHRRSQVIEKFEALDIEKAEHMETNAVGPSPSSDTRQGRSEKRAFPRKRDFTNEAPPAPLPDASASPLSPHRRAKSLDRRSTEPSVTPDLLNFKKGWLTKQYEDGQWKKHWFVLADQSLRYYRDSVAEEAADLDGEIDLSACYDVTEYPVQRNYGFQIHTKEGEFTLSAMTSGIRRNWIQTIMKHVHPTTAPDVTSSLPEEKNKSSCSFETCPRPTEKQEAELGEPDPEQKRSRARERRREGRSKTFDWAEFRPIQQALAQERVGGVGPADTHEPLRPEAEPGELERERARRREERRKRFGMLDATDGPGTEDAALRMEVDRSPGLPMSDLKTHNVHVEIEQRWHQVETTPLREEKQVPIAPVHLSSEDGGDRLSTHELTSLLEKELEQSQKEASDLLEQNRLLQDQLRVALGREQSAREGYVLQATCERGFAAMEETHQKKIEDLQRQHQRELEKLREEKDRLLAEETAATISAIEAMKNAHREEMERELEKSQRSQISSVNSDVEALRRQYLEELQSVQRELEVLSEQYSQKCLENAHLAQALEAERQALRQCQRENQELNAHNQELNNRLAAEITRLRTLLTGDGGGEATGSPLAQGKDAYELEVLLRVKESEIQYLKQEISSLKDELQTALRDKKYASDKYKDIYTELSIAKAKADCDISRLKEQLKAATEALGEKSPDSATVSGYDIMKSKSNPDFLKKDRSCVTRQLRNIRSKSLKEGLTVQERLKLFESRDLKKD

SEQ ID NO: 11797 - protein, 750 aa, Homo sapiens
MSQPGQKPAASPRPRRAAAARRTHEHVSEKTSESPSKPGEKKGSDEKKAASLGSSQSSRTYAGGTASATKVSASSGATSKSSSMNPTETKAVKTEPEKKSQSTKPKSLPKQASDTGSNDAHNKKAVSRSAEQQPSEKSTEPKTKPQDMISAGGESVAGITAISGKPGDKKKEKKSLTPAVPVESKPDKPSGKSGMDAALDDLIDTLGGPEETEEENTTYTGPEVSDPMSSTYIEELGKREVTIPPKYRELLAKKEGITGPPADSSKPIGPDDAIDALSSDFTCGSPTAAGKKTEKEESTEVLKAQSAGTVRSAAPPQEKKRKVEKDTMSDQALEALSASLGTRQAEPELDLRSIKEVDEAKAKEEKLEKCGEDDETIPSEYRLKPATDKDGKPLLPEPEEKPKPRSESELIDELSEDFDRSECKEKPSKPTEKTEESKAAAPAPVSEAVCRTSMCSIQSAPPEPATLKGTVPDDAVEALADSLGKKEADPEDGKPVMDKVKEKAKEEDREKLGEKEETIPPDYRLEEVKDKDGKPLLPKESKEQLPPMSEDFLLDALSEDFSGPQNASSLKFEDAKLAAAISEVVSQTPASTTQAGAPPRDTSQSDKDLDDALDKLSDSLGQRQPDPDENKPMEDKVKEKAKAEHRDKLGERDDTIPPEYRHLLDDNGQDKPVKPPTKKSEDSKKPADDQDPIDALSGDLDSCPSTTETSQNTAKDKCKKAASSSKAPKNGGKAKDSAKTTEETSKPKDD

SEQ ID NO: 11798 - protein, 354 aa, Homo sapiens
MAQAPADPGREAERPQQHAATIPETPGPQFSQQREEDIYRFLKDNGPQRALVIAQALGMRTAKDVNRDLYRMKSRHLLDMDEQSKAWTIYRPEDSGRRAKSASIIYQHNPINMICQNGPNSWISIANSEAIQIGHGNIITRQTVSREDGSAGPRHLPSMAPGDSSTWGTLVDPWGPQDIHMEQSILRRVQLGHSNEMRLHGVPSEGPAHIPPGSPPVSATAAGPEASFEARIPSPGTHPEGEAAQRIHMKSCFLEDATIGNSNKMSISPGVAGPGGVAGSGEGEPGEDAGRRPADTQSRSHFPRDIGQPITPSHSKLTPKLETMTLGNRSHKAAEGSHYVDEASHEGSWWGGGI

SEQ ID NO: 11799 - protein, 761 aa, Homo sapiens
MLASSKRMNSSSRSQILLRWKSDKAQSGPYNVEKEILTSRFLRDTETCRQNFRNFPYPDLAGPRKALSQLRELCLKWLRPEIHSKEQILELLVLEQFLTILPGEVRTWVKSQYPESSEEAVTLVEDLTQILEEEAPQNSTLSQDTPEEDPRGKHAFQTGWLNDLVTKESMTFKDVAVDITQEDWELMRPVQKELYKTVTLQNYWNMVSLGLTVYRPTVIPILEEPWMVIKEILEGPSPEWETKAQACTPVEDMSKLTKEETHTIKLEDSYDYDDRLERRGKGGFWKIHTDERGFSLKSVLSQEYDPTEECLSKYDIYRNNFEKHSNLIVQFDTQLDNKTSVYNEGRATFNHVSYGIVHRKILPGEKPYKCNVCGKKFRKYPSLLKHQSTHAKEKSYECEECGKEFRHISSLIAHQRMHTGEKPYECHQCGKAFSQRAHLTIHQRIHTGEKPYKCDDCGKDFSQRAHLTIHQRTHTGEKPYKCLECGKTFSHSSSLINHQRVHTGEKPYICNECGKTFSQSTHLLQHQKIHTGKKPYKCNECWKVFSQSTYLIRHQRIHSGEKCYKCNECGKAFAHSSTLIQHQTTHTGEKSYICNICGKAFSQSANLTQHHRTHTGEKPYKCSVCGKAFSQSVHLTQHQRIHNGEKPFKCNICGKAYRQGANLTQHQRIHTGEKPYKCNECGKAFIYSSSLNQHQRTHTGERPYKCNECDKDFSQRTCLIQHQRIHTGEKPYACRICGKTFTQSTNLIQHQRVHTGAKHRN

SEQ ID NO: 11800 - protein, 508 aa, Homo sapiens
MLPKRRRARVGSPSGDAASSTPPSTRFPGVAIYLVEPRMGRSRRAFLTGLARSKGFRVLDACSSEATHVVMEETSAEEAVSWQERRMAAAPPGCTPPALLDISWLTESLGAGQPVPVECRHRLEVAGPRKGPLSPAWMPAYACQRPTPLTHHNTGLSEALEILAEAAGFEGSEGRLLTFCRAASVLKALPSPVTTLSQLQGLPHFGEHSSRVVQELLEHGVCEEVERVRRSERAPAPPGPEHPSPAVRCRCPAAGGGGSCGAGPAWGHRHADRRLPQGLILYHQHQHSCCESPTRLAQQSHMDAFERSFCIFRLPQPPGAAVGGSTRPCPSWKAVRVDLVVAPVSQFPFALLGWTGSKLFQRELRRFSRKEKGLWLNSHGLFDPEQGSSSGKTPRSRKSCFCCRRHFSKRLQRKTSSDTWALSTFLQSRETPEPACVPHFHSGNWAAPNLATECLQADMLPPDPHLHPSPPRPGSSGGQLCLQDQLSPCWCAAGCDEVGALSASLITV

SEQ ID NO: 11801 - protein, 158 aa, Homo sapiens
MSSAIERKSLDPSEEPVDEVLQIPPSLLTCGGCQQNIGDRYFLKAIDQYWHEDCLSCDLCGCRLGEVGRRLYYKLGRKLCRRDYLRLFGQDGLCASCDKRIRAYEMTMRVKDKVYHLECFKCAACQKHFCVGDRYLLINSDIVCEQDIYEWTKINGMI

SEQ ID NO: 11802 - protein, 677 aa, Homo sapiens
MHHLLEQSADMATALLAGEKLRELILPGAQDDKAGALAALLLQLKLELPFDRVVTIGTVLVPILLVTLVFTKNFAEEPIYCYTPHNFTRDQALYARGYCWTELRDALPGVDASLWPSLFEHKFLPYALLAFAAIMYVPALGWEFLASTRLTSELNFLLQEIDNCYHRAAEGRAPKIEKQIQSKGPGITEREKREIIENAEKEKSPEQNLFEKYLERRGRSNFLAKLYLARHVLILLLSAVPISYLCTYYATQKQNEFTCALGASPDGAAGAGPAVRVSCKLPSVQLQRIIAGVDIVLLCVMNLIILVNLIHLFIFRKSNFIFDKLHKVGIKTRRQWRRSQFCDINILAMFCNENRDHIKSLNRLDFITNESDLMYDNVVRQLLAALAQSNHDATPTVRDSGVQTVDPSANPAEPDGAAEPPVVKRPRKKMKWIPTSNPLPQPFKEPLAIMRVENSKAEKPKPARRKTATDTLIAPLLDRSAHHYKGGGGDPGPGPAPAPAPPPAPDKKHARHFSLDVHPYILGTKKAKAEAVPAALPASRSQEGGFLSQAEDCGLGLAPAPIKDAPLPEKEIPYPTEPARAGLPSGGPFHVRSPPAAPAVAPLTPASLGKAEPLTILSRNATHPLLHINTLYEAREEEDGGPRLPQDVGDLIAIPAPQQILIATFDEPRTVVSTVEF

SEQ ID NO: 11803 - protein, 1070 aa, Homo sapiens
SVESIPSLRGSITQGTPIKFDNNSGQSAIKHNVKSLITGPSKLSRGMPPLEIVPENIKVVERGKYEDVKAGETVRSRHTSVVSSGPSVLRSTLHEAPKAQLSPGIYDDTSARRTPVSYQNTMSRGSPMMNRTSDVTISSNKSTNHERKSTLTPTQRESIPAKSPVPGVDPVVSHSPFDPHHRGSTAGEVYRSHLPTHLDPAMPFHRALDPAAAAYLFQRQLSPTPGYPSQYQLYAMENTRQTILNDYITSQQMQVNLRPDVARGLSPREQPLGLPYPATRGIIDLTNMPPTILVPHPGGTSTPPMDRITYIPGTQITFPPRPYNSASMSPGHPTHLAAAASAEREREREREKERERERIAAASSDLYLRPGSEQPGRPGSHGYVRSPSPSVRTQETMLQQRPSVFQGTNGTSVITPLDPTAQLRIMPLPAGGPSISQGLPASRYNTAADALAALVDAAASAPQMDVSKTKESKHEAARLEENLRSRSAAVSEQQQLEQKTLEVEKRSVQCLYTSSAFPSGKPQPHSSVVYSEAGKDKGPPPKSRYEEELRTRGKTTITAANFIDVIITRQIASDKDARERGSQSSDSSSSLSSHRYETPSDAIEVISPASSPAPPQEKLQTYQPEVVKANQAENDPTRQYEGPLHHYRPQQESPSPQQQLPPSSQAEGMGQVPRTHRLITLADHICQIITQDFARNQVSSQTPQQPPTSTFQNSPSALVSTPVRTKTSNRYSPESQAQSVHHQRPGSRVSPENLVDKSRGSRPGKSPERSHVSSEPYEPISPPQVPVVHEKQDSLLLLSQRGAEPAEQRNDARSPGSISYLPSFFTKLENTSPMVKSKKQEIFRKLNSSGGGDSDMAAAQPGTEIFNLPAVTTSGSVSSRGHSFADPASNLGLEDIIRKALMGSFDDKVEDHGVVMSQPMGVVPGTANTSVVTSGETRREEGDPSPHSGGVCKPKLISKSNSRKSKSPIPGQGYLGTERPSSVSSVHSEGDYHRQTPGWAWEDRPSSTGSTQFPYNPLTMRMLSSTPPTPIACAPSAVNQAAPHQQNRIWEREPAPLLSAQYETLSDSDD

SEQ ID NO: 11804 - protein, 2337 aa, Homo sapiens
MSSSGYPPNQGAFSTEQSRYPPHSVQYTFPNTRHQQEFAVPDYRSSHLEVSQASQLLQQQQQQQLRRRPSLLSEFHPGSDRPQERRTSYEPFHPGPSPVDHDSLESKRPRLEQVSDSHFQRVSAAVLPLVHPLPEGLRASADAKKDPAFGGKHEAPSSPISGQPCGDDQNASPSKLSKEELIQSMDRVDREIAKVEQQILKLKKKQQQLEEEAAKPPEPEKPVSPPPVEQKHRSIVQIIYDENRKKAEEAHKIFEGLGPKVELPLYNQPSDTKVYHENIKTNQVMRKKLILFFKRRNHARKQREQKICQRYDQLMEAWEKKVDRIENNPRRKAKESKTREYYEKQFPEIRKQREQQERFQRVGQRGAGLSATIARSEHEISEIIDGLSEQENNEKQMRQLSVIPPMMFDAEQRRVKFINMNGLMEDPMKVYKDRQFMNVWTDHEKEIFKDKFIQHPKNFGLIASYLERKSVPDCVLYYYLTKKNENYKALVRRNYGKRRGRNQQIARPSQEEKVEEKEEDKAEKTEKKEEEKKDEEEKDEKEDSKENTKEKDKIDGTAEETEEREQATPRGRKTANSQGRRKGRITRSMTNEAAAASAAAAAATEEPPPPLPPPPEPISTEPVETSRWTEEEMEVAKKGLVEHGRNWAAIAKMVGTKSEAQCKNFYFNYKRRHNLDNLLQQHKQKTSRKPREERDVSQCESVASTVSAQEDEDIEASNEEENPEDSEGAENSSDTESAPSPSPVEAVKPSEDSPENATSRGNTEPAVELEPTTETAPSTSPSLAVPSTKPAEDESVETQVNDSISAETAEQMDVDQQEHSAEEGSVCDPPPATKADSVDVEVRVPENHASKVEGDNTKERDLDRASEKVEPRDEDLVVAQQINAQRPEPQSDNDSSATCSADEDVDGEPERQRMFPMDSKPSLLNPTGSILVSSPLKPNPLDLPQLQHRAAVIPPMVSCTPCNIPIGTPVSGYALYQRHIKAMHESALLEEQRQRQEQIDLECRSSTSPCGTSKSPNREWEVLQPAPHQVITNLPEGVRLPTTRPTRPPPPLIPSSKTTVASEKPSFIMGGSISQGTPGTYLTSHNQASYTQETPKPSVGSISLGLPRQQESAKSATLPYIKQEEFSPRSQNSQPEGLLVRAQHEGVVRGTAGAIQEGSITRGTPTSKISVESIPSLRGSITQGTPALPQTGIPTEALVKGSISRMPIEDSSPEKGREEAASKGHVIYEGKSGHILSYDNIKNAREGTRSPRTAHEISLKRSYESVEGNIKQGMSMRESPVSAPLEGLICRALPRGSPHSDLKERTVLSGSIMQGTPRATTESFEDGLKYPKQIKRESPPIRAFEGAITKGKPYDGITTIKEMGRSIHEIPRQDILTQESRKTPEVVQSTRPIIEGSISQGTPIKFDNNSGQSAIKHNVKSLITGPSKLSRGMPPLEIVPENIKVVERGKYEDVKAGETVRSRHTSVVSSGPSVLRSTLHEAPKAQLSPGIYDDTSARRTPVSYQNTMSRGSPMMNRTSDVTISSNKSTNHERKSTLTPTQRESIPAKSPVPGVDPVVSHSPFDPHHRGSTAGEVYRSHLPTHLDPAMPFHRALDPAAAAYLFQRQLSPTPGYPSQYQLYAMENTRQTILNDYITSQQMQVNLRPDVARGLSPREQPLGLPYPATRGIIDLTNMPPTILVPHPGGTSTPPMDRITYIPGTQITFPPRPYNSASMSPGHPTHLAAAASAEREREREREKERERERIAAASSDLYLRPGSEQPGRPGSHGYVRSPSPSVRTQETMLQQRPSVFQGTNGTSVITPLDPTAQLRIMPLPAGGPSISQGLPASRYNTAADALAALVDAAASAPQMDVSKTKEISSHRYETPSDAIEVISPASSPAPPQEKLQTYQPEVVKANQAENDPTRQYEGPLHHYRPQQESPSPQQQLPPSSQAEGMGQVPRTHRLITLADHICQIITQDFARNQVSSQTPQQPPTSTFQNSPSALVSTPVRTKTSNRYSPESQAQSVHHQRPGSRVSPENLVDKSRGSRPGKSPERSHVSSEPYEPISPPQVPVVHEKQDSLLLLSQRGAEPAEQRNDARSPGSISYLPSFFTKLENTSPMVKSKKQEIFRKLNSSGGGDSDMAAAQPGTEIFNLPAVTTSGSVSSRGHSFADPASNLGLEDIIRKALMGSFDDKVEDHGVVMSQPMGVVPGTANTSVVTSGETRREEGDPSPHSGGVCKPKLISKSNSRKSKSPIPGQGYLGTERPSSVSSVHSEGDYHRQTPGWAWEDRPSSTGSTQFPYNPLTMRMLSSTPPTPIACAPSAVNQAAPHQQNRIWEREPAPLLSAQYETLSDSDD

SEQ ID NO: 11805 - protein, 1440 aa, Homo sapiens
MSGLGDSSSDPANPDSHKRKGSPCDTLASSTEKRRREQENKYLEELAELLSANISDIDSLSVKPDKCKILKKTVDQIQLMKRMEQEKSTTDDDVQKSDISSSSQGVIEKESLGPLLLEALDGFFFVVNCEGRIVFVSENVTSYLGYNQEELMNTSVYSILHVGDHAEFVKNLLPKSLVNGVPWPQEATRRNSHTFNCRMLIHPPDEPGTENQEACQRYEVMQCFTVSQPKSIQEDGEDFQSCLICIARRLPRPPAITGVESFMTKQDTTGKIISIDTSSLRAAGRTGWEDLVRKCIYAFFQPQGREPSYARQLFQEVMTRGTASSPSYRFILNDGTMLSAHTKCKLCYPQSPDMQPFIMGIHIIDREHSGLSPQDDTNSGMSIPRVNPSVNPSISPAHGVARSSTLPPSNSNMVSTRINRQQSSDLHSSSHSNSSNSQGSFGCSPGSQIVANVALNQGQASSQSSNPSLNLNNSPMEGTGISLAQFMSPRRQVTSGLATRPRMPNNSFPPNISTLSSPVGMTSSACNNNNRSYSNIPVTSLQGMNEGPNNSVGFSASSPVLRQMSSQNSPSRLNIQPAKAESKDNKEIASILNEMIQSDNSSSDGKPLDSGLLHNNDRLSDGDSKYSQTSHKLVQLLTTTAEQQLRHADIDTSCKDVLSCTGTSNSASANSSGGSCPSSHSSLTERHKILHRLLQEGSPSDITTLSVEPDKKDSASTSVSVTGQVQGNSSIKLELDASKKKESKDHQLLRYLLDKDEKDLRSTPNLSLDDVKVKVEKKEQMDPCNTNPTPMTKPTPEEIKLEAQSQFTADLDQFDQLLPTLEKAAQLPGLCETDRMDGAVTSVTIKSEILPASLQSATARPTSRLNRLPELELEAIDNQFGQPGTGDQIPWTNNTVTAINQSKSEDQCISSQLDELLCPPTTVEGRNDEKALLEQLVSFLSGKDETELAELDRALGIDKLVQGGGLDVLSERFPPQQATPPLIMEERPNLYSQPYSSPSPTANLPSPFQGMVRQKPSLGTMPVQVTPPRGAFSPGMGMQPRQTLNRPPAAPNQLRLQLQQRLQGQQQLIHQNRQAILNQFAATAPVGINMRSGMQQQITPQPPLNAQMLAQRQRELYSQQHRQRQLIQQQRAMLMRQQSFGNNLPPSSGLPVQMGNPRLPQGAPQQFPYPPNYGTNPGTPPASTSPFSQLAANPEASLANRNSMVSRGMTGNIGGQFGTGINPQMQQNVFQYPGAGMVPQGEANFAPSLSPGSSMVPMPIPPPQSSLLQQTPPASGYQSPDMKAWQQGAIGNNNVFSQAVQNQPTPAQPGVYNNMSITVSMAGGNTNVQNMNPMMAQMQMSSLQMPGMNTVCPEQINDPALRHTGLYCNQLSSTDLLKTEADGTQVQQVQVFADVQCTVNLVGGDPYLNQPGPLGTQKPTSGPQTPQAQQKSLLQQLLTE

SEQ ID NO: 11806 - protein, 2343 aa, Homo sapiens
MSSSGYPPNQGAFSTEQSRYPPHSVQYTFPNTRHQQDPAFGGKHEAPSSPISGQPCGDDQNASPSKLSKEELIQSMDRVDREIAKVEQQILKLKKKQQQLEEEAAKPPEPEKPVSPPPVEQKHRSIVQIIYDENRKKAEEAHKIFEGLGPKVELPLYNQPSDTKVYHENIKTNQVMRKKLILFFKRRNHARKQREQKICQRYDQLMEAWEKKVDRIENNPRRKAKESKTREYYEKQFPEIRKQREQQERFQRVGQRGAGLSATIARSEHEISEIIDGLSEQENNEKQMRQLSVIPPMMFDAEQRRVKFINMNGLMEDPMKVYKDRQFMNVWTDHEKEIFKDKFIQHPKNFGLIASYLERKSVPDCVLYYYLTKKNENYKALVRRNYGKRRGRNQQIARPSQEEKVEEKEEDKAEKTEKKEEEKKDEEEKDEKEDSKENTKEKDKIDGTAEETEEREQATPRGRKTANSQGRRKGRITRSMTNEAAAASAAAAAATEEPPPPLPPPPEPISTEPVETSRWTEEEMEVAKKGLVEHGRNWAAIAKMVGTKSEAQCKNFYFNYKRRHNLDNLLQQHKQKTSRKPREERDVSQCESVASTVSAQEDEDIEASNEEENPEDSEGAENSSDTESAPSPSPVEAVKPSEDSPENATSRGNTEPAVELEPTTETAPSTSPSLAVPSTKPAEDESVETQVNDSISAETAEQMDVDQQEHSAEEGSVCDPPPATKADSVDVEVRVPENHASKVEGDNTKERDLDRASEKVEPRDEDLVVAQQINAQRPEPQSDNDSSATCSADEDVDGEPERQRMFPMDSKPSLLNPTGSILVSSPLKPNPLDLPQLQHRAAVIPPMVSCTPCNIPIGTPVSGYALYQRHIKAMHESALLEEQRQRQEQIDLECRSSTSPCGTSKSPNREWEVLQPAPHQVITNLPEGVRLPTTRPTRPPPPLIPSSKTTVASEKPSFIMGGSISQGTPGTYLTSHNQASYTQETPKPSVGSISLGLPRQQESAKSATLPYIKQEEFSPRSQNSQPEGLLVRAQHEGVVRGTAGAIQEGSITRGTPTSKISVESIPSLRGSITQGTPALPQTGIPTEALVKGSISRMPIEDSSPEKGREEAASKGHVIYEGKSGHILSYDNIKNAREGTRSPRTAHEISLKRSYESVEGNIKQGMSMRESPVSAPLEGLICRALPRGSPHSDLKERTVLSGSIMQGTPRATTESFEDGLKYPKQIKRESPPIRAFEGAITKGKPYDGITTIKEMGRSIHEIPRQDILTQESRKTPEVVQSTRPIIEGSISQGTPIKFDNNSGQSAIKHNVKSLITGPSKLSRGMPPLEIVPENIKVVERGKYEDVKAGETVRSRHTSVVSSGPSVLRSTLHEAPKAQLSPGIYDDTSARRTPVSYQNTMSRGSPMMNRTSDVSSNKSTNHERKSTLTPTQRESIPAKSPVPGVDPVVSHSPFDPHHRGSTAGEVYRSHLPTHLDPAMPFHRALDPAAAYLFQRQLSPTPGYPSQYQLYAMENTRQTILNDYITSQQMQVNLRPDVARGLSPREQPLGLPYPATRGIIDLTNMPPTILVPHPGGTSTPPMDRITYIPGTQITFPPRPYNSASMSPGHPTHLAAAASAEREREREREKERERERIAAASSDLYLRPGSEQPGRPGSHGYVRSPSPSVRTQETMLQQRPSVFQGTNGTSVITPLDPTAQLRIMPLPAGGPSISQGLPASRYNTAADALAALVDAAASAPQMDVSKTKESKHEAARLEENLRSRSAAVSEQQQLEQKTLEVEKRSVQCLYTSSAFPSGKPQPHSSVVYSEAGKDKGPPPKSRYEEELRTRGKTTITAANFIDVIITRQIASDKDARERGSQSSDSSSSLSSHRYETPSDAIEVISPASSPAPPQEKLQTYQPEVVKANQAENDPTRQYEGPLHHYRPQQESPSPQQQLPPSSQAEGMGQVPRTHRLITLADHICQIITQDFARNQVSSQTPQQPPTSTFQNSPSALVSTPVRTKTSNRYSPESQAQSVHHQRPGSRVSPENLVDKSRGSRPGKSPERSHVSSEPYEPISPPQVPVVHEKQDSLLLLSQRGAEPAEQRNDARSPGSISYLPSFFTKLENTSPMVKSKKQEIFRKLNSSGGGDSDMAAAQPGTEIFNLPAVTTSGSVSSRGHSFADPASNLGLEDIIRKALMGSFDDKVEDHGVVMSQPMGVVPGTANTSVVTSGETRREEGDPSPHSGVCKPKLISKSNSRKSKSPIPGQGYLGTERPSSVSSVHSEGDYHRQTPGWAWEDRPSSTGSTQFPYNPLTMRMLSSTPPTPIACAPSAVNQAAPHQQNRIWEREPAPLLSAQYETLSDSDD

SEQ ID NO: 11807 - protein, 1165 aa, Homo sapiens
MLSLAAKLVAFFWRTADTPREEAGQLEPELAEGDTKLKTVRGVVTRYCSDYGMIDDMIYFSSDAVTSRVLLNVGQEVIAVVEENKVSNGLKAIRVEAVSDKWEDDSRNHGSPSDCGPRVLIGCVTSLVEGAGCISQTTYFSLESVCEGFEPCKGDWVEAEYRIRPGTWSSEATSVKPLRYKRVDKVCISSLCGRNGVLEESIFFTLDSLKLPDGYTPRRGDVVNAVVVESSQSCYVWRALCMTLVKRRDAAPVHEATHFYGTILLKNKGDIEVTQVTHFGTLKEGRSKTMVIWIENKGDIPQNLVSCKLAGWDKSKQFRFQMLDKDQMCPVVSFVSVPEKENSSDENINSLNSHTKNKTSQMSESSLVNNRGISPGDCTCKGENGEKDNILSRKQMTEPEPGGLVPPGGKTFIVVICDGKNPGRCKELLLLCFSDFLIGRYLEVNVISGEESLIAAREPFSWKKLKSSQALTSAKTTVVVTAQKRNSRRQLPSFLPQYPIPDRLRKCVEQKIDILTFQPLLAELLNMSNYKEKFSTLLWLEEIYAEMELKEYNMSGIILRRNGDLLVLEVPGLAEGRPSLYAGDKLILKTQEYNGHAIEYISYVTEIHEEDVTLKINPEFEQAYNFEPMDVEFTYNRTTSRRCHFALEHVIHLGVKVLFPEEIILQSPQVTGNWNHAQDTKSSGQSTSKKNRKTMTDQAEHGTEERRVGDKDLPVLAPFTAEMSDWVDEIQTPKARKMEFFNPVLNENQKLAVKRILSGDCRPLPYILFGPPGTGKTVTIIEAVLQVHFALPDSRILVCAPSNSAADLVCLRLHESKVLQPATMVRVNATCRFEEIVIDAVKPYCRDGEDIWKASRFRIIITTCSSSGLFYQIGVRVGHFTHVFVDEAGQASEPECLIPLGLMSDISGQIVLAGDPMQLGPVIKSRLAMAYGLNVSFLERLMSRPAYQRDENAFGACGAHNPLLVTKLVKNYRSHEALLMLPSRLFYHRELEVCADPTVVTSLLGWEKLPKKGFPLIFHGVRGSEAREGKSPSWFNPAEAVQVLRYCCLLAHSISSQVSASDIGVITPYRKQVEKIRILLRNVDLMDIKVGSVEEFQGQEYLVIIISTDPCFGALLEYSITNGVYMGCDLPPALQSLQNCGEGVADPSYPVVPESTGPEKHQEPS

SEQ ID NO: 11808 - protein, 431 aa, Homo sapiens
MHVRSLRAAAPHSFVALWAPLFLLRSALADFSLDNEVHSSFIHRRLRSQERREMQREILSILGLPHRPRPHLQGKHNSAPMFMLDLYNAMAVEEGGGPGGQGFSYPYKAVFSTQGPPLASLQDSHFLTDADMVMSFVNLVEHDKEFFHPRYHHREFRFDLSKIPEGEAVTAAEFRIYKDYIRERFDNETFRISVYQVLQEHLGRESDLFLLDSRTLWASEEGWLVFDITATSNHWVVNPRHNLGLQLSVETLDGQSINPKLAGLIGRHGPQNKQPFMVAFFKATEVHFRSIRSTGSKQRSQNRSKTPKNQEALRMANVAENSSSDQRQACKKHELYVSFRDLGWQDWIIAPEGYAAYYCEGECAFPLNSYMNATNHAIVQTLVHFINPETVPKPCCAPTQLNAISVLYFDDSSNVILKKYRNMVVRACGCH

SEQ ID NO: 11809 - protein, 365 aa, Homo sapiens
MHVRSLRAAAPHSFVALWAPLFLLRSALADFSLDNEVHSSFIHRRLRSQERREMQREILSILGLPHRPRPHLQGKHNSAPMFMLDLYNAMAVEEGGGPGGQGFSYPYKAVFSTQGPPLASLQDSHFLTDADMVMSFVNLVEHDKEFFHPRYHHREFRFDLSKIPEGEAVTAAEFRIYKDYIRERFDNETFRISVYQVLQEHLGRESDLFLLDSRTLWASEEGWLVFDITATSNHWVVNPRHNLGLQLSVETLDENSSSDQRQACKKHELYVSFRDLGWQDWIIAPEGYAAYYCEGECAFPLNSYMNATNHAIVQTLVHFINPETVPKPCCAPTQLNAISVLYFDDSSNVILKKYRNMVVRACGCH

SEQ ID NO: 11810 - protein, 661 aa, Homo sapiens
MEGARARGAQLRLGERVRPVGRRSAPGRSRFRQPWRPGASDSAPPAGTMAQSRVLLLLLLLPPQLHLGPVLAVRAPGFGRSGGHSLSPEENEFAEEEPVLVLSPEEPGPGPAAVSCPRDCACSQEGVVDCGGIDLREFPGDLPEHTNHLSLQNNQLEKIYPEELSRLHRLETLNLQNNRLTSRGLPEKAFEHLTNLNYLYLANNKLTLAPRFLPNALISVDFAANYLTKIYGLTFGQKPNLRSVYLHNNKLADAGLPDNMFNGSSNVEVLILSSNFLRHVPKHLPPALYKLHLKNNKLEKIPPGAFSELSSLRELYLQNNYLTDEGLDNETFWKLSSLEYLDLSSNNLSRVPAGLPRSLVLLHLEKNAIRSVDANVLTPIRSLEYLLLHSNQLREQGIHPLAFQGLKRLHTVHLYNNALERVPSGLPRRVRTLMILHNQITGIGREDFATTYFLEELNLSYNRITSPQVHRDAFRKLRLLRSLDLSGNRLHTLPPGLPRNVHVLKVKRNELAALARGALVGMAQLRELYLTSNRLRSRALGPRAWVDLAHLQLLDIAGNQLTEIPEGLPESLEYLYLQNNKISAVPANAFDSTPNLKGIFLRFNKLAVGSVVDSAFRRLKHLQVLDIEGNLEFGDISKDRGRLGKEKEEEEEEEEEEEETR

SEQ ID NO: 11811 - protein, 177 aa, Homo sapiens
MQRRLVQQWSVAVFLLSYAVPSCGRSVEGLSRRLKRAVSEHQLLHDKGKSIQDLRRRFFLHHLIAEIHTAEIRATSEVSPNSKPSPNTKNHPVRFGSDDEGRYLTQETNKVETYKEQPLKTPGKKKKGKPGKRKEQEKKKRRTRSAWLDSGVTGSGLEGDHLSDTSTTSLELDSRRH

SEQ ID NO: 11812 - protein, 1606 aa, Homo sapiens
MLLHLCSVKNLYQNRFLGLAAMASPSRNSQSRRRCKEPLRYSYNPDQFHNMDLRGGPHDGVTIPRSTSDTDLVTSDSRSTLMVSSSYYSIGHSQDLVIHWDIKEEVDAGDWIGMYLIDEVLSENFLDYKNRGVNGSHRGQIIWKIDASSYFVEPETKICFKYYHGVSGALRATTPSVTVKNSAAPIFKSIGADETVQGQGSRRLISFSLSDFQAMGLKKGMFFNPDPYLKISIQPGKHSIFPALPHHGQERRSKIIGNTVNPIWQAEQFSFVSLPTDVLEIEVKDKFAKSRPIIKRFLGKLSMPVQRLLERHAIGDRVVSYTLGRRLPTDHVSGQLQFRFEITSSIHPDDEEISLSTEPESAQIQDSPMNNLMESGSGEPRSEAPESSESWKPEQLGEGSVPDGPGNQSIELSRPAEEAAVITEAGDQGMVSVGPEGAGELLAQVQKDIQPAPSAEELAEQLDLGEEASALLLEDGEAPASTKEEPLEEEATTQSRAGREEEEKEQEEEGDVSTLEQGEGRLQLRASVKRKSRPCSLPVSELETVIASACGDPETPRTHYIRIHTLLHSMPSAQGGSAAEEEDGAEEESTLKDSSEKDGLSEVDTVAADPSALEEDREEPEGATPGTAHPGHSGGHFPSLANGAAQDGDTHPSTGSESDSSPRQGGDHSCEGCDASCCSPSCYSSSCYSTSCYSSSCYSASCYSPSCYNGNRFASHTRFSSVDSAKISESTVFSSQDDEEEENSAFESVPDSMQSPELDPESTNGAGPWQDELAAPSGHVERSPEGLESPVAGPSNRREGECPILHNSQPVSQLPSLRPEHHHYPTIDEPLPPNWEARIDSHGRVFYVDHVNRTTTWQRPTAAATPDGMRRSGSIQQMEQLNRRYQNIQRTIATERSEEDSGSQSCEQAPAGGGGGGGSDSEAESSQSSLDLRREGSLSPVNSQKITLLLQSPAVKFITNPEFFTVLHANYSAYRVFTSSTCLKHMILKVRRDARNFERYQHNRDLVNFINMFADTRLELPRGWEIKTDQQGKSFFVDHNSRATTFIDPRIPLQNGRLPNHLTHRQHLQRLRSYSAGEASEVSRNRGASLLARPGHSLVAAIRSQHQHESLPLAYNDKIVAFLRQPNIFEMLQERQPSLARNHTLREKIHYIRTEGNHGLEKLSCDADLVILLSLFEEEIMSYVPLQAAFHPGYSFSPRCSPCSSPQNSPGLQRASARAPSPYRRDFEAKLRNFYRKLEAKGFGQGPGKIKLIIRRDHLLEGTFNQVMAYSRKELQRNKLYVTFVGEEGLDYSGPSREFFFLLSQELFNPYYGLFEYSANDTYTVQISPMSAFVENHLEWFRFSGRILGLALIHQYLLDAFFTRPFYKALLRLPCDLSDLEYLDEEFHQSLQWMKDNNITDILDLTFTVNEEVFGQVTERELKSGGANTQVTEKNKKEYIERMVKWRVERGVVQQTEALVRGFYEVVDSRLVSVFDARELELVIAGTAEIDLNDWRNNTEYRGGYHDGHLVIRWFWAAVERFNNEQRLRLLQFVTGTSSVPYEGFAALRGSNGLRRFCIEKWGKITSLPRAHTCFNRLDLPPYPSYSMLYEKLLTAVEETSTFGLE

SEQ ID NO: 11813 - protein, 3585 aa, Homo sapiens
MVLESVVADLLNRFLGDYVENLNKSQLKLGIWGGNVALDNLQIKENALSELDVPFKVKAGQIDKLTLKIPWKNLYGEAVVATLEGLYLLVVPGASIKYDAVKEEKSLQDVKQKELSRIEEALQKAAEKDKPKEAKKDTFVEKLATQVIKNVQVKITDIHIKYEDDVTDPKRPLSFGVTLGELSLLTANEHWTPCILNEADKIIYKLIRLDSLSAYWNVNCSMSYQRSREQILDQLKNEILTSGNIPPNYQYIFQPISASAKLYMNPYAESELKTPKLDCNIEIQNIAIELTKPQYLSMIDLLESVDYMVRNAPYRKYKPYLPLHTNGRRWWKYAIDSVLEVHIRRYTQMWSWSNIKKHRQLLKSYKIAYKNKLTQSKVSEEIQKEIQDLEKTLDVFNIILARQQAQVEVIRSGQKLRKKSADTGEKRGGWFSGLWGKKESKKKDEESLIPETIDDLMTPEEKDKLFTAIGYSESTHNLTLPKQYVAHIMTLKLVSTSVTIRENKNIPEILKIQIIGLGTQVSQRPGAQALKVEAKLEHWYITGLRQQDIVPSLVASIGDTTSSLLKIKFETNPEDSPADQTLIVQSQPVEVIYDAKTVNAVVEFFQSNKGLDLEQITSATLMKLEEIKERTATGLTHIIETRKVLDLRINLKPSYLVVPQTGFHHEKSDLLILDFGTFQLNSKDQGLQKTTNSSLEEIMDKAYDKFDVEIKNVQLLFARAEETWKKCRFQHPSTMHILQPMDIHVELAKAMVEKDIRMARFKVSGGLPLMHVRISDQKMKDVLYLMNSIPLPQKSSAQSPERQVSSIPIISGGTKGLLGTSLLLDTVESESDDEYFDAEDGEPQTCKSMKGSELKKAAEVPNEELINLLLKFEIKEVILEFTKQQKEEDTILVFNVTQLGTEATMRTFDLTVVSYLKKISLDYHEIEGSKRKPLHLISSSDKPGLDLLKVEYIKADKNGPSFQTAFGKTEQTVKVAFSSLNLLLQTQALVASINYLTTIIPSDDQSISVAKEVQISTEKQQKNSTLPKAIVSSRDSDIIDFRLFAKLNAFCVIVCNEKNNIAEIKIQGLDSSLSLQSRKQSLFARLENIIVTDVDPKTVHKKAVSIMGNEVFRFNLDLYPDATEGDLYTDMSKVDGVLSLNVGCIQIVYLHKFLMSLLNFLNNFQTAKESLSAATAQAAERAATSVKDLAQRSFRVSINIDLKAPVIVIPQSSISTNAVVVDLGLIRVHNQFSLVSDEDYLNPPVIDRMDVQLTKLTLYRTVIQPGIYHPDIQLLHPINLEFLVNRNLAASWYHKVPVVEIKGHLDSMNVSLNQEDLNLLFRILTENLCEGTEDLDKVKPRVQETGEIKEPLEISISQDVHDSKNTLTTGVEEIRSVDIINMLLNFEIKEVVVTLMKKSEKKGRPLHELNVLQLGMEAKVKTYDMTAKAYLKKISMQCFDFTDSKGEPLHIINSSNVTDEPLLKMLLTKADSDGPEFKTIHDSTKQRLKVSFASLDLVLHLEALLSFMDFLSSAAPFSEPSSSEKESELKPLVGESRSIAVKAVSSNISQKDVFDLKITAELNAFNVFVCDQKCNIADIKIHGMDASISVKPKQTDVFARLKDIIVMNVDLQSIHKKAVSILGDEVFRFQLTLYPDATEGEAYADMSKVDGKLSFKVGCIQIVYVHKFFMSLLNFLNNFQTAKEALSTATVQAAERAASSMKDLAQKSFRLLMDINLKAPVIIIPQSSVSPNAVIADLGLIRVENKFSLVPMEHYSLPPVIDKMNIELTQLKLSRTILQASLPQNDIEILKPVNMLLSIQRNLAAAWYVQIPGMEIKGKLKPMQVALSEDDLTVLMKILLENLGEASSQPSPTQSVQETVRVRKVDVSSVPDHLKEQEDWTDSKLSMNQIVSLQFDFHFESLSIILYNNDINQESGVAFHNDSFQLGELRLHLMASSGKMFKDGSMNVSVKLKTCTLDDLREGIERATSRMIDRKNDQDNNSSMIDISYKQDKNGSQIDAVLDKLYVCASVEFLMTVADFFIKAVPQSPENVAKETQILPRQTATGKVKIEKDDSVRPNMTLKAMITDPEVVFVASLTKADAPALTASFQCNLSLSTSKLEQMMEASVRDLKVLACPFLREKRGKNITTVLQPCSLFMEKCTWASGKQNINIMVKEFIIKISPIILNTVLTIMAALSPKTKEDGSKDTSKEMENLWGIKSINDYNTWFLGVDTATEITESFKGIEHSLIEENCGVVVESIQVTLECGLGHRTVPLLLAESKFSGNIKNWTSLMAAVADVTLQVHYYNEIHAVWEPLIERVEGKRQWNLRLDVKKNPVQDKSLLPGDDFIPEPQMAIHISSGNTMNITISKSCLNVFNNLAKGFSEGTASTFDYSLKDRAPFTVKNAVGVPIKVKPNCNLRVMGFPEKSDIFDVDAGQNLELEYASMVPSSQGNLSILSRQESSFFTLTIVPHGYTEVANIPVARPGRRLYNVRNPNASHSDSVLVQIDATEGNKVITLRSPLQIKNHFSIAFIIYKFVKNVKLLERIGIARPEEEFHVPLDSYRCQLFIQPAGILEHQYKESTTYISWKEELHRSREVRCMLQCPSVEVSFLPLIVNTVALPDELSYICTHGEDWDVAYIIHLYPSLTLRNLLPYSLRYLLEGTAETHELAEGSTADVLHSRISGEIMELVLVKYQGKNWNGHFRIRDTLPEFFPVCFSSDSTEVTTVDLSVHVRRIGSRMVLSVFSPYWLINKTTRVLQYRSEDIHVKHPADFRDIILFSFKKKNIFTKNKVQLKISTSAWSSSFSLDTVGSYGCVKCPANNMEYLVGVSIKMSSFNLSRIVTLTPFCTIANKSSLELEVGEIASDGSMPTNKWNYIASSECLPFWPESLSGKLCVRVVGCEGSSKPFFYNRQDNGTLLSLEDLNGGILVDVNTAEHSTVITFSDYHEGSAPALIMNHTPWDILTYKQSGSPEEMVLLPRQARLFAWADPTGTRKLTWTYAANVGEHDLLKDGCGQFPYDANIQIHWVSFLDGRQRVLLFTDDVALVSKALQAEEMEQADYEITLSLHSLGLSLVNNESKQEVSYIGITSSGVVWEVKPKQKWKPFSQKQIILLEQSYQKHQISRDHGWIKLDNNFEVNFDKDPMEMRLPIRSPIKRDFLSGIQIEFKQSSHQRSLRARLYWLQVDNQLPGAMFPVVFHPVAPPKSIALDSEPKPFIDVSVITRFNEYSKVLQFKYFMVLIQEMALKIDQGFLGAIIALFTPTTDPEAERRRTKLIQQDIDALNAELMETSMTDMSILSFFEHFHISPVKLHLSLSLGSGGEESDKEKQEMFAVHSVNLLLKSIGATLTDVDDLIFKLAYYEIRYQFYKRDQLIWSVVRHYSEQFLKQMYVLVLGLDVLGNPFGLIRGLSEGVEALFYEPFQGAVQGPEEFAEGLVIGVRSLFGHTVGGAAGVVSRITGSVGKGLAAITMDKEYQQKRREELSRQPRDFGDSLARGGKGFLRGVVGGVTGIITKPVEGAKKEGAAGFFKGIGKGLVGAVARPTGGIVDMASSTFQGIQRAAESTEEVSSLRPPRLIHEDGIIRPYDRQESEGSDLLEQELEIQE

SEQ ID NO: 11814 - protein, 599 aa, Homo sapiens
MAAEEEAAAGGEVAGGEATAPGKVLREENQCIAPVVSSRVSPGTRPTAMGSFSSHMTEFPRKRKGSDSDPSQEAHSQTEKRRRDKMNNLIEELSAMIPQCNPMARKLDKLTVLRMAVQHLRSLKGLTNSYVGSNYRPSFLQDNELRHLILKTAEGFLFVVGCERGKILFVSKSVSKILNYDQASLTGQSLFDFLHPKDVAKVKEQLSSFDISPREKLIDAKTGLQVHSNLHAGRTRVYSGSRRSFFCRIKSCKISVKEEHGCLPNSKKKEHRKFYTIHCTGYLRSWPPNIVGMEEERNSKKDNSNFTCLVAIGRLQPYIVPQNSGEINVKPTEFITRFAVNGKFVYVDQRATAILGYLPQELLGTSCYEYFHQDDHNNLTDKHKAVLQSKEKILTDSYKFRAKDGSFVTLKSQWFSFTNPWTKELEYIVSVNTLVLGHSEPGEASFLPCSSQSSEESSRQSCMSVPGMSTGTVLGAGSIGTDIANEILDLQRLQSSSYLDDSSPTGLMKDTHTVNCRSMSNKELFPPSPSEMGELEATRQNQSTVAVHSHEPLLSDGAQLDFDALCDNDDTAMAAFMNYLEAEGGLGDPGDFSDIQWTL

SEQ ID NO: 11815 - protein, 299 aa, Homo sapiens
MGDPERPEAAGLDQDEVDLSKDLPHWNKLKADEKYFISHILAFFAASDGIVNENLVERFSQEVQVPEARCFYGFQILIENVHSEMYSLLIDTYIRDPKKREFLFNAIETMPYVKKKADWALRWIADRKSTFGERVVAFAAVEGVFFSGSFAAIFWLKKRGLMPGLTFSNELISRDEGLHCDFACLMFQYLVNKPSEERVREIIVDAVKIEQEFLTEALPVGLIGMNCILMKQYIEFVADRLLVELGFSKVFQAENPFDFMENISLEGKTNFFEKRVSEYQRFAVMAETTDNVFTLDADF

SEQ ID NO: 11816 - protein, 1580 aa, Homo sapiens
MEAQSHSSTTTEKKKVENSIVKCSTRTDVSEKAVASSTTSNEDESPGQTYHRERRNAITMQPQNVQGLSKVSEEPSTSSDERASLIKKEIHGSLPHVAEPSVPYRGTVFAMDPRNGYMEPHYHPPHLFPAFHPPVPIDARHHEGRYHYDPSPIPPLHMTSALSSSPTYPDLPFIRISPHRNPTAASESPFSPPHPYINPYMDYIRSLHSSPSLSMISATRGLSPTDAPHAGVSPAEYYHQMALLTGQRSPYADIIPSAATAGTGAIHMEYLHAMDSTRFSSPRLSARPSRKRTLSISPLSDHSFDLQTMIRTSPNSLVTILNNSRSSSSASGSYGHLSASAISPALSFTYSSAPVSLHMHQQILSRQQSLGSAFGHSPPLIHPAPTFPTQRPIPGIPTVLNPVQVSSGPSESSQNKPTSESAVSSTGDPMHNKRSKIKPDEDLPSPGARGQQEQPEGTTLVKEEGDKDESKQEPEVIYETNCHWEGCAREFDTQEQLVHHINNDHIHGEKKEFVCRWLDCSREQKPFKAQYMLVVHMRRHTGEKPHKCTFEGCTKAYSRLENLKTHLRSHTGEKPYVCEHEGCNKAFSNASDRAKHQNRTHSNEKPYVCKIPGCTKRYTDPSSLRKHVKTVHGPEAHVTKKQRGDIHPRPPPPRDSGSHSQSRSPGRPTQGALGEQQDLSNTTSKREECLQVKTVKAEKPMTSQPSPGGQSSCSSQQSPISNYSNSGLELPLTDGGSIGDLSAIDETPIMDSTISTATTALALQARRNPAGTKWMEHVKLERLKQVNGMFPRLNPILPPKAPAVSPLIGNGTQSNNTCSLGGPMTLLPGRSDLSGVDVTMLNMLNRRDSSASTISSAYLSSRRSSGISPCFSSRRSSEASQAEGRPQNVSVADSYDPISTDASRRSSEASQSDGLPSLLSLTPAQQYRLKAKYAAATGGPPPTPLPNMERMSLKTRLALLGDALEPGVALPPVHAPRRCSDGGAHGYGRRHLQPHDAPGHGVRRASDPVRTGSEGLALPRVPRFSSLSSCNPPAMATSAEKRSLVLQNYTRPEGGQSRNFHSSPCPPSITENVTLESLTMDADANLNDEDFLPDDVVQYLNSQNQAGYEQHFPSALPDDSKVPHGPGDFDAPGLPDSHAGQQFHALEQPCPEGSKTDLPIQWNEVSSGSADLSSSKLKCGPRPAVPQTRAFGFCNGMVVHPQNPLRSGPAGGYQTLGENSNPYGGPEHLMLHNSPGSGTSGNAFHEQPCKAPQYGNCLNRQPVAPGALDGACGAGIQASKLKSTPMQGSGGQLNFGLPVAPNESAGSMVNGMQNQDPVGQGYLAHQLLGDSMQHPGAGRPGQQMLGQISATSHINIYQGPESCLPGAHGMGSQPSSLAVVRGYQPCASFGGSRRQAMPRDSLALQSGQLSDTSQTCRVNGIKMEMKGQPHPLCSNLQNYSGQFYDQTVGFSQQDTKAGSFSISDASCLLQGTSAKNSELLSPGANQVTSTVDSLDSHDLEGVQIDFDAIIDDGDHSSLMSGALSPSIIQNLSHSSSRLTTPRASLPFPALSMSTTNMAIGDMSSLLTSLAEESKFLAVMQ

SEQ ID NO: 11817 - protein, 609 aa, Homo sapiens
MPSDPPFNTRRAYTSEDEAWKSYLENPLTAATKAMMSINGDEDSAAALGLLYDYYKVPRDKRLLSVSKASDSQEDQEKRNCLGTSEAQSNLSGGENRVQVLKTVPVNLSLNQDHLENSKREQYSISFPESSAIIPVSGITVVKAEDFTPVFMAPPVHYPRGDGEEQRVVIFEQTQYDVPSLATHSAYLKDDQRSTPDSTYSESFKDAATEKFRSASVGAEEYMYDQTSSGTFQYTLEATKSLRQKQGEGPMTYLNKGQFYAITLSETGDNKCFRHPISKVRSVVMVVFSEDKNRDEQLKYWKYWHSRQHTAKQRVLDIADYKESFNTIGNIEEIAYNAVSFTWDVNEEAKIFITVNCLSTDFSSQKGVKGLPLMIQIDTYSYNNRSNKPIHRAYCQIKVFCDKGAERKIRDEERKQNRKKGKGQASQTQCNSSSDGKLAAIPLQKKSDITYFKTMPDLHSQPVLFIPDVHFANLQRTGQVYYNTDDEREGGSVLVKRMFRPMEEEFGPVPSKQMKEEGTKRVLLYVRKETDDVFDALMLKSPTVKGLMEAISEKYGLPVEKIAKLYKKSKKGILVNMDDNIIEHYSNEDTFILNMESMVEGFKVTLMEI

SEQ ID NO: 11818 - protein, 225 aa, Homo sapiens
MERVGCTLTTTYAHPRPTPTNFLPAISTMASSYRDRFPHSNLTHSLSLPWRPSTYYKVASNSPSVAPYCTRSQRVSENTMLPFVSNRTTFFTRYTPDDWYRSNLTNYQESNTSRHNSEKLRVDTSRLIQDKYQQTRKTQADTTQNLGERVNDIGFWKSEIIHELDEMIGETNALTDVKKRLERALMETEAPLQVARECLFHREKRMGIDLVHDEVEAQLLTDIVT

SEQ ID NO: 11819 - protein, 535 aa, Homo sapiens
MAAVATCGSVAASTGSAVATASKSNVTSFQRRGPRASVTNDSGPRLVSIAGTRPSVRNGQLLVSTGLPALDQLLGGGLAVGTVLLIEEDKYNIYSPLLFKYFLAEGIVNGHTLLVASAKEDPANILQELPAPLLDDKCKKEFDEDVYNHKTPESNIKMKIAWRYQLLPKMEIGPVSSSRFGHYYDASKRMPQELIEASNWHGFFLPEKISSTLKVEPCSLTPGYTKLLQFIQNIIYEEGFDGSNPQKKQRNILRIGIQNLGSPLWGDDICCAENGGNSHSLTKFLYVLRGLLRTSLSACIITMPTHLIQNKAIIARVTTLSDVVVGLESFIGSERETNPLYKDYHGLIHIRQIPRLNNLICDESDVKDLAFKLKRKLFTIEAGVQWHDLGSRQPRLLGSSNSPASASLVAGITGAHHHTQLIFVFLVEMGFHHVGQAGLELLTSGDSSASASQSAGITGMSYRARPRALYFKENKSKVGARQLLETREEHLSSRLLILTQAERLCMGRRFFTAFHIFNELPCKGDCICLQTCQTQ

SEQ ID NO: 11820 - protein, 198 aa, Homo sapiens
MECVGTRINDISLGEPDLLATGVEREQSERFNVYLMPSPNLDVHGECALQITYEYICLWDVQNPRVKLISWPLSALRRYGRDTTWFTFEAGRMCETGEGLFIFQTRDGEAIYQKVHSAALAIAEQHERLLQSVKNSMLQMKMSERAASLSTMVPLPRSAYWQHITRQHSTGQLYRLQDVSSPLKLHRTETFPAYRSEH

SEQ ID NO: 11821 - protein, 584 aa, Homo sapiens
MGNQMSVPQRVEDQENEPEAETYQDNASALNGVPVVVSTHTVQHLEEVDLGISVKTDNVATSSPETTEISAVADANGKNLGKEAKPEAPAAKSRFFLMLSRPVPGRTGDQAADSSLGSVKLDVSSNKAPANKDPSESWTLPVAAGPGQDTDKTPGHAPAQDKVLSAARDPTLLPPETGGAGGEAPSKPKDSSFFDKFFKLDKGQEKVPGDSQQEAKRAEHQDKVDEVPGLSGQSDDVPAGKDIVDGKEKEGQELGTADCSVPGDPEGLETAKDDSQAAAIAENNNSIMSFFKTLVSPNKAETKKDPEDTGAEKSPTTSADLKSDKANFTSQETQGAGKNSKGCNPSGHTQSVTTPEPAKEGTKEKSGPTSLPLGKLFWKKSVKEDSVPTGAEENVVCESPVEIIKSKEVESALQTVDLNEGDAAPEPTEAKLKREESKPRTSLMAFLRQMSVKGDGGITHSEEINGKDSSCQTSDSTEKTITPPEPEPTGAPQKGKEGSSKDKKSAAEMNKQKSNKQEAKEPAQCTEQATVDTNSLQNGDKLQKRPEKRQQSLGGFFKGLGPKRMLDAQVQTDPVSIGPVGKSK

SEQ ID NO: 11822 - protein, 807 aa, Homo sapiens
MWALCSLLRSAAGRTMSQGRTISQAPARRERPRKDPLRHLRTREKRGPSGCSGGPNTVYLQVVAAGSRDSGVQRLMQEHKLKVARLDNIFLTRMHWSNVGGLSGMILTLKETGLPKCVLSGPPQLEKYLEAIKIFSGPLKGIELAVRPHSAPEYEDETMTVYQIPIHSEQRRGKHQPWQSPERPLSRLSPERSSDSESNENEPHLPHGVSQRRGVRDSSLVVAFICKLHLKRGNFLVLKAKEMGLPVGTAAIAPIIAAVKDGKSITHEGREILAEELCTPPDPGAAFVVVECPDESFIQPICENATFQRYQGKADAPVALVVHMAPASVLVDSRYQQWMERFGPDTQHLVLNENCASVHNLRSHKIQTQLNLIHPDIFPLLTSFRCKKEGPTLSVPMVQGECLLKYQLRPRREWQRDAIITCNPEEFIVEALQLPNFQQSVQEYRRSAQDGPAPAEKRSQYPEIIFLGTGSAIPMKIRNVSATLVNISPDTSLLLDCGEGTFGQLCRHYGDQVDRVLGTLAAVFVSHLHADHHTGLPSILLQRERALASLGKPLHPLLVVAPNQLKAWLQQYHNQCQEVLHHISMIPAKCLQEGAEISSPAVERLISSLLRTCDLEEFQTCLVRHCKHAFGCALVHTSGWKVVYSGDTMPCEALVRMGKDATLLIHEATLEDGLEEEAVEKTHSTTSQAISVGMRMNAEFIMLNHFSQRYAKVPLFSPNFSEKVGVAFDHMKVCFGDFPTMPKLIPPLKALFAGDIEEMEERREKRELRQVRAALLSRELAGGLEDGEPQQKRAHTEEPQAKKVRAQ

SEQ ID NO: 11823 - protein, 416 aa, Homo sapiens
MSISLSSLILLPIWINMAQIQQGGPDEKEKTTALKDLLSRIDLDELMKKDEPPLDFPDTLEGFEYAFNEKGQLRHIKTGEPFVFNYREDLHRWNQKRYEALGEIITKYVYELLEKDCNLKKVSIPVDATESEPKSFIFMSEDALTNPQKLMVLIHGSGVVRAGQWARRLIINEDLDSGTQIPFIKRAVAEGYGVIVLNPNENYIEVEKPKIHVQSSSDSSDEPAEKRERKDKVSKETKKRRDFYEKYRNPQREKEMMQLYIRENGSPEEHAIYVWDHFIAQAAAENVFFVAHSYGGLAFVELMIQREADVKNKVTAVALTDSVHNVWHQEAGKTIREWMRENCCNWVSSSEPLDTSVESMLPDCPRVSAGTDRHELTSWKSFPSIFKFFTEASEAKTSSLKPAVTRRSHRIKHEEL

SEQ ID NO: 11824 - protein, 829 aa, Homo sapiens
MAEAEEQETGSLEESTDESEEEESEEEPKLKYERLSNGVTEILQKDAASCMTVHDKFLALGTHYGKVYLLDVQGNITQKFDVVQVFGLYSGEEFHETFDCPIKIIAVHPHFVRSSCKQFVTGGKKLLLFERSWMNRWKSAVLHEGEGNIRSVKWRGHLIAWANNMGVKIFDIISKQRITNVPRDDISLRPDMYPCSLCWKDNVTLIIGWGTSVKVCSVKERHASEMRDLPSRYVEIVSQFETEFYISGLAPLCDQLVVLSYVKEISEKTEREYCARPRLDIIQPLSETCEEISSDALTVRGFQENECRDYHLEYSEGESLFYIVSPRDVVVAKERDQDDHIDWLLEKKKYEEALMAAEISQKNIKRHKILDIGLAYINHLVERGDYDIAARKCQKILGKNAALWEYEVYKFKEIGQLKAISPYLPRGDPVLKPLIYEMILHEFLESDYEGFATLIREWPGDLYNNSVIVQAVRDHLKKDSQNKTLLKTLAELYTYDKNYGNALEIYLTLRHKDVFQLIHKHNLFSSIKDKIVLLMDFDSEKAVDMLLDNEDKISIKKVVEELEDRPELQHVYLHKLFKRDHHKGQRYHEKQISLYAEYDRPNLLPFLRDSTHCPLEKALEICQQRNFVEETVYLLSRMGNSRSALKMIMEELHDVDKAIEFAKEQDDGELWEDLILYSIDKPPFITGLLNNIGTHVDPILLIHRIKEGMEIPNLRDSLVKILQDYNLQILLREGCKKILVADSLSLLKKMHRTQMKGVLVDEENICESCLSPILPSDAAKPFSVVVFHCRHMFHKECLPMPSMNSAAQFCNICSAKNRGPGSAILEMKK

SEQ ID NO: 11825 - protein, 262 aa, Homo sapiens
MQSREEEWFHQVRRVMTILFLTMVISYFGCMKAAPMKEANIRGQGGLAYPGVRTHGTLESVNGPKAGSRGLTSLADTFEHVIEELLDEDQKVRPNEENNKDADLYTSRVMLSSQVPLEPPLLFLLEEYKNYLDAANMSMRVRRHSDPARRGELSVCDSISEWVTAADKKTAVDMSGGTVTVLEKVPVSKGQLKQYFYETKCNPMGYTKEGCRGIDKRHWNSQCRTTQSYVRALTMDSKKRIGWRFIRIDTSCVCTLTIKRGR

SEQ ID NO: 11826 - protein, 722 aa, Homo sapiens
MGPKAKKSGSKKKKVTKAERLKLLQEEEERRLKEEEEARLKYEKEEMERLEIQRIEKEKWHRLEAKDLERRNEELEELYLLERCFPEAEKLKQETKLLSQWKHYIQCDGSPDPSVAQEMNTFISLWKEKTNETFEEVIEKSKVVLNLIEKLKFILLETPPCDLQDKNIIQYQESILQLQELLHLKFGVATEILLKQASTLADLDSGNMEKVIKDENVTLYVWANLKKNPRHRSVRFSETQIGFEIPRILATSDIAVRLLHTHYDHVSALHPVSTPSKEYTSAVTELVKDDVKNVEKAISKEVEEESKQQERGSHLIQEEEIKVEEEQGDIEVKMSSAEEESEAIKCEREMKVLSETVSAAQLLLVENSSEKPDFFEDNVVDLCQFTTLGGVYHLDILELPPQCKPVKGWMIVEILKEGLQKYTYPPETTEEFETENAFPPIEVTLEVHENVIFFEDPVVVRWDAEGKHWRTDGISNVSYKPKERLVTFSLDTFGPVTLIQDAHINMPYQSWELRPLDVNKVLLTVTTVFTEIQIQIKENLCMLSSIKLKDKKHISILEGTWMTPIPFIIALKEAGLNIFPTRHSHFYVIINNKVPLVEVKAYRQMALLSSAFAFGWSKWNLLCNSTKVVFKVREHLTEACTENPNWALLMFSGDRAQRLKIKEESEAFSEALKEETEFHSTLYHMVKDFASEEAMEKVRSSNCQFVNSVCHMLLSTRLLSYS

SEQ ID NO: 11827 - protein, 676 aa, Homo sapiens
MERLEIQRIEKEKWHRLEAKDLERRNEELEELYLLERCFPEAEKLKQETKLLSQWKHYIQCDGSPDPSVAQEMNTFISLWKEKTNETFEEVIEKSKVVLNLIEKLKFILLETPPCDLQDKNIIQYQESILQLQELLHLKFGVATEILLKQASTLADLDSGNMEKVIKDENVTLYVWANLKKNPRHRSVRFSETQIGFEIPRILATSDIAVRLLHTHYDHVSALHPVSTPSKEYTSAVTELVKDDVKNVEKAISKEVEEESKQQERGSHLIQEEEIKVEEEQGDIEVKMSSAEEESEAIKCEREMKVLSETVSAAQLLLVENSSEKPDFFEDNVVDLCQFTTLGGVYHLDILELPPQCKPVKGWMIVEILKEGLQKYTYPPETTEEFETENAFPPIEVTLEVHENVIFFEDPVVVRWDAEGKHWRTDGISNVSYKPKERLVTFSLDTFGPVTLIQDAHINMPYQSWELRPLDVNKVLLTVTTVFTEIQIQIKENLCMLSSIKLKDKKHISILEGTWMTPIPFIIALKEAGLNIFPTRHSHFYVIINNKVPLVEVKAYRQMALLSSAFAFGWSKWNLLCNSTKVVFKVREHLTEACTENPNWALLMFSGDRAQRLKIKEESEAFSEALKEETEFHSTLYHMVKDFASEEAMEKVRSSNCQFVNSVCHMLLSTRLLSYS

SEQ ID NO: 11828 - protein, 906 aa, Homo sapiens
MERGLPLLCAVLALVLAPAGAFRNDKCGDTIKIESPGYLTSPGYPHSYHPSEKCEWLIQAPDPYQRIMINFNPHFDLEDRDCKYDYVEVFDGENENGHFRGKFCGKIAPPPVVSSGPFLFIKFVSDYETHGAGFSIRYEIFKRGPECSQNYTTPSGVIKSPGFPEKYPNSLECTYIVFVPKMSEIILEFESFDLEPDSNPPGGMFCRYDRLEIWDGFPDVGPHIGRYCGQKTPGRIRSSSGILSMVFYTDSAIAKEGFSANYSVLQSSVSEDFKCMEALGMESGEIHSDQITASSQYSTNWSAERSRLNYPENGWTPGEDSYREWIQVDLGLLRFVTAVGTQGAISKETKKKYYVKTYKIDVSSNGEDWITIKEGNKPVLFQGNTNPTDVVVAVFPKPLITRFVRIKPATWETGISMRFEVYGCKITDYPCSGMLGMVSGLISDSQITSSNQGDRNWMPENIRLVTSRSGWALPPAPHSYINEWLQIDLGEEKIVRGIIIQGGKHRENKVFMRKFKIGYSNNGSDWKMIMDDSKRKAKSFEGNNNYDTPELRTFPALSTRFIRIYPERATHGGLGLRMELLGCEVEAPTAGPTTPNGNLVDECDDDQANCHSGTGDDFQLTGGTTVLATEKPTVIDSTIQSEFPTYGFNCEFGWGSHKTFCHWEHDNHVQLKWSVLTSKTGPIQDHTGDGNFIYSQADENQKGKVARLVSPVVYSQNSAHCMTFWYHMSGSHVGTLRVKLRYQKPEEYDQLVWMAIGHQGDHWKEGRVLLHKSLKLYQVIFEGEIGKGNLGGIAVDDISINNHISQEDCARSTPGYEGEGEGDKNISRKPGNVLKTLDPILITIIAMSALGVLLGAVCGVVLYCACWHNGMSERNLSALENYNFELVDGVKLKKDKLNTQSTYSEA

SEQ ID NO: 11829 - protein, 616 aa, Homo sapiens
MSRRKQAKPQHINSEEDQGEQQPQQQTPEFADAAPAAPAAGELGAPVNHPGNDEVASEDEATVKRLRREETHVCEKCCAEFFSISEFLEHKKNCTKNPPVLIMNDSEGPVPSEDFSGAVLSHQPTSPGSKDCHRENGGSSEDMKEKPDAESVVYLKTETALPPTPQDISYLAKGKVANTNVTLQALRGTKVAVNQRSADALPAPVPGANSIPWVLEQILCLQQQQLQQIQLTEQIRIQVNMWASHALHSSGAGADTLKTLGSHMSQQVSAAVALLSQKAGSQGLSLDALKQAKLPHANIPSATSSLSPGLAPFTLKPDGTRVLPNVMSRLPSALLPQAPGSVLFQSPFSTVALDTSKKGKGKPPNISAVDVKPKDEAALYKHKCRSSLPSTFIRAPPTYVKVEVPGTFVGPSTLSPGMTPLLAAQPRRQAKQHGCTRCGKNFSSASALQIHERTHTGEKPFVCNICGRAFTTKGNLKVHYMTHGANNNSARRGRKLAIENTMALLGTDGKRVSEIFPKEILAPSVNVDPVVWNQYTSMLNGGLAVKTNEISVIQSGGVPTLPVSLGATSVVNNATVSKMDGSQSGISADVEKPSATDGVPKHQFPHFLEENKIAVS

SEQ ID NO: 11830 - protein, 423 aa, Homo sapiens
MFIMNEKWDTNSSENWHPIWNVNDTKHHLYSDINITYVNYYLHQPQVAAIFIISYFLIFFLCMMGNTVVCFIVMRNKHMHTVTNLFILNLAISDLLVGIFCMPITLLDNIIAGWPFGNTMCKISGLVQGISVAASVFTLVAIAVDRFQCVVYPFKPKLTIKTAFVIIMIIWVLAITIMSPSAVMLHVQEEKYYRVRLNSQNKTSPVYWCREDWPNQEMRKIYTTVLFANIYLAPLSLIVIMYGRIGISLFRAAVPHTGRKNQEQWHVVSRKKQKIIKMLLIVALLFILSWLPLWTLMMLSDYADLSPNELQIINIYIYPFAHWLAFGNSSVNPIIYGFFNENFRRGFQEAFQLQLCQKRAKPMEAYALKAKSHVLINTSNQLVQESTFQNPHGETLLYRKSAEKPQQELVMEELKETTNSSEI

SEQ ID NO: 11831 - protein, 618 aa, Homo sapiens
MEVKNFAVWDYVVFAALFFISSGIGVFFAIKERKKATSREFLVGGRQMSFGPVGLSLTASFMSAVTVLGTPSEVYRFGASFLVFFIAYLFVILLTSELFLPVFYRSGITSTYEYLQLRFNKPVRYAATVIYIVQTILYTGVVVYAPALALNQVTGFDLWGSVFATGIVCTFYCTLGGLKAVVWTDAFQMVVMIVGFLTVLIQGSTHAGGFHNVLEQSTNGSRLHIFDFDVDPLRRHTFWTITVGGTFTWLGIYGVNQSTIQRCISCKTEKHAKLALYFNLLGLWIILVCAVFSGLIMYSHFKDCDPWTSGIISAPDQLMPYFVMEIFATMPGLPGLFVACAFSGTLSTVASSINALATVTFEDFVKSCFPHLSDKLSTWISKGLCLLFGVMCTSMAVAASVMGGVVQASLSIHGMCGGPMLGLFSLGIVFPFVNWKGALGGLLTGITLSFWVAIGAFIYPAPASKTWPLPLSTDQCIKSNVTATGPPVLSSRPGIADTWYSISYLYYSAVGCLGCIVAGVIISLITGRQRGEDIQPLLIRPVCNLFCFWSKKYKTLCWCGVQHDSGTEQENLENGSARKQGAESVLQNGLRRESLVHVPGYDPKDKSYNNMAFETTHF

SEQ ID NO: 11832 - protein, 925 aa, Homo sapiens
MNAPERQPQPDGGDAPGHEPGGSPQDELDFSILFDYEYLNPNEEEPNAHKVASPPSGPAYPDDVLDYGLKPYSPLASLSGEPPGRFGEPDRVGPQKFLSAAKPAGASGLSPRIEITPSHELIQAVGPLRMRDAGLLVEQPPLAGVAASPRFTLPVPGFEGYREPLCLSPASSGSSASFISDTFSPYTSPCVSPNNGGPDDLCPQFQNIPAHYSPRTSPIMSPRTSLAEDSCLGRHSPVPRPASRSSSPGAKRRHSCAEALVALPPGASPQRSRSPSPQPSSHVAPQDHGSPAGYPPVAGSAVIMDALNSLATDSPCGIPPKMWKTSPDPSPVSAAPSKAGLPRHIYPAVEFLGPCEQGERRNSAPESILLVPPTWPKPLVPAIPICSIPVTASLPPLEWPLSSQSGSYELRIEVQPKPHHRAHYETEGSRGAVKAPTGGHPVVQLHGYMENKPLGLQIFIGTADERILKPHAFYQVHRITGKTVTTTSYEKIVGNTKVLEIPLEPKNNMRATIDCAGILKLRNADIELRKGETDIGRKNTRVRLVFRVHIPESSGRIVSLQTASNPIECSQRSAHELPMVERQDTDSCLVYGGQQMILTGQNFTSESKVVFTEKTTDGQQIWEMEATVDKDKSQPNMLFVEIPEYRNKHIRTPVKVNFYVINGKRKRSQPQHFTYHPVPAIKTEPTDEYDPTLICSPTHGGLGSQPYYPQHPMVAESPSCLVATMAPCQQFRTGLSSPDARYQQQNPAAVLYQRSKSLSPSLLGYQQPALMAAPLSLADAHRSVLVHAGSQGQSSALLHPSPTNQQASPVIHYSPTNQQLRCGSHQEFQHIMYCENFAPGTTRPGPPPVSQGQRLSPGSYPTVIQQQNATSQRAAKNGPPVSDQKEVLPAGVTIKQEQNLDQTYLDDVNEIIRKEFSGPPARNQT

SEQ ID NO: 11833 - protein, 339 aa, Homo sapiens
MSTVHEILCKLSLEGDHSTPPSAYGSVKAYTNFDAERDALNIETAIKTKGVDEVTIVNILTNRSNAQRQDIAFAYQRRTKKELASALKSALSGHLETVILGLLKTPAQYDASELKASMKGLGTDEDSLIEIICSRTNQELQEINRVYKEMYKTDLEKDIISDTSGDFRKLMVALAKGRRAEDGSVIDYELIDQDARDLYDAGVKRKGTDVPKWISIMTERSVPHLQKVFDRYKSYSPYDMLESIRKEVKGDLENAFLNLVQCIQNKPLYFADRLYDSMKGKGTRDKVLIRIMVSRSEVDMLKIRSEFKRKYGKSLYYYIQQDTKGDYQKALLYLCGGDD

SEQ ID NO: 11834 - protein, 1042 aa, Homo sapiens
MPGKLKVKIVAGRHLPVMDRASDLTDAFVEVKFGNTTFKTDVYLKSLNPQWNSEWFKFEVDDEDLQDEPLQITVLDHDTYSANDAIGKVYIDIDPLLYSEAATVISGWFPIYDTIHGIRGEINVVVKVDLFNDLNRFRQSSCGVKFFCTTSIPKCYRAVIIHGFVEELVVNEDPEYQWIDRIRTPRASNEARQRLISLMSGELQRKIGLKVLEMRGNAVVGYLQCFDLEGESGLVVRAIGTACTLDKLSSPAAFLPACNSPSKEMKESPLVHPPSHGCRSTHNSPIHTATGSRLTQNFSVSVPTLIYTGMGSGSAGKEGGPFKALLRQQTQSALEQREFPFFTLTAFPPGFLVHVGGVVSARSVKLLDRIHNPDEPETRDAWWAEIRQEIKSHAKALGCHAVVGYSESTSICEEVCILSASGTAAVLNPRFLQDGTVEGCLEQRLEENLPTRCGFCHIPYDELNMPFPAHLTYCYNCRKQKVPDVLFTTIDLPTDATVIGKGCLIQARLCRLKKKAQAEANATAISNLLPFMEYEVHTQLMNKLKLKGMNALFGLRIQITVGENMLMGLASATGVYLAALPTPGGIQIAGKTPNDGSYEQHISHMQKKINDTIAKNKELYEINPPEISEEIIGSPIPEPRQRSRLLRSQSESSDEVTELDLSHGKKDAFVLEIDDTDAMEDVHSLLTDVPPPSGFYSCNTEIMPGINNWTSEIQMFTSVRVIRLSSLNLTNQALNKNFNDLCENLLKSLYFKLRSMIPCCLCHVNFTVSLPEDELIQVTVTAVAITFDKNQALQTTKTPVEKSLQRASTDNEELLQFPLELCSDSLPSHPFPPAKEHLESASSNSGIPAAQRATSVDYSSFADRCSSWIELIKLKAQTIRRGSIKTTMTVEKASPVGDGNFRNRSAPPCANSTVGVVKMTPLSFIPGAKITKYLGIINMFFIRETTSLREEGGVSGFLHAFIAEVFAMVRAHVAALGGNAVVSYIMKQCVFMENPNKNQAQCLINVSGDAVVFVRESDLEVVSSQQPTTNCQSSCTEGEVTT

SEQ ID NO: 11835 - protein, 388 aa, Homo sapiens
MILWLHSLETARDHVLPIDYYFPPQKTCLICGDEASGCHYGALTCGSCKVFFKRAAEGKQKYLCASRNDCTIDKFRRKNCPSCRLRKCYEAGMTLGARKLKKLGNLKLQEEGEASSTTSPTEETTQKLTVSHIEGYECQPIFLNVLEAIEPGVVCAGHDNNQPDSFAALLSSLNELGERQLVHVVKWAKALPGFRNLHVDDQMAVIQYSWMGLMVFAMGWRSFTNVNSRMLYFAPDLVFNEYRMHKSRMYSQCVRMRHLSQEFGWLQITPQEFLCMKALLLFSIIPVDGLKNQKFFDELRMNYIKELDRIIACKRKNPTSCSRRFYQLTKLLDSVQPIARELHQFTFDLLIKSHMVSVDFPEMMAEIISVQVPKILSGKVKPIYFHTQ

SEQ ID NO: 11836 - protein, 734 aa, Homo sapiens
MEVQLGLGRVYPRPPSKTYRGAFQNLFQSVREVIQNPGPRHPEAASAAPPGASLLLLQQQQQQQQQQQQQQQQQQQQQQQETSPRQQQQQQGEDGSPQAHRRGPTGYLVLDEEQQPSQPQSALECHPERGCVPEPGAAVAASKGLPQQLPAPPDEDDSAAPSTLSLLGPTFPGLSSCSADLKDILSEASTMQLLQQQQQEAVSEGSSSGRAREASGAPTSSKDNYLGGTSTISDNAKELCKAVSVSMGLGVEALEHLSPGEQLRGDCMYAPLLGVPPAVRPTPCAPLAECKGSLLDDSAGKSTEDTAEYSPFKGGYTKGLEGESLGCSGSAAAGSSGTLELPSTLSLYKSGALDEAAAYQSRDYYNFPLALAGPPPPPPPPHPHARIKLENPLDYGSAWAAAAAQCRYGDLASLHGAGAAGPGSGSPSAAASSSWHTLFTAEEGQLYGPCGGGGGGGGGGGGGGGGGGGGGGGEAGAVAPYGYTRPPQGLAGQESDFTAPDVWYPGGMVSRVPYPSPTCVKSEMGPWMDSYSGPYGDMRLETARDHVLPIDYYFPPQKTCLICGDEASGCHYGALTCGSCKVFFKRAAEGKQKYLCASRNDCTIDKFRRKNCPSCRLRKCYEAGMTLGARKLKKLGNLKLQEEGEASSTTSPTEETTQKLTVSHIEGYECQPIFLNVLEAIEPGVVCAGHDNNQPDSFAALLSSLNELGERQLVHVVKWAKALPDCERAASVHF

SEQ ID NO: 11837 - protein, 1087 aa, Homo sapiens
MDPFTEKLLERTRARRENLQRKMAERPTAAPRSMTHAKRARQPLSEASNQQPLSGGEEKSCTKPSPSKKRCSDNTEVEVSNLENKQPVESTSAKSCSPSPVSPQVQPQAADTISDSVAVPASLLGMRRGLNSRLEATAASSVKTRMQKLAEQRRRWDNDDMTDDIPESSLFSPMPSEEKAASPPRPLLSNASATPVGRRGRLANLAATICSWEDDVNHSFAKQNSVQEQPGTACLSKFSSASGASARINSSSVKQEATFCSQRDGDASLNKALSSSADDASLVNASISSSVKATSPVKSTTSITDAKSCEGQNPELLPKTPISPLKTGVSKPIVKSTLSQTVPSKGELSREICLQSQSKDKSTTPGGTGIKPFLERFGERCQEHSKESPARSTPHRTPIITPNTKAIQERLFKQDTSSSTTHLAQQLKQERQKELACLRGRFDKGNIWSAEKGGNSKSKQLETKQETHCQSTPLKKHQGVSKTQSLPVTEKVTENQIPAKNSSTEPKEVIREIEMSVDDDDINSSKVINDLFSDVLEEGELDMEKSQEEMDQALAESSEEQEDALNISSMSLLAPLAQTVGVVSPESLVSTPRLELKDTSRSDESPKPGKFQRTRVPRAESGDSLGSEDRDLLYSIDAYRSQRFKETERPSIKQVIVRKEDVTSKLDEKNNAFPCQVNIKQKMQELNNEINMQQTVIYQASQALNCCVDEEHGKGSLEEAEAERLLLIATGKRTLLIDELNKLKNEGPQRKNKASPQSEFMPSKGSVTLSEIRLPLKADFVCSTVQKPDAANYYYLIILKAGAENMVATPLASTSNSLNGDALTFTTTFTLQDVSNDFEINIEVYSLVQKKDPSGLDKKKKTSKSKAITPKRLLTSITTKSNIHSSVMASPGGLSAVRTSNFALVGSYTLSLSSVGNTKFVLDKVPFLSSLEGHIYLKIKCQVNSSVEERGFLTIFEDVSGFGAWHRRWCVLSGNCISYWTYPDDEKRKNPIGRINLANCTSRQIEPANREFCARRNTFELITVRPQREDDRETLVSQCRDTLCVTKNWLSADTKEERDLWMQKLNQVLVDIRLWQPDACYKPIGKP

SEQ ID NO: 11838 - protein, 1142 aa, Homo sapiens
MLVLRCRLGTSFPKLDNLVPKGKMKILLVFLGLLGNSVAMPMHMPRMPGFSSKSEEMMRYNQFNFMNGPHMAHLGPFFGNGLPQQFPQYQMPMWPQPPPNTWHPRKSSAPKRHNKTDQTQETQKPNQTQSKKPPQKRPLKQPSHNQPQPEEEAQPPQAFPPFGNGLFPYQQPPWQIPQRLPPPGYGRPPISNEEGGNPYFGYFGYHGFGGRPPYYSEEMFEQDFEKPKEEDPPKAESPGTEPTANSTVTETNSTQPNPKGSQGGNDTSPTGNSTPGLNTGNNPPAQNGIGPLPAVNASGQGGPGSQIPWRPSQPNIRENHPYPNIRNFPSGRQWYFTGTVMGHRQNRPFYRNQQVQRGPRWNFFAWERKQVARPGNPVYHKAYPPTSRGNYPNYAGNPANLRRKPQGPNKHPVGTTVAPLGPKPGPVVRNEKIQNPKEKPLGPKEQIIVPTKNPTSPWRNSQQYEVNKSNYKLPHSEGYMPVPNFNSVDQHENSYYPRGDSRKVPNSDGQTQSQNLPKGIVLGSRRMPYESETNQSELKHSSYQPAVYPEEIPSPAKEHFPAGRNTWDHQEISPPFKEDPGRQEEHLPHPSHGSRGSVFYPEYNPYDPRENSPYLRGNTWDERDDSPNTMGQKESPLYPINTPDQKEIVPYNEEDPVDPTGDEVFPGQNRWGEELSFKGGPTVRHYEGEQYTSNQPKEYLPYSLDNPSKPREDFYYSEFYPWSPDENFPSYNTASTMPPPIESRGYYVNNAAGPEESTLFPSRNSWDHRIQAQGQRERRPYFNRNIWDQATHLQKAPARPPDQKGNQPYYSNTPAGLQKNPIWHEGENLNYGMQITRMNSPEREHSSFPNFIPPSYPSGQKEAHLFHLSQRGSCCAGSSTGPKDNPLALQDYTPSYGLAPGENQDTSPLYTDGSHTKQTRDIISPTSILPGQRNSSEKRESQNPFRDDVSTLRRNTPCSIKNQLGQKEIMPFPEASSLQSKNTPCLKNDLGGDGNNILEQVFEDNQLNERTVDLTPEQLVIGTPDEGSNPEGIQSQVQENESERQQQRPSNILHLPCFGSKLAKHHSSTTGTPSSDGRQSPFDGDSITPTENPNTLVELATEEQFKSINVDPLDADEHSPFEFLQRGTNVQDQVQDCLLLQA

SEQ ID NO: 11839 - protein, 1031 aa, Homo sapiens
MPPGRWHAAYPAQAQSSRERGRLQTVKKEEEDESYTPVQAARPQTLNRPGQELFRQLFRQLRYHESSGPLETLSRLRELCRWWLRPDVLSKAQILELLVLEQFLSILPGELRVWVQLHNPESGEEAVALLEELQRDLDGTSWRDPGPAQSPDVHWMGTGALRSAQIWSLASPLRSSSALGDHLEPPYEIEARDFLAGQSDTPAAQMPALFPREGCPGDQVTPTRSLTAQLQETMTFKDVEVTFSQDEWGWLDSAQRNLYRDVMLENYRNMASLVGPFTKPALISWLEAREPWGLNMQAAQPKGNPVAAPTGDDLQSKTNKFILNQEPLEEAETLAVSSGCPATSVSEGIGLRESFQQKSRQKDQCENPIQVRVKKEETNFSHRTGKDSEVSGSNSLDLKHVTYLRVSGRKESLKHGCGKHFRMSSHHYDYKKYGKGLRHMIGGFSLHQRIHSGLKGNKKDVCGKDFSLSSHHQRGQSLHTVGVSFKCSDCGRTFSHSSHLAYHQRLHTQEKAFKCRVCGKAFRWSSNCARHEKIHTGVKPYKCDLCEKAFRRLSAYRLHRETHAKKKFLELNQYRAALTYSSGFDHHLGDQSGEKLFDCSQCRKSFHCKSYVLEHQRIHTQEKPYKCTKCRKTFRWRSNFTRHMRLHEEEKFYKQDECREGFRQSPDCSQPQGAPAVEKTFLCQQCGKTFTRKKTLVDHQRIHTGEKPYQCSDCGKDFAYRSAFIVHKKKHAMKRKPEGGPSFSQDTVFQVPQSSHSKEEPYKCSQCGKAFRNHSFLLIHQRVHTGEKPYKCRECGKAFRWSSNLYRHQRIHSLQKQYDCHESEKTPNVEPKILTGEKRFWCQECGKTFTRKRTLLDHKGIHSGEKRYKCNLCGKSYDRNYRLVNHQRIHSTERPFKCQWCGKEFIGRHTLSSHQRKHTRAAQAERSPPARSSSQDTKLRLQKLKPSEEMPLEDCKEACSQSSRLTGLQDISIGKKCHKCSICGKTFNKSSQLISHKRFHTRERPFKCSKCGKTFRWSSNLARHMKNHIRD

SEQ ID NO: 11840 - protein, 2432 aa, Homo sapiens
MPAILVASKMKSGLPKPVHSAAPILHVPPARAGPQPCYLKLGSKVEVSKTTYPSQIPLKSQVLQGLQEPAGEGLPLRKSGSVENGFDTQIYTDWANHYLAKSGHKRLIRDLQQDVTDGVLLAQIIQVVANEKIEDINGCPKNRSQMIENIDACLNFLAAKGINIQGLSAEEIRNGNLKAILGLFFSLSRYKQQQQQPQKQHLSSPLPPAVSQVAGAPSQCQAGTPQQQVPVTPQAPCQPHQPAPHQQSKAQAEMQSRLPGPTARVSAAGSEAKTRGGSTTANNRRSQSFNNYDKSKPVTSPPPPPSSHEKEPLASSASSHPGMSDNAPASLESGSSSTPTNCSTSSAIPQPGAATKPWRSKSLSVKHSATVSMLSVKPPGPEAPRPTPEAMKPAPNNQKSMLEKLKLFNSKGGSKAGEGPGSRDTSCERLETLPSFEESEELEAASRMLTTVGPASSSPKIALKGIAQRTFSRALTNKKSSLKGNEKEKEKQQREKDKEKSKDLAKRASVTERLDLKEEPKEDPSGAAVPEMPKKSSKIASFIPKGGKLNSAKKEPMAPSHSGIPKPGMKSMPGKSPSAPAPSKEGERSRSGKLSSGLPQQKPQLDGRHSSSSSSLASSEGKGPGGTTLNHSISSQTVSGSVGTTQTTGSNTVSVQLPQPQQQYNHPNTATVAPFLYRSQTDTEGNVTAESSSTGVSVEPSHFTKTGQPALEELTGEDPEARRLRTVKNIADLRQNLEETMSSLRGTQVTHSTLETTFDTNVTTEMSGRSILSLTGRPTPLSWRLGQSSPRLQAGDAPSMGNGYPPRANASRFINTESGRYVYSAPLRRQLASRGSSVCHVDVSDKAGDEMDLEGISMDAPGYMSDGDVLSKNIRTDDITSGYMTDGGLGLYTRRLNRLPDGMAVVRETLQRNTSLGLGDADSWDDSSSVSSGISDTIDNLSTDDINTSSSISSYANTPASSRKNLDVQTDAEKHSQVERNSLWSGDDVKKSDGGSDSGIKMEPGSKWRRNPSDVSDESDKSTSGKKNPVISQTGSWRRGMTAQVGITMPRTKPSAPAGALKTPGTGKTDDAKVSEKGRLSPKASQVKRSPSDAGRSSGDESKKPLPSSSRTPTANANSFGFKKQSGSAAGLAMITASGVTVTSRSATLGKIPKSSALVSRSAGRKSSMDGAQNQDDGYLALSSRTNLQYRSLPRPSKSNSRNGAGNRSSTSSIDSNISSKSAGLPVPKLREPSKTALGSSLPGLVNQTDKEKGISSDNESVASCNSVKVNPAAQPVSSPAQTSLQPGAKYPDVASPTLRRLFGGKPTKQVPIATAENMKNSVVISNPHATMTQQGNLDSPSGSGVLSSGSSSPLYSKNVDLNQSPLASSPSSAHSAPSNSLTWGTNASSSSAVSKDGLGFQSVSSLHTSCESIDISLSSGGVPSHNSSTGLIASSKDDSLTPFVRTNSVKTTLSESPLSSPAASPKFCRSTLPRKQDSDPHLDRNTLPKKGLRYTPTSQLRTQEDAKEWLRSHSAGGLQDTAANSPFSSGSSVTSPSGTRFNFSQLASPTTVTQMSLSNPTMLRTHSLSNADGQYDPYTDSRFRNSSMSLDEKSRTMSRSGSFRDGFEEVHGSSLSLVSSTSSVYSTPEEKCQSEIRKLRRELDASQEKVSALTTQLTANAHLVAAFEQSLGNMTIRLQSLTMTAEQKDSELNELRKTIELLKKQNAAAQAAINGVINTPELNCKGNGTAQSADLRIRRQHSSDSVSSINSATSHSSVGSNIESDSKKKKRKNWVNELRSSFKQAFGKKKSPKSASSHSDIEEMTDSSLPSSPKLPHNGSTGSTPLLRNSHSNSLISECMDSEAETVMQLRNELRDKEMKLTDIRLEALSSAHQLDQLREAMNRMQSEIEKLKAENDRLKSESQGSGCSRAPSQVSISASPRQSMGLSQHSLNLTESTSLDMLLDDTGECSARKEGGRHVKIVVSFQEEMKWKEDSRPHLFLIGCIGVSGKTKWDVLDGVVRRLFKEYIIHVDPVSQLGLNSDSVLGYSIGEIKRSNTSETPELLPCGYLVGENTTISVTVKGLAENSLDSLVFESLIPKPILQRYVSLLIEHRRIILSGPSGTGKTYLANRLSEYIVLREGRELTDGVIATFNVDHKSSKELRQYLSNLADQCNSENNAVDMPLVIILDNLHHVSSLGEIFNGLLNCKYHKCPYIIGTMNQATSSTPNLQLHHNFRWVLCANHTEPVKGFLGRFLRRKLMETEISGRVRNMELVKIIDWIPKVWHHLNRFLEAHSSSDVTIGPRLFLSCPIDVDGSRVWFTDLWNYSIIPYLLEAVREGLQLYGRRAPWEDPAKWVMDTYPWAASPQQHEWPPLLQLRPEDVGFDGYSMPREGSTSKQMPPSDAEGDPLMNMLMRLQEAANYSSPQSYDSDSNSNSHHDDILDSSLESTL

SEQ ID NO: 11841 - protein, 2488 aa, Homo sapiens
MPAILVASKMKSGLPKPVHSAAPILHVPPARAGPQPCYLKLGSKVEVSKTTYPSQIPLKSQVLQGLQEPAGEGLPLRKSGSVENGFDTQIYTDWANHYLAKSGHKRLIRDLQQDVTDGVLLAQIIQVVANEKIEDINGCPKNRSQMIENIDACLNFLAAKGINIQGLSAEEIRNGNLKAILGLFFSLSRYKQQQQQPQKQHLSSPLPPAVSQVAGAPSQCQAGTPQQQVPVTPQAPCQPHQPAPHQQSKAQAEMQSSASSKDSSQSKIIRFTLGQKKISRLPGPTARVSAAGSEAKTRGGSTTANNRRSQSFNNYDKSKPVTSPPPPPSSHEKEPLASSASSHPGMSDNAPASLESGSSSTPTNCSTSSAIPQPGAATKPWRSKSLSVKHSATVSMLSVKPPGPEAPRPTPEAMKPAPNNQKSMLEKLKLFNSKGGSKAGEGPGSRDTSCERLETLPSFEESEELEAASRMLTTVGPASSSPKIALKGIAQRTFSRALTNKKSSLKGNEKEKEKQQREKDKEKSKDLAKRASVTERLDLKEEPKEDPSGAAVPEMPKKSSKIASFIPKGGKLNSAKKEPMAPSHSGIPKPGMKSMPGKSPSAPAPSKEGERSRSGKLSSGLPQQKPQLDGRHSSSSSSLASSEGKGPGGTTLNHSISSQTVSGSVGTTQTTGSNTVSVQLPQPQQQYNHPNTATVAPFLYRSQTDTEGNVTAESSSTGVSVEPSHFTKTGQPALEELTGEDPEARRLRTVKNIADLRQNLEETMSSLRGTQVTHSTLETTFDTNVTTEMSGRSILSLTGRPTPLSWRLGQSSPRLQAGDAPSMGNGYPPRANASRFINTESGRYVYSAPLRRQLASRGSSVCHVDVSDKAGDEMDLEGISMDAPGYMSDGDVLSKNIRTDDITSGYMTDGGLGLYTRRLNRLPDGMAVVRETLQRNTSLGLGDADSWDDSSSVSSGISDTIDNLSTDDINTSSSISSYANTPASSRKNLDVQTDAEKHSQVERNSLWSGDDVKKSDGGSDSGIKMEPGSKWRRNPSDVSDESDKSTSGKKNPVISQTGSWRRGMTAQVGITMPRTKPSAPAGALKTPGTGKTDDAKVSEKGRLSPKASQVKRSPSDAGRSSGDESKKPLPSSSRTPTANANSFGFKKQSGSAAGLAMITASGVTVTSRSATLGKIPKSSALVSRSAGRKSSMDGAQNQDDGYLALSSRTNLQYRSLPRPSKSNSRNGAGNRSSTSSIDSNISSKSAGLPVPKLREPSKTALGSSLPGLVNQTDKEKGISSDNESVASCNSVKVNPAAQPVSSPAQTSLQPGAKYPDVASPTLRRLFGGKPTKQVPIATAENMKNSVVISNPHATMTQQGNLDSPSGSGVLSSGSSSPLYSKNVDLNQSPLASSPSSAHSAPSNSLTWGTNASSSSAVSKDGLGFQSVSSLHTSCESIDISLSSGGVPSHNSSTGLIASSKDDSLTPFVRTNSVKTTLSESPLSSPAASPKFCRSTLPRKQDSDPHLDRNTLPKKGLRYTPTSQLRTQEDAKEWLRSHSAGGLQDTAANSPFSSGSSVTSPSGTRFNFSQLASPTTVTQMSLSNPTMLRTHSLSNADGQYDPYTDSRFRNSSMSLDEKSRTMSRSGSFRDGFEEESWEKSSVDNFVSRLHSSLHFSLPLFHHARYELVHGSSLSLVSSTSSVYSTPEEKCQSEIRKLRRELDASQEKVSALTTQLTANAHLVAAFEQSLGNMTIRLQSLTMTAEQKDSELNELRKTIELLKKQNAAAQAAINGVINTPELNCKGNGTAQSADLRIRRQHSSDSVSSINSATSHSSVGSNIESDSKKKKRKNWVNELRSSFKQAFGKKKSPKSASSHSDIEEMTDSSLPSSPKLPHNGSTGSTPLLRNSHSNSLISECMDSEAETVMQLRNELRDKEMKLTDIRLEALSSAHQLDQLREAMNRMQSEIEKLKAENDRLKSESQGSGCSRAPSQVSISASPRQSMGLSQHSLNLTESTSLDMLLDDTGECSARKEGGRHVKIVVSFQEEMKWKEDSRPHLFLIGCIGVSGKTKWDVLDGVVRRLFKEYIIHVDPVSQLGLNSDSVLGYSIGEIKRSNTSETPELLPCGYLVGENTTISVTVKGLAENSLDSLVFESLIPKPILQRYVSLLIEHRRIILSGPSGTGKTYLANRLSEYIVLREGRELTDGVIATFNVDHKSSKELRQYLSNLADQCNSENNAVDMPLVIILDNLHHVSSLGEIFNGLLNCKYHKCPYIIGTMNQATSSTPNLQLHHNFRWVLCANHTEPVKGFLGRFLRRKLMETEISGRVRNMELVKIIDWIPKVWHHLNRFLEAHSSSDVTIGPRLFLSCPIDVDGSRVWFTDLWNYSIIPYLLEAVREGLQLYGRRAPWEDPAKWVMDTYPWAASPQQHEWPPLLQLRPEDVGFDGYSMPREGSTSKQMPPSDAEGDPLMNMLMRLQEAANYSSPQSYDSDSNSNSHHDDILDSSLESTL

SEQ ID NO: 11842 - protein, 594 aa, Homo sapiens
MKVTLSALDTSESSFTPLVVIELAQDVKEETKEWLKNRIIAKKKDGDNNDDFLTMAECQFIIKHELENLRAKDEKMIPGYPQAKLYPGKSLLRRLLTSGIVIQVFPLHDSEALKKLEDTWYTRFALKYQPIDSIRGYFGETIALYFGFLEYFTFALIPMAVIGLPYYLFVWEDYDKYVIFASFNLIWSTVILELWKRGCANMTYRWGTLLMKRKFEEPRPGFHGVLGINSITGKEEPLYPSYKRQLRIYLVSLPFVCLCLYFSLYVMMIYFDMEVWALGLHENSGSEWTSVLLYVPSIIYAIVIEIMNRLYRYAAEFLTSWENHRLESAYQNHLILKVLVFNFLNCFASLFYIAFVLKDMKLLRQSLATLLITSQILNQIMESFLPYWLQRKHGVRVKRKVQALKADIDATLYEQVILEKEMGTYLGTFDDYLELFLQFGYVSLFSCVYPLAAAFAVLNNFTEVNSDALKMCRVFKRPFSEPSANIGVWQLAFETMSVISVVTNCALIGMSPQVNAVFPESKADLILIVVAVEHALLALKFILAFAIPDKPRHIQMKLARLEFESLEALKQQQMKLVTENLKEEPMESGKEKAT

SEQ ID NO: 11843 - protein, 136 aa, Homo sapiens
MPANFTEGSFDSSGTGQTLDSSPVACTETVTFTEVVEGKEWGSFYYSFKTEQLITLWVLFVFTIVGNSVVLFSTWRRKKKSRMTFFVTQLAITDSFTGLVNILTDINWRFTGDFTAPDLVCRVVRYLQKSKPGSSL

SEQ ID NO: 11844 - protein, 932 aa, Homo sapiens
MSRVQTMNYVGQLAGQVFVTVKELYKGLNPATLSGCIDIIVIRQPNGNLQCSPFHVRFGKMGVLRSREKVVDIEINGESVDLHMKLGDNGEAFFVQETDNDQEVIPMHLATSPILSEGASRMECQLKRGSVDRMRGLDPSTPAQVIAPSETPSSSSVVKKRRKRRRKSQLDSLKRDDNMNTSEDEDMFPIEMSSDEAMELLESSRTLPNDIPPFQDDIPEENLSLAVIYPQSASYPNSDREWSPTPSSLVDCKRTAPHLAVAAEGGLSSSCPPQSSLFHPSESPSGSRPSTPKSDSELVSKSTERTGQKNPEMLWLWGELPQAAKSSSPHKMKESSPLSSRKICDKSHFQAIHSESSDTFSDQSPTLVGGALLDQNKPQTEMQFVNEEDLETLGAAAPLLPMIEELKPPSASVVQTANKTDSPSRKRDKRSRHLGADGVYLDDLTDMDPEVAALYFPKNGDPSGLAKHASDNGARSANQSPQSVGSSGVDSGVESTSDGLRDLPSIAISLCGGLSDHREITKDAFLEQAVSYQQFVDNPAIIDDPNLVVKIGSKYYNWTTAAPLLLAMQAFQKPLPKATVESIMRDKMPKKGGRWWFSWRGRNTTIKEESKPEQCLAGKAHSTGEQPPQLSLATRVKHESSSSDEERAAAKPSNAGHLPLLPNVSYKKTLRLTSEQLKSLKLKNGPNDVVFSVTTQYQGTCRCEGTIYLWNWDDKVIISDIDGTITRSDTLGHILPTLGKDWTHQGIAKLYHKVSQNGYKFLYCSARAIGMADMTRGYLHWVNERGTVLPQGPLLLSPSSLFSALHREVIEKKPEKFKVQCLTDIKNLFFPNTEPFYAAFGNRPADVYSYKQVGVSLNRIFTVNPKGELVQEHAKTNISSYVRLCEVVDHVFPLLKRSHSSDFPCSDTFSNFTFWREPLPPFENQDIHSASA

SEQ ID NO: 11845 - protein, 459 aa, Homo sapiens
MSRVQTMNYVGQLAGQVFVTVKELYKGLNPATLSGCIDIIVIRQPNGNLQCSPFHVRFGKMGVLRSREKVVDIEINGESVDLHMKLGDNGEAFFVQETDNDQEVIPMHLATSPILSEGASRMECQLKRGSVDRMRGLDPSTPAQVIAPSETPSSSSVVKKRRKRRRKSQLDSLKRDDNMNTSEDEDMFPIEMSSDEAMELLESSRTLPNDIPPFQDDIPEENLSLAVIYPQSASYPNSDREWSPTPSSLVDCKRTAPHLAVAAEGGLSSSCPPQSSLFHPSESPSGSRPSTPKSDSELVSKSTERTGQKNPEMLWLWGELPQAAKSSSPHKMKESSPLSSRKICDKSHFQAIHSESSDTFSDQSPTLVGGALLDQNKPQTEMQFVNEEDLETLGAAAPLLPMIEELKPPSASVVQTANKTDSPSRKRDKRSRHLGADGVYLDDLTDMDPEVAALYFPKK

SEQ ID NO: 11846 - protein, 701 aa, Homo sapiens
MSRVQTMNYVGQLAGQVFVTVKELYKGLNPATLSGCIDIIVIRQPNGNLQCSPFHVRFGKMGVLRSREKVVDIEINGESVDLHMKLGDNGEAFFVQETDNDQEVIPMHLATSPILSEGASRMECQLKRGSVDRMRGLDPSTPAQVIAPSETPSSSSVVKKRRKRRRKSQLDSLKRDDNMNTSEDEDMFPIEMSSDEAMELLESSRTLPNDIPPFQDDIPEENLSLAVIYPQSASYPNSDREWSPTPSSLVDCKRTAPHLAVAAEGGLSSSCPPQSSLFHPSESPSGSRPSTPKSDSELVSKSTERTGQKNPEMLWLWGELPQAAKSSSPHKMKESSPLSSRKICDKSHFQAIHSESSDTFSDQSPTLVGGALLDQNKPQTEMQFVNEEDLETLGAAAPLLPMIEELKPPSASVVQTANKTDSPSRKRDKRSRHLGADGVYLDDLTDMDPEVAALYFPKNGDPSGLAKHASDNGARSANQSPQSVGSSGVDSGVESTSDGLRDLPSIAISLCGGLSDHREITKDAFLEQAVSYQQFVDNPAIIDDPNLVVKIGSKYYNWTTAAPLLLAMQAFQKPLPKATVESIMRDKMPKKGGRWWFSWRGRNTTIKEESKPEQCLAGKAHSTGEQPPQLSLATRVKHESSSSDEERAAAKPSNAGHLPLLPNVSYKKTLRLTSEQLLEVEEWPQRRGFQCHHAVPRHVPL

SEQ ID NO: 11847 - protein, 477 aa, Homo sapiens
MRRQPQNGDLKKQLHERQPRIAALSDKQALGTITAVPVTGPQVSSLQRLAGQGAAVLPQVRPKTLIPDSLPVAPGRDRPPKQPPTFQKATVVSVKNPSPALPTANNTVSHVPAPGSQPQALAEPAALASPLSSAGVAYAIISTSPSNAAAMAPSTAVSVVSDSIKVQPLLISADNKVIIIQPQVQTQPESTAESRPPTEEPSQGAQATKKKKEDRPPTQENPEKIAFMVALGLVTTEHLEEIQSKRQERKRRSTANPAYSGLLETERKRLASNYLNNPLFLTARANEDPCWKNEITHDEHCAACKRGANLQPCGTCPGAYHLSCLEPPLKTAPKGVWVCPRCQQKALKKDEGVPWTGMLAIVHSYVTHKTVKEEEKQKLLQRGSELQNEHQQLEERDRRLASAVQKCLELKTSLLARQRGTQSSLDRLRALLRLIQGEQLLQVTMTTTSPAPLLAGPWTKPSVAATHPTVQHPQGHN

SEQ ID NO: 11848 - protein, 241 aa, Homo sapiens
MWNWLRLVKDSVSEKTIGLMRMQFWKKTVEDIYCDNPPHQPVAIELWKAVKRHNLTKRWLMKIVDEREKNLDDKAYRNIKELENYAENTQSSLLYLTLEILGIKDLHADHAASHIGKAQGIVTCLRATPYHGSRRKVFLPMDICMLHGVSQEDFLRRNQDKNVRDVIYDIASQAHLHLKHARSFHKTVPVKAFPAFLQTVSLEDFLKKIQRVDFDIFHPSLQQKNTLLPLYLYIQSWRKTY

SEQ ID NO: 11849 - protein, 947 aa, Homo sapiens
MWQKIEDVEWRPQTYLELEGLPCILIFSGMDPHGESLPRSLRYCDLRLINSSCLVRTALEQELGLAAYFVSNEVPLEKGARNEALESDAEKLSSTDNEDEELGTEGSTSEKRSPMKRERSRSHDSASSSLSSKASGSALGGESSAQPTALPQGEHARSPQPRGPAEEGRAPGEKQRPRASQGPPSAISRHSPGPTPQPDCSLRTGQRSVQVSVTSSCSQLSSSSGSSSSSVAPAAGTWVLQASQCSLTKACRQPPIVFLPKLVYDMVVSTDSSGLPKAASLLPSPSVMWASSFRPLLSKTMTSTEQSLYYRQWTVPRPSHMDYGNRAEGRVDGFHPRRLLLSGPPQIGKTGAYLQFLSVLSRMLVRLTEVDVYDEEEININLREESDWHYLQLSDPWPDLELFKKLPFDYIIHDPKYEDASLICSHYQGIKSEDRGMSRKPEDLYVRRQTARMRLSKYAAYNTYHHCEQCHQYMGFHPRYQLYESTLHAFAFSYSMLGEEIQLHFIIPKSKEHHFVFSQPGGQLESMRLPLVTDKSHEYIKSPTFTPTTGRHEHGLFNLYHAMDGASHLHVLVVKEYEMAIYKKYWPNHIMLVLPSIFNSAGVGAAHFLIKELSYHNLELERNRQEELGIKPQDIWPFIVISDDSCVMWNVVDVNSAGERSREFSWSERNVSLKHIMQHIEAAPDIMHYALLGLRKWSSKTRASEVQEPFSRCHVHNFIILNVDLTQNVQYNQNRFLCDDVDFNLRVHSAGLLLCRFNRFSVMKKQIVVGGHRSFHITSKVSDNSAAVVPAQYICAPDSKHTFLAAPAQLLLEKFLQHHSHLFFPLSLKNHDHPVLSVDCYLNLGSQISVCYVSSRPHSLNISCSDLLFSGLLLYLCDSFVGASFLKKFHFLKGATLCVICQDRSSLRQTVVRLELEDEWQFRLRDEFQTANAREDRPLFFLTGRHI

SEQ ID NO: 11850 - protein, 333 aa, Homo sapiens
MAASAHGSVWGPLRLGIPGLCCRRPPLGLYARMRRLPGPEVSGRSVAAASGPGAWGTDHYCLELLRKRDYEGYLCSLLLPAESRSSVFALRAFNVELAQVKDSVSEKTIGLMRMQFWKKTVEDIYCDNPPHQPVAIELWKAVKRHNLTKRWLMKIVDEREKNLDDKAYRNIKELENYAENTQSSLLYLTLEILGIKDLHADHAASHIGKAQGIVTCLRATPYHGSRRKVFLPMDICMLHGVSQEDFLRRNQDKNVRDVIYDIASQAHLHLKHARSFHKTVPVKAFPAFLQTVSLEDFLKKIQRVDFDIFHPSLQQKNTLLPLYLYIQSWRKTY

SEQ ID NO: 11851 - protein, 852 aa, Homo sapiens
MSLFKARDWWSTILGDKEEFDQGCLCLANVDNSGNGQDKIIVGSFMGYLRIFSPHPAKTGDGAQAEDLLLEVDLRDPVLQVEVGKFVSGTEMLHLAVLHSRKLCVYSVSGTLGNVEHGNQCQMKLMYEHNLQRTACNMTYGSFGGVKGRDLICIQSMDGMLMVFEQESYAFGRFLPGFLLPGPLAYSSRTDSFLTVSSCQQVESYKYQVLAFATDADKRQETEQQKLGSGKRLVVDWTLNIGEQALDICIVSFNQSASSVFVLGERNFFCLKDNGQIRFMKKLDWSPSCFLPYCSVSEGTINTLIGNHNNMLHIYQDVTLKWATQLPHIPVAVRVGCLHDLKGVIVTLSDDGHLQCSYLGTDPSLFQAPNVQSRELNYDELDVEMKELQKIIKDVNKSQGVWPMTEREDDLNVSVVVSPNFDSVSQATDVEVGTDLVPSVTVKVTLQNRVILQKAKLSVYVQPPLELTCDQFTFEFMNRNPDGIPRVIQCKFRLPLKLICLPGQPSKTASHKITIDTNKSPVSLLSLFPGFASQSDDDQVNVMGFHFLGGARITVLASKTSQRYRIQSEQFEDLWLITNELILRLQEYFEKQGVKDFACSFSGSIPLQEYFELIDHHFELRINGEKLEELLSERAVQFRAIQRRLLARFKDKTPAPLQHLDTLLDGTYKQVIALADAVEENQGNLFQSFTRLKSATHLVILLIALWQKLSADQVAILEAAFLPLQEDTQELGWEETVDAAISHLLKTCLSKSSKEQALNLNSQLNIPKDTSQLKKHITLLCDRLSKGGRLCLSTDAAAPQTMVMPGGCTTIPESDLEERSVEQDSTELFTNHRHLTAETPRPEVSPLQGVSE

SEQ ID NO: 11852 - protein, 571 aa, Homo sapiens
MDHTSPTYMLANLTHLHSEQLLQGLNLLRQHHELCDIILRVGDVKIHAHKVVLASVSPYFKAMFTGNLSEKENSEVEFQCIDETALQAIVEYAYTGTVFISQDTVESLLPAANLLQIKLVLKECCAFLESQLDPGNCIGISRFAETYGCRDLYLAATKYICQNFEAVCQTEEFFELTHADLDEIVSNDCLNVATEETVFYALESWIKYDVQERQKYLAQLLNSVRLPLLSVKFLTRLYEANHLIRDDRTCKHLLNEALKYHFMPEHRLSHQTVLMTRPRCAPKVLCAVGGKSGLFACLDSVEMYFPQNDSWIGLAPLNIPRYEFGICVLDQKVYVIGGIATNVRPGVTIRKHENSVECWNPDTNTWTSLERMNESRSTLGVVVLAGELYALGGYDGQSYLQSVEKYIPKIRKWQPVAPMTTTRSCFAAAVLDGMIYAIGGYGPAHMNSVERYDPSKDSWEMVASMADKRIHFGVGVMLGFIFVVGGHNGVSHLSSIERYDPHQNQWTVCRPMKEPRTGVGAAVIDNYLYVVGGHSGSSYLNTVQKYDPISDTWLDSAGMIYCRCNFGLTAL

SEQ ID NO: 11853 - protein, 673 aa, Homo sapiens
MGQPSLTWMLMVVVASWFITTAATDTSEARTKYNCPARWSWRTPQRGGDTEQGPDEDFTSQGRWCSECHSNATCTEDEAVTTCTCQEGFTGDGLTCVDLDECAIPGAHNCSANSSCVNTPGSFSCVCPEGFRLSPGLGCTDVDECAEPGLSHCHALATCVNVVGSYLCVCPAGYRGDGWHCECSPGSCGPGLDCVPEGDALVCADPCQAHRTLDEYWRSTEYGEGYACDTDLRGWYRFVGQGGARMAETCVPVLRCNTAAPMWLNGTHPSSDEGIVSRKACAHWSGHCCLWDASVQVKACAGGYYVYNLTAPPECHLAYCTDPSSVEGTCEECSIDEDCKSNNGRWHCQCKQDFNITDISLLEHRLECGANDMKVSLGKCQLKSLGFDKVFMYLSDSRCSGFNDRDNRDWVSVVTPARDGPCGTVLTRNETHATYSNTLYLADEIIIRDLNIKINFACSYPLDMKVSLKTALQPMVSALNIRVGGTGMFTVRMALFQTPSYTQPYQGSSVTLSTEAFLYVGTMLDGGDLSRFALLMTNCYATPSSNATDPLKYFIIQDRCPHTRDSTIQVVENGESSQGRFSVQMFRFAGNYDLVYLHCEVYLCDTMNEKCKPTCSGTRFRSGSVIDQSRVLNLGPITRKGVQATVSRAFSSLGLLKVWLPLLLSATLTLTFQ

SEQ ID NO: 11854 - protein, 689 aa, Homo sapiens
MRHIMTRLTLPFWLQDTRHQRQREKFKGPTRLSFGQVLSRPEVAGRAERMGQPSLTWMLMVVVASWFITTAATDTSEARWCSECHSNATCTEDEAVTTCTCQEGFTGDGLTCVDLDECAIPGAHNCSANSSCVNTPGSFSCVCPEGFRLSPGLGCTDVDECAEPGLSHCHALATCVNVVGSYLCVCPAGYRGDGWHCECSPGSCGPGLDCVPEGDALVCADPCQAHRTLDEYWRSTEYGEGYACDTDLRGWYRFVGQGGARMAETCVPVLRCNTAAPMWLNGTHPSSDEGIVSRKACAHWSGHCCLWDASVQVKACAGGYYVYNLTAPPECHLAYCTDPSSVEGTCEECSIDEDCKSNNGRWHCQCKQDFNITDISLLEHRLECGANDMKVSLGKCQLKSLGFDKVFMYLSDSRCSGFNDRDNRDWVSVVTPARDGPCGTVLTRNETHATYSNTLYLADEIIIRDLNIKINFACSYPLDMKVSLKTALQPMVSALNIRVGGTGMFTVRMALFQTPSYTQPYQGSSVTLSTEAFLYVGTMLDGGDLSRFALLMTNCYATPSSNATDPLKYFIIQDRCPHTRDSTIQVVENGESSQGRFSVQMFRFAGNYDLVYLHCEVYLCDTMNEKCKPTCSGTRFRSGSVIDQSRVLNLGPITRKGVQATVSRAFSSLGLLKVWLPLLLSATLTLTFQ

SEQ ID NO: 11855 - protein, 841 aa, Homo sapiens
MKMADRSGKIIPGQVYIEVEYDYEYEAKDRKIVIKQGERYILVKKTNDDWWQVKPDENSKAFYVPAQYVKEVTRKALMPPVKQVAGLPNNSTKIMQSLHLQRSTENVNKLPELSSFGKPSSSVQGTGLIRDANQNFGPSYNQGQTVNLSLDLTHNNGKFNNDSHSPKVSSQNRTRSFGHFPGPEFLDVEKTSFSQEQSCDSAGEGSERIHQDSESGDELSSSSTEQIRATTPPNQGRPDSPVYANLQELKISQSALPPLPGSPAIQINGEWETHKDSSGRCYYYNRGTQERTWKPPRWTRDASISKGDFQNPGDQELLSSEENYYSTSYSQSDSQCGSPPRGWSEELDERGHTLYTSDYTNEKWLKHVDDQGRQYYYSADGSRSEWELPKYNASSQQQREIIKSRSLDRRLQEPIVLTKWRHSTIVLDTNDKESPTASKPCFPENESSPSSPKHQDTDQEKYGLLNVTKIAENGKKVRKNWLSSWAVLQGSSLLFTKTQGSSTSWFGSNQSKPEFTVDLKGATIEMASKDKSSKKNVFELKTRQGTELLIQSDNDTVINDWFKVLSSTINNQAVETDEGIEEEIPDSPGIEKHDKEKEQKDPKKLRSFKVSSIDSSEQKKTKKNLKKFLTRRPTLQAVREKGYIKDQVFGSNLANLCQRENGTVPKFVKLCIEHVEEHGLDIDGIYRVSGNLAVIQKLRFAVNHDEKLDLNDSKWEDIHVITGALKMFFRELPEPLFTFNHFNDFVNAIKQEPRQRVAAVKDLIRQLPKPNQDTMQILFRHLRRVIENGEKNRMTYQSIAIVFGPTLLKPEKETGNIAVHTVYQNQIVELILLELSSIFGR

SEQ ID NO: 11856 - protein, 676 aa, Homo sapiens
MQGTVAFEDVAVNFSQEEWSLLSEVQRCLYHDVMLENWVLISSLGCWCGSEDEEAPSKKSISIQRVSQVSTPGAGVSPKKAHSCEMCGAILGDILHLADHQGTHHKQKLHRCEAWGNKLYDSSNRPHQNQYLGEKPYRSSVEEALFVKRCKFHVSEESSIFIQSGKDFLPSSGLLLQEATHTGEKSNSKPECESPFQWGDTHYSCGECMKHSSTKHVFVQQQRLPSREECYCWECGKSFSKYDSVSNHQRVHTGKRPYECGECGKSFSHKGSLVQHQRVHTGKRPYECGECGKSFSHKGSLVQHQRVHTGERPYECGECGKSFSQNGTLIKHQRVHTGERPYECEECGKCFTQKGNLIQHQRGHTSERPYECEECGKCFSQKGTLTEHHRVHTRERPYECGECGKSFSRKGHLRNHQRGHTGERPYECGECGKSFSRKGNLIQHQRSHTGERPYECRECRKLFRGKSHLIEHQRVHTGERPYECNECGKSFQDSSGFRVHQRVHTGEKPFECSECGKSFPQSCSLLRHRRVHTGERPYECGECGKSFHQSSSLLRHQKTHTAERPYECRECGKFFSSLLEHRRVHTGERPYECRECGKTFTRRSAHFKHQRLHTRGKPYECSECGKSFAETFSLTEHRRVHTGERPYECSECGKSFHRSSSLLRHQRVHTERSPYK

SEQ ID NO: 11857 - protein, 413 aa, Homo sapiens
MGPRGAASLPRGPGPRRLLLPVVLPLLLLLLLAPPGSGAGASRPPHLVFLLADDLGWNDVGFHGSRIRTPHLDALAAGGVLLDNYYTQPLCTPSRSQLLTGRYQIRTGLQHQIIWPCQPSCVPLDEKLLPQLLKEAGYTTHMVGKWHLGMYRKECLPTRRGFDTYFGYLLGSEDYYSHERCTLIDALNVTRCALDFRDGEEVATGYKNMYSTNIFTKRAIALITNHPPEKPLFLYLALQSVHEPLQVPEEYLKPYDFIQDKNRHHYAGMVSLMDEAVGNVTAALKSSGLWNNTVFIFSTDNGGQTLAGGNNWPLRGRKWSLWEGGVRGVGFVASPLLKQKGVKNRELIHISDWLPTLVKLARGHTNGTKPLDGFDVWKTISEGSPSPRIELLHNIDPNFVDSSPYWPECSLLL

SEQ ID NO: 11858 - protein, 402 aa, Homo sapiens
MAAAAALRAPAQSSVTFEDVAVNFSLEEWSLLNEAQRCLYRDVMLETLTLISSLGCWHGGEDEAAPSKQSTCIHIYKDQGGHSGERPYECGEYRKLFKNKSCLTEPRRDHKHRNVRTGERPYECSKYGKLFHQKPTLHIHERFHTGQKTYECSECGKSFHQSSSLLQRQTLHTRERPYECIECGKAFAEKSSLINHRKVHSGAKRYECNECGKSFAYTSSLIKHRRIHTGERPYECSECGRSFAENSSLIKHLRVHTGERPYECVECGKSFRRSSSLLQHQRVHTRERPYECSECGKSFSLRSNLIHHQRVHTGERHECGQCGKSFSRKSSLIIHLRVHTGERPYECSDCGKSFAENSSLIKHLRVHTGERPYECIDCGKSFRHSSSFRRHQRVHTGMRPYK

SEQ ID NO: 11859 - protein, 809 aa, Homo sapiens
MEEPGVTPQPYLGLLLEELRRVVAALPEGMRPDSNLYGFPWELVICAAVVGFFAVLFFLWRSFRSVRSRLYVGREKKLALMLSGLIEEKSKLLEKFSLVQKEYEGYEVESSLKDASFEKEATEAQSLEVENQMATCEKLNRSNSELEDEILCLEKELKEEKSKHSEQDELMADISKRIQSLEDESKSLKSQVAEAKMTFKIFQMNEERLKIAIKDALNENSQLQESQKQLLQEAEVWKEQVSELNKQKVTFEDSKVHAEQVLNDKESHIKTLTERLLKMKDWAAMLGEDITDDDNLELEMNSESENGAYLDNPPKGALKKLIHAAKLNASLKTLEGERNQIYIQLSEVDKTKEELTEHIKNLQTEQASLQSENTHFENENQKLQQKLKVMTELYQENEMKLHRKLTVEENYRLEKEEKLSKVDEKISHATEELETYRKRAKDLEEELERTIHSYQGQIISHEKKAHDNWLAARNAERNLNDLRKENAHNRQKLTETELKFELLEKDPYALDVPNTAFGREHSPYGPSPLGWPSSETRAFLSPPTLLEGPLRLSPLLPGGGGRGSRGPGNPLDHQITNERGESSCDRLTDPHRAPSDTGSLSPPWDQDRRMMFPPPGQSYPDSALPPQRQDRFCSNSGRLSGPAELRSFNMPSLDKMDGSMPSEMESSRNDTKDDLGNLNVPDSSLPAENEATGPGFVPPPLAPIRGPLFPVDARGPFLRRGPPFPPPPPGAMFGASRDYFPPGDFPGPPPAPFAMRNVYPPRGFPPYLPPRPGFFPPPPHSEGRSEFPSGLIPPSNEPATEHPEPQQET

SEQ ID NO: 11860 - protein, 427 aa, Homo sapiens
MTLVTAGGAWTGPGCWHEVKDEESSSEQSISIAVSHVNTSKAGLPAQTALPCDICGPILKDILHLDEHQGTHHGLKLHTCGACGRQFWFSANLHQYQKCYSIEQPLRRDKSEASIVKNCTVSKEPHPSEKPFTCKEEQKNFQATLGGCQQKAIHSKRKTHRSTESGDAFHGEQMHYKCSECGKAFSRKDTLVQHQRIHSGEKPYECSECGKAFSRKATLVQHQRIHTGERPYECSECGKTFSRKDNLTQHKRIHTGEMPYKCNECGKYFSHHSNLIVHQRVHNGARPYKCSDCGKVFRHKSTLVQHESIHTGENPYDCSDCGKSFGHKYTLIKHQRIHTESKPFECIECGKFFSRSSDYIAHQRVHTGERPFVCSKCGKDFIRTSHLVRHQRVHTGERPYECSECGKAYSLSSHLNRHQKVHTAGRL

SEQ ID NO: 11861 - protein, 775 aa, Homo sapiens
MRPDSNLYGFPWELVICAAVVGFFAVLFFLWRSFRSVRSRLYVGREKKLALMLSGLIEEKSKLLEKFSLVQKEYEGYEVESSLKDASFEKEATEAQSLEATCEKLNRSNSELEDEILCLEKELKEEKSKHSEQDELMADISKRIQSLEDESKSLKSQVAEAKMTFKIFQMNEERLKIAIKDALNENSQLQESQKQLLQEAEVWKEQVSELNKQKVTFEDSKVHAEQVLNDKESHIKTLTERLLKMKDWAAMLGEDITDDDNLELEMNSESENGAYLDNPPKGALKKLIHAAKLNASLKTLEGERNQIYIQLSEVDKTKEELTEHIKNLQTEQASLQSENTHFENENQKLQQKLKVMTELYQENEMKLHRKLTVEENYRLEKEEKLSKVDEKISHATEELETYRKRAKDLEEELERTIHSYQGQIISHEKKAHDNWLAARNAERNLNDLRKENAHNRQKLTETELKFELLEKDPYALDVPNTAFGREHSPYGPSPLGWPSSETRAFLSPPTLLEGPLRLSPLLPGGGGRGSRGPGNPLDHQITNERGESSCDRLTDPHRAPSDTGSLSPPWDQDRRMMFPPPGQSYPDSALPPQRQDRFCSNSGRLSGPAELRSFNMPSLDKMDGSMPSEMESSRNDTKDDLGNLNVPDSSLPAENEATGPGFVPPPLAPIRGPLFPVDARGPFLRRGPPFPPPPPGAMFGASRDYFPPGDFPGPPPAPFAMRNVYPPRGFPPYLPPRPGFFPPPPHSEGRSEFPSGLIPPSNEPATEHPEPQQET

SEQ ID NO: 11862 - protein, 895 aa, Homo sapiens
MSLRDKGGEEECFEYDCQDEERKPTHRQHDTQDLLEEVLCAERVGQMTKTYNDIDAVTRLLEEKERDLELAARIGQSLLKKNKTLTERNELLEEQVEHIREEVSQLRHELSMKDELLQFYTSAAEESEPESVCSTPLKRNESSSSVQNYFHLDSLQKKLKDLEEENVVLRSEASQLKTETITYEEKEQQLVNDCVKELRDANVQIASISEELAKKTEDAARQQEEITHLLSQIVDLQKKAKACAVENEELVQHLGAAKDAQRQLTAELRELEDKYAECMEMLHEAQEELKNLRNKTMPNTTSRRYHSLGLFPMDSLAAEIEGTMRKELQLEEAESPDITHQKRVFETVRNINQVVKQRSLTPSPMNIPGSNQSSAMNSLLSSCVSTPRSSFYGSDIGNVVLDNKTNSIILETEAADLGNDERSKKPGTPGTPGSHDLETALRRLSLRRENYLSERRFFEEEQERKLQELAEKGELRSGSLTPTESIMSLGTHSRFSEFTGFSGMSFSSRSYLPEKLQIVKPLEGSATLHHWQQLAQPHLGGILDPRPGVVTKGFRTLDVDLDEVYCLNDFEEDDTGDHISLPRLATSTPVQHPETSAHHPGKCMSQTNSTFTFTTCRILHPSDELTRVTPSLNSAPTPACGSTSHLKSTPVATPCTPRRLSLAESFTNTRESTTTMSTSLGLVWLLKERGISAAVYDPQSWDRAGRGSLLHSYTPKMAVIPSTPPNSPMQTPTSSPPSFEFKCTSPPYDNFLASKPASSILREVREKNVRSSESQTDVSVSNLNLVDKVRRFGVAKVVNSGRAHVPTLTEEQGPLLCGPPGPAPALVPRGLVPEGLPLRCPTVTSAIGGLQLNSGIRRNRSFPTMVGSSMQMKAPVTLTSGILMGAKLSKQTSLR

SEQ ID NO: 11863 - protein, 533 aa, Homo sapiens
MNLTEGRVVFEDVAIYFSQEEWGHLDEAQRLLYRDVMLENLALLSSLGSWHGAEDEEAPSQQGFSVGVSEVTASKPCLSSQKVHPSETCGPPLKDILCLVEHNGIHPEQHIYICEAELFQHPKQQIGENLSRGDDWIPSFGKNHRVHMAEEIFTCMEGWKDLPATSCLLQHQGPQSEWKPYRDTEDREAFQTGQNDYKCSECGKTFTCSYSFVEHQKIHTGERSYECNKCGKFFKYSANFMKHQTVHTSERTYECRECGKSFMYNYRLMRHKRVHTGERPYECNTCGKFFRYSSTFVRHQRVHTGERPYECRECGKFFMDSSTLIKHQRVHTGERPYKCNDCGKFFRYISTLIRHQRIHTGERPYECSVCGELFRYNSSLVKHWRNHTGERPYKCSECGKSFRYHCRLIRHQRVHTGERPYECSECGKFFRYNSNLIKHWRNHTGERPYECRECGKAFSHKHILVEHQKIHSGERPYECSECQKAFIRKSHLVHHQKIHSEERLVCSMNVGNSLAKTPTSLNIRDFTMEKVYH

SEQ ID NO: 11864 - protein, 634 aa, Homo sapiens
MESPTKEIEEFESNSLKYLQPEQIEKIWLRLRGLRKYKKTSQRLRSLVKQLERGEASVVDLKKNLEYAATVLESVYIDETRRLLDTEDELSDIQSDAVPSEVRDWLASTFTRQMGMMLRRSDEKPRFKSIVHAVQAGIFVERMYRRTSNMVGLSYPPAVIEALKDVDKWSFDVFSLNEASGDHALKFIFYELLTRYDLISRFKIPISALVSFVEALEVGYSKHKNPYHNLMHAADVTQTVHYLLYKTGVANWLTELEIFAIIFSAAIHDYEHTGTTNNFHIQTRSDPAILYNDRSVLENHHLSAAYRLLQDDEEMNILINLSKDDWREFRTLVIEMVMATDMSCHFQQIKAMKTALQQPEAIEKPKALSLMLHTADISHPAKAWDLHHRWTMSLLEEFFRQGDREAELGLPFSPLCDRKSTMVAQSQVGFIDFIVEPTFTVLTDMTEKIVSPLIDETSQTGGTGQRRSSLNSISSSDAKRSGVKTSGSEGSAPINNSVISVDYKSFKATWTEVVHINRERWRAKVPKEEKAKKEAEEKARLAAEEQQKEMEAKSQAEEGASGKAEKKTSGETKNQVNGTRANKSDNPRGKNSKAEKSSGEQQQNGDFKDGKNKTDKKDHSNIGNDSKKTDDSQE

SEQ ID NO: 11865 - protein, 915 aa, Homo sapiens
MELSDANLQTLTEYLKKTLDPDPAIRRPAEKFLESVEGNQNYPLLLLTLLEKSQDNVIKVCASVTFKNYIKRNWRIVEDEPNKICEADRVAIKANIVHLMLSSPEQIQKQLSDAISIIGREDFPQKWPDLLTEMVNRFQSGDFHVINGVLRTAHSLFKRYRHEFKSNELWTEIKLVLDAFALPLTNLFKATIELCSTHANDASALRILFSSLILISKLFYSLNFQDLPEFFEDNMETWMNNFHTLLTLDNKLLQTDLVSNAIQFLASVCERPHYKNLFEDQNTLTSICEKVIVPNMEFRAADEEAFEDNSEEYIRRDLEGSDIDTRRRAACDLVRGLCKFFEGPVTGIFSGYVNSMLQEYAKNPSVNWKHKDAAIYLVTSLASKAQTQKHGITQANELVNLTEFFVNHILPDLKSANVNEFPVLKADGIKYIMIFRNQVPKEHLLVSIPLLINHLQAESIVVHTYAAHALERLFTMRGPNNATLFTAAEIAPFVEILLTNLFKALTLPGSSENEYIMKAIMRSFSLLQEAIIPYIPTLITQLTQKLLAVSKNPSKPHFNHYMFEAICLSIRITCKANPAAVVNFEEALFLVFTEILQNDVQEFIPYVFQVMSLLLETHKNDIPSSYMALFPHLLQPVLWERTGNIPALVRLLQAFLERGSNTIASAAADKIPGLLGVFQKLIASKANDHQGFYLLNSIIEHMPPESVDQYRKQIFILLFQRLQNSKTTKFIKSFLVFINLYCIKYGALALQEIFDGIQPKMFGMVLEKIIIPEIQKVSGNVEKKICAVGITKLLTECPPMMDTEYTKLWTPLLQSLIGLFELPEDDTIPDEEHFIDIEDTPGYQTAFSQLAFAGKKEHDPVGQMVNNPKIHLAQSLHKLSTACPGRVPSMVSTSLNAEALQYLQGYLQAASVTLL

SEQ ID NO: 11866 - protein, 769 aa, Homo sapiens
MTDAGNRKEGFKKCRSATFSIDGYSFTIVANEAGDKNARPLARFSRSKSQNCLWNSLIDGLTGNVKEKPRPTIVHDPRPPEEILADELPQLDSPEVLVKTSFRLRSLVKQLERGEASVVDLKKNLEYAATVLESVYIDETRRLLDTEDELSDIQSDAVPSEVRDWLASTFTRQMGMMLRRSDEKPRFKSIVHAVQAGIFVERMYRRTSNMVGLSYPPAVIEALKDVDKWSFDVFSLNEASGDHALKFIFYELLTRYDLISRFKIPISALVSFVEALEVGYSKHKNPYHNLMHAADVTQTVHYLLYKTGVANWLTELEIFAIIFSAAIHDYEHTGTTNNFHIQTRSDPAILYNDRSVLENHHLSAAYRLLQDDEEMNILINLSKDDWREFRTLVIEMVMATDMSCHFQQIKAMKTALQQPEAIEKPKALSLMLHTADISHPAKAWDLHHRWTMSLLEEFFRQGDREAELGLPFSPLCDRKSTMVAQSQVGFIDFIVEPTFTVLTDMTEKIVSPLIDETSQTGGTGQRRSSLNSISSSDAKRSGVKTSGSEGSAPINNSVISVDYKSFKATWTEVVHINRERWRAKVPKEEKAKKEAEEKARLAAEEQQKEMEAKSQAEEGASGKAEKKTSGETKNQVNGTRANKSDNPRGKNSKAEKSSGEQQQNGDFKDGKNKTDKKDHSNIGNDSKKTDGTKQRSHGSPAPSTSSTCRLTLPVIKPPLRHFKRPAYASSSYAPSVSKKTDEHPARYKMLDQRIKMKKIQNISHNWNRK

SEQ ID NO: 11867 - protein, 574 aa, Homo sapiens
MRGGEVALGWNKKKRLFCEDFRFKMVTAAMLLQCCPVLARGPTSLLGKVVKTHQFLFGIGRCPILATQGPNCSQIHLKATKAGGDSPSWAKGHCPFMLSELQDGKSKIVQKAAPEVQEDVKAFKTGNYVFSYDQFFRDKIMEKKQDHTYRVFKTVNRWADAYPFAQHFSEASVASKDVSVWCSNDYLGMSRHPQVLQATQETLQRHGAGAGGTRNISGTSKFHVELEQELAELHQKDSALLFSSCFVANDSTLFTLAKILPGCEIYSDAGNHASMIQGIRNSGAAKFVFRHNDPDHLKKLLEKSNPKIPKIVAFETVHSMDGAICPLEELCDVSHQYGALTFVDEVHAVGLYGSRGAGIGERDGIMHKIDIISGTLGKAFGCVGGYIASTRDLVDMVRSYAAGFIFTTSLPPMVLSGALESVRLLKGEEGQALRRAHQRNVKHMRQLLMDRGLPVIPCPSHIIPIRVGNAALNSKLCDLLLSKHGIYVQAINYPTVPRGEELLRLAPSPHHSPQMMEDFVEKLLLAWTAVGLPLQDVSVAACNFCRRPVHFELMSEWERSYFGNMGPQYVTTYA

SEQ ID NO: 11868 - protein, 474 aa, Homo sapiens
MPKVKALQCALALEISSVTCPGVVLKDKEDIYLSICVFGQYKKTQCVPATFPLVFNARMVFEKVFPDAVDPGDVVTQLELGETLSTYDENTRDFMFPGPNQMSGHHDSNRQVTMRRISGLRGNAPRLEFSTTSVITECLISSRKCHTQDKFIYHLAPVEKSHGRLQNRTSRSQKKKSKSPERSKYCINAKNYEQPTISSKSHSPSPYTKRRMCELSEDTRRRLAHLNLGPYEFKKETDKPPFVIRHVDPPSPRADTLLGSSGRDCERDGWSRVHNDHSHLGCCRPKDYKVIRTPHGRDFDDSLEKCEEYLSPRSCSKPRHSARTLLVHSAPSTMPKHSPSPVLNRASLRERFHSDWCSPSNCDEIHDRVKNVLKSHQAHQRHLYDERDLEKDDELELKRSLLCRDSAYDSDPEYSSCQQPRGTFHLDDGEYWSNRAASYKGKSHRPIFENSMDKMYRNLYKKACSSASHTQESF

SEQ ID NO: 11869 - protein, 562 aa, Homo sapiens
MCVCPGPRRIGIPVRSSSLPLFSDAMPAPTQLFFPLIRNCELSRIYGTACYCHHKHLCCSSSYIPQSRLRYTPHPAYATFCRPKENWWQYTQGRRYASTPQKFYLTPPQVNSILKANEYSFKVPEFDGKNVSSILGFDSNQLPANAPIEDRRSAATCLQTRGMLLGVFDGHAGCACSQAVSERLFYYIAVSLLPHETLLEIENAVESGRALLPILQWHKHPNDYFSKEASKLYFNSLRTYWQELIDLNTGESTDIDVKEALINAFKRLDNDISLEAQVGDPNSFLNYLVLRVAFSGATACVAHVDGVDLHVANTGDSRAMLGVQEEDGSWSAVTLSNDHNAQNERELERLKLEHPKSEAKSVVKQDRLLGLLMPFRAFGDVKFKWSIDLQKRVIESGPDQLNDNEYTKFIPPNYHTPPYLTAEPEVTYHRLRPQDKFLVLATDGLWETMHRQDVVRIVGEYLTGMHHQQPIAVGGYKVTLGQMHGLLTERRTKMSSVFEDQNAATHLIRHAVGNNEFGTVDHERLSKMLSLPEELARMYRDDITIIVVQFNSHVVGAYQNQE

SEQ ID NO: 11870 - protein, 470 aa, Homo sapiens
MCENQLKTKADATAQIEVIPCKICGDKSSGIHYGVITCEGCKGFFRRSQQNNASYSCPRQRNCLIDRTNRNRCQHCRLQKCLALGMSRDAVKFGRMSKKQRDSLYAEVQKHQQRLQEQRQQQSGEAEALARVYSSSISNGLSNLNNETSGTYANGHVIDLPKSEGYYNVDSGQPSPDQSGLDMTGIKQIKQEPIYDLTSVPNLFTYSSFNNGQLAPGITMTEIDRIAQNIIKSHLETCQYTMEELHQLAWQTHTYEEIKAYQSKSREALWQQCAIQITHAIQYVVEFAKRITGFMELCQNDQILLLKSGCLEVVLVRMCRAFNPLNNTVLFEGKYGGMQMFKALGSDDLVNEAFDFAKNLCSLQLTEEEIALFSSAVLISPDRAWLIEPRKVQKLQEKIYFALQHVIQKNHLDDETLAKLIAKIPTITAVCNLHGEKLQVFKQSHPEIVNTLFPPLYKELFNPDCATGCK

SEQ ID NO: 11871 - protein, 991 aa, Homo sapiens
MEEYEKFCEKSLARIQEASLSTESFLPAQSESISLIRFHGVAILSPLLNIEKRKEMQQEKQKALDVEARKQVNRKKALLTRVQEILDNVQVRKAPNASDFDQWEMETVYSNSEVRNLNVPATFPNSFPSHTEHSTAAKLDKIAGILPLDNEDQCKTDGIDLARDSEGFNSPKQCDSSNISHVENEAFPKTSSATPQETLISDGPFSVNEQQDLPLLAEVIPDPYVMSLQNLMKKSKEYIEREQSRRSLRGSINRIVNESHLDKEHDAVEVADCVKEKGQLTGKHCVSVIPDKPSLNKSNVLLQGASTQASSMSMPVLASFSKVDIPIRTGHPTVLESNSDFKVIPTFVTENNVIKSLTGSYAKLPSPEPSMSPKMHRRRSRTSSACHILINNPINACELSPKGKEQAMDLIIQDTDENTNVPEIMPKLPTDLAGVCSSKVYVGKNTSEVKEDVVLGKSNQVCQSSGNHLENKVTHGLVTVEGQLTSDERGAHIMNSTCAAMPKLHEPYASSQCIASPNFGTVSGLKPASMLEKNCSLQTELNKSYDVKNPSPLLMQNQNTRQQMDTPMVSCGNEQFLDNSFEKVKRRLDLDIDGLQKENCPYVITSGITEQERQHLPEKRYPKGSGFVNKNKMLGTSSKESEELLKSKMLAFEEMRKRLEEQHAQQLSLLIAEQEREQERLQKEIEEQEKMLKEKKAMTAEASELDINNAVELEWRKISDSSLLETMLSQADSLHTSNSNSSGFTNSAMQYSFVSANEAPFYLWGSSTSGLTKLSVTRPFGRAKTRWSQVFSLEIQAKFNKITAVAKGFLTRRLMQTDKLKQLRQTVKDTMEFIRSFQSEAPLKRGIVSAQDASLQERVLAQLRAALYGIHDIFFVMDAAERMSILHHDREVRKEKMLRQMDKMKSPRVALSAATQKSLDRKKYMKAAEMGMPNKKFLVKQNPSETRVLQPNQGQNAPVHRLLSRQGSICRKNPKKAAKCCDNLRRQHSLG

SEQ ID NO: 11872 - protein, 770 aa, Homo sapiens
MRKAASAASSRSTSSLWSTAACAAARPSPSSSTPSASVEIANSMSARAAAPTRSTKRPGSAASASKRGGSLFESNLENEGSISGSDSTFYRQSEGHSVMDTLAVALRVAEEAIEEAISKAEAYGDSLDKQNEASYLRDHKEELTEELATTILQKIIRKQKSKSEQQVEEEPGWPHPQSCSTKVADEGTSASPGGYRAPAALWRSQSAFSITGEEALKTPPVEAPSRQPRDQGQHPRAESALPSWKSVDRLDETNLAPVLQSPDGNWVALKDGAPPPTRLLAKPKSGTFQALEVASSVASAYDEMGSDSEEDFDWSEALSKLCPRSRALPRNPQPQPTQAQSSDQGPIAASPSSALSPNPEAMCSDSETSSAGSSREVGHQARLSWLQRKAPRNPAAEKMRLHGELDVNFNPQLASRETSDSSEPEEAPHTTDRRARRWRRARLGSEEPSKEPSSPSAQLRDLDTHQVSDDLSETDISNEARDPQTLTDTTEEKRRNRLYELAMKMSEKETSSGEDQESEPKTESENQKESLSSEDNSQSVQEELKKKFSAVSLCNISTEVLKVINATEELIAGSTGPWESPQVPPDRQKGMFPRGTDQVRLDEQLTSLEENVYLAAGTVYGLETQLTELEDAARCIHSGTDETHLADLEDQVATAAAQVHHAELQISDIESRISALTIAGLNIAPCVRFTRRRDQKQRTQVQTIDTSRQQRRKLPAPPVKAEKIETSSVTTIKTFNHNFILQGSSTNRTKERKGTTKDLMEPALESAVMY

SEQ ID NO: 11873 - protein, 577 aa, Homo sapiens
MPDRTEKHSTMPDSPVDVKTQSRLTPPTMPPPPTTQGAPRTSSFTPTTLTNGTSHSPTALNGAPSPPNGFSNGPSSSSSSSLANQQLPPACGARQLSKLKRFLTTLQQFGNDISPEIGERVRTLVLGLVNSTLTIEEFHSKLQEATNFPLRPFVIPFLKANLPLLQRELLHCARLAKQNPAQYLAQHEQLLLDASTTSPVDSSELLLDVNENGKRRTPDRTKENGFDREPLHSEHPSKRPCTISPGQRYSPNNGLSYQPNGLPHPTPPPPQHYRLDDMAIAHHYRDSYRHPSHRDLRDRNRPMGLHGTRQEEMIDHRLTDREWAEEWKHLDHLLNCIMDMVEKTRRSLTVLRRCQEADREELNYWIRRYSDAEDLKKGGGSSSSHSRQQSPVNPDPVALDAHREFLHRPASGYVPEEIWKKAEEAVNEVKRQAMTELQKAVSEAERKAHDMITTERAKMERTVAEAKRQAAEDALAVINQQEDSSESCWNCGRKASETCSGCNTARYCGSFCQHKDWEKHHHICGQTLQAQQQGDTPAVSSSVTPNSGAGSPMDTPPAATPRSTTPGTPSTIETTPR

SEQ ID NO: 11874 - protein, 1270 aa, Homo sapiens
MEPIYPFARPQMNTRFPSSRMVPFHFPPSKCALWNPTPTGDFIYLHLSYYRNPKLVVTEKTIRLAYRHAKQNKKNSSCFLLGSLTADEDEEGVTLTVDRFDPGREVPECLEITPTASLPGDFLIPCKVHTQELCSREMIVHSVDDFSSALKALQCHICSKDSLDCGKLLSLRVHITSRESLDSVEFDLHWAAVTLANNFKCTPVKPIPIIPTALARNLSSNLNISQVQGTYKYGYLTMDETRKLLLLLESDPKVYSLPLVGIWLSGITHIYSPQVWACCLRYIFNSSVQERVFSESGNFIIVLYSMTHKEPEFYECFPCDGKIPDFRFQLLTSKETLHLFKNVEPPDKNPIRCELSAESQNAETEFFSKASKNFSIKRSSQKLSSGKMPIHDHDSGVEDEDFSPRPIPSPHPVSQKISKIQPSVPELSLVLDGNFIESNPLPTPLEMVNNENPPLINHLEHLKPLQPQLYDEKHSPEVEAGEPSLRGIPNQLNQDKPALLRHCKVRQPPAYKKGNPHTRNSIKPSSHNGPSHDIFEKLQTVSAGNVQNEEYPIRPSTLNSRQSSLAPQSQPHDFVFSPHNSGRPMELQIPTPPLPSYCSTNVCRCCQHHSHIQYSPLNSWQGANTVGSIQDVQSEALQKHSLFHPSGCPALYCNAFCSSSSPIALRPQGDMGSCSPHSNIEPSPVARPPSHMDLCNPQPCTVCMHTPKTESDNGMMGLSPDAYRFLTEQDRQLRLLQAQIQRLLEAQSLMPCSPKTTAVEDTVQAGRQMELVSVEAQSSPGLHMRKGVSIAVSTGASLFWNAAGEDQEPDSQMKQDDTKISSEDMNFSVDINNEVTSLPGSASSLKAVDIPSFEESNIAVEEEFNQPLSVSNGQLAESVSMCLQTGPTGGASNNSETSEEPKIEHVMQPLLHQPSDNQKIYQDLLGQVNHLLNSSSKETEQPSTKAVIISHECTRTQNVYHTKKKTHHSRLVDKDCVLNATLKQLRSLGVKIDSPTKVKKNAHNVDHASVLACISPEAVISGLNCMSFANVGMSGLSPNGVDLSMEANAIALKYLNENQLSQLSVTRSNQNNCDPFSLLHINTDRSTVGLSLISPNNMSFATKKYMKRYGLLQSSDNSEDEEEPPDNADSKSEYLLNQNLRSIPEQLGGQKEPSKNDHEIINCSNCESVGTNADTPVLRNITNEVLQTKAKQQLTEKPAFLVKNLKPSPAVNLRTGKAEFTQHPEKENEGDITIFPESLQPSETLKQMNSMNSVGTFLDVKRLRQLPKLF

SEQ ID NO: 11875 - protein, 1006 aa, Homo sapiens
MSAYYRNNWSEEDPDYPDYSGSQNRTQGYLKTQGYPDVPGPLNNPDYPGTRSNPYSVASRTRPDYPGSLAEPNYPRSLSNPDYSGTRSNAYSAASRTSPDHPTSLPEPDYSEFQSHPYHRASSRQPDYPGSQRNPDFAGSSSSGNYAGSRTHPDHFGSLEPDYPGAQSNSDHPGPRANLNHPGSRKNLEHTSFRINPYADSLGKPDYPGADIQPNSPPFFGEPDYPSAEDNQNLPSTWREPDYSDAENGHDYGSSETPKMTRGVLSRTSSIQPSFRHRSDDPVGSLWGENDYPEGIEMASMEMANSYGHSLPGAPGSGYVNPAYVGESGPVHAYGNPPLSECDWHKSPQGQKLIASLIPMTSRDRIKAIRNQPRTMEEKRNLRKIVDKEKSKQTHRILQLNCCIQCLNSISRAYRRSKNSLSEILNSISLWQKTLKIIGGKFGTSVLSYFNFLRWLLKFNIFSFILNFSFIIIPQFTVAKKNTLQFTGLEFFTGVGYFRDTVMYYGFYTNSTIQHGNSGASYNMQLAYIFTIGACLTTCFFSLLFSMAKYFRNNFINPHIYSGGITKLIFCWDFTVTHEKAVKLKQKNLSTEIRENLSELRQENSKLTFNQLLTRFSAYMVAWVVSTGVAIACCAAVYYLAEYNLEFLKTHSNPGAVLLLPFVVSCINLAVPCIYSMFRLVERYEMPRHEVYVLLIRNIFLKISIIGILCYYWLNTVALSGEECWETLIGQDIYRLLLMDFVFSLVNSFLGEFLRRIIGMQLITSLGLQEFDIARNVLELIYAQTLVWIGIFFCPLLPFIQMIMLFIMFYSKNISLMMNFQPPSKAWRASQMMTFFIFLLFFPSFTGVLCTLAITIWRLKPSADCGPFRGLPLFIHSIYSWIDTLSTRPGYLWVVWIYRNLIGSVHFFFILTLIVLIITYLYWQITEGRKIMIRLLHEQIINEGKDKMFLIEKLIKLQDMEKKANPSSLVLERREVEQQGFLHLGEHDGSLDLRSRRSVQEGNPRA

SEQ ID NO: 11876 - protein, 1349 aa, Homo sapiens
MNCCRTLRELEIQVGEKVFKNIKTVMKAFELIDVNKTGLVRPQELRRVLETFCMKLRDEEYEKFSKHYNIHKDTAVDYNVFLKNLSINNDLNLRYCMGNQEVSLENQQAKNSKKERLLGSASSEDIWRNYSLDEIERNFCLQLSKSYEKVEKALSAGDPCKGGYVSFNYLKIVLDTFVYQIPRRIFIQLMKRFGLKATTKINWKQFLTSFHEPQGLQVSSKGPLTKRNSINSRNESHKENIITKLFRHTEDHSASLKKALLIINTKPDGPITREEFRYILNCMAVKLSDSEFKELMQMLDPGDTGVVNTSMFIDLIEENCRMRKTSPCTDAKTPFLLAWDSVEEIVHDTITRNLQAFYNMLRSYDLGDTGRIGRNNFKKIMHVFCPFLTNAHFIKLCSKIQDIGSGRILYKKLLACIGIDGPPTVSPVLVPKDQLLSEHLQKDEQQQPDLSERTKLTEDKTTLTKKMTTEEVIEKFKKCIQQQDPAFKKRFLDFSKEPNGKINVHDFKKVLEDTGMPMDDDQYALLTTKIGFEKEGMSYLDFAAGFEDPPMRGPETTPPQPPTPSKSYVNSHFITAEECLKLFPRRLKESFRDPYSAFFKTDADRDGIINMHDLHRLLLHLLLNLKDDEFERFLGLLGLRLSVTLNFREFQNLCEKRPWRTDEAPQRLIRPKQKVADSELACEQAHQYLVTKAKNRWSDLSKNFLETDNEGNGILRRRDIKNALYGFDIPLTPREFEKLWARYDTEGKGHITYQEFLQKLGINYSPAVHRPCAEDYFNFMGHFTKPQQLQEEMKELQQSTEKAVAARDKLMDRHQDISKAFTKTDQSKTNYISICKMQEVLEECGCSLTEGELTHLLNSWGVSRHDNAINYLDFLRAVENSKSTGAQPKEKEESMPINFATLNPQEAVRKIQEVVESSQLALSTAFSALDKEDTGFVKATEFGQVLKDFCYKLTDNQYHYFLRKLRIHLTPYINWKYFLQNFSCFLEETADEWAEKMPKGPPPTSPKATADRDILARLHKAVTSHYHAITQEFENFDTMKTNTISREEFRAICNRRVQILTDEQFDRLWNEMPVNAKGRLKYPDFLSRFSSETAATPMATGDSAVAQRGSSVPDVSEGTRSALSLPTQELRPGSKSQSHPCTPASTTVIPGTPPLQNCDPIESRLRKRIQGCWRQLLKECKEKDVARQGDINASDFLALVEKFNLDISKEECQQLIIKYDLKSNGKFAYCDFIQSCVLLLKAKESSLMHRMKIQNAHKMKEAGAETPSFYSALLRIQPKIVHCWRPMRRTFKSYDEAGTGLLSVADFRTVLRQYSINLSEEEFFHILEYYDKTLSSKISYNDFLRAFLQ

SEQ ID NO: 11877 - protein, 1071 aa, Homo sapiens
MHSLPGVVAVGYINEAIDEGNPLRTLETLLLPTANISDVDPAHAQHYQDVLYHAKSQKLGDSESVSKVLWLDEIQQAVDDANVDKDRAKQWVTLVVDVNQCLEGKKSSDILSVLKSSTSNANDIIPECADKYYDALVKAKELKSERVSSDGSWLKLNLHKKYDYYYNTDSKESSWVTPESCLYKESWLTGKEIEAFWKGYKQRKEYMHRRQTFIDNTDSIVKIQSWFRMATARKSYLSRLQYFRDHNNEIVKIQSLLRANKARDDYKTLVGSENPPLTVIRKFVYLLDQSDLDFQEELEVARLREEVVTKIRANQQLEKDLNLMDIKIGLLVKNRITLEDVISHSKKLNKKKGGEMEILNNTDNQGIKSLSKERRKTLETYQQLFYLLQTNPLYLAKLIFQMPQNKSTKFMDTVIFTLYNYASNQREEYLLLKLFKTALEEEIKSKVDQVQDIVTGNPTVIKMVVSFNRGARGQNTLRQLLAPVVKEIIDDKSLIINTNPVEVYKAWVNQLETQTGEASKLPYDVTTEQALTYPEVKNKLEASIENLRRVTDKVLNSIISSLDLLPYGLRYIAKVLKNSIHEKFPDATEDELLKIVGNLLYYRYMNPAIVAPDGFDIIDMTAGGQINSDQRRNLGSVAKVLQHAASNKLFEGENEHLSSMNNYLSETYQEFRKYFKEACNVPEPEEKFNMDKYTDLVTVSKPVIYISIEEIISTHSLLLEHQDAIAPEKNDLLSELLGSLGEVPTVESFLGEGAVDPNDPNKANTLSQLSKTEISLVLTSKYDIEDGEAIDSRSLMIKTKKLIIDVIRNQPGNTLTEILETPATAQQEVDHATDMVSRAMIDSRTPEEMKHSQSMIEDAQLPLEQKKRKIQRNLRTLEQTGHVSSENKYQDILNEIAKDIRNQRIYRKLRKAELAKLQQTLNALNKKAAFYEEQINYYDTYIKTCLDNLKRKNTRRSIKLDGKGEPKGAKRAKPVKYTAAKLHEKGVLLDIDDLQTNQFKNVTFDIIATEDVGIFDVRSKFLGVEMEKVQLNIQDLLQMQYEGVAVMKMFDKVKVNVNLLIYLLNKKFYGK

SEQ ID NO: 11878 - protein, 1121 aa, Homo sapiens
MADTQTQVAPTPTMRMATAEDLPLPPPPALEDLPLPPPKESFSKFHQQRQASELRRLYRHIHPELRKNLAEAVAEDLAEVLGSEEPTEGDVQCMRWIFENWRLDAIGEHERPAAKEPVLCGDVQATSRKFEEGSFANSTDQEPTRPQPGGGDVRAARWLFETKPLDELTGQAKELEATVREPAASGDVQGTRMLFETRPLDRLGSRPSLQEQSPLELRSEIQELKGDVKKTVKLFQTEPLCAIQDAEGAIHEVKAACREEIQSNAVRSARWLFETRPLDAINQDPSQVRVIRGISLEEGARPDVSATRWIFETQPLDAIREILVDEKDFQPSPDLIPPGPDVQQQQHLFETRALDTLKGDEEAGAEAPPKEEVVPGDVRSTLWLFETKPLDAFRDKVQVGHLQRVDPQDGEGHLSSDSSSALPFSQSAPQRDELKGDVKTFKNLFETLPLDSIGQGEVLAHGSPSREEGTDSAGQAQGIGSPVYAMQDSKGRLHALTSVSREQIVGGDVQGYRWMFETQPLDQLGRSPSTIDVVRGITRQEVVAGDVGTARWLFETQPLEMIHQREQQERQKEEGKSQGDPQPEAPPKGDVQTIRWLFETCPMSELAEKQGSEVTDPTAKAEAQSCTWMFKPQPVDRPVGSREQHLQVSQVPAGERQTDRHVFETEPLQASGRPCGRRPVRYCSRVEIPSGQVSRQKEVFQALEAGKKEEQEPRVIAGSIPAGSVHKFTWLFENCPMGSLAAESIQGGNLLEEQPMSPSGNRMQESQETAAEGTLRTLHATPGILHHGGILMEARGPGELCLAKYVLSGTGQGHPYIRKEELVSGELPRIICQVLRRPDVDQQGLLVQEDPTGQLQLKPLRLPTPGSSGNIEDMDPELQQLLACGLGTSVARTGLVMQETEQGLVALTAYSLQPRLTSKASERSSVQLLASCIDKGDLSGLHSLRWEPPADPSPVPASEGAQSLHPTESIIHVPPLDPSMGMGHLRASGATPCPPQAIGKAVPLAGEAAAPAQLQNTEKQEDSHSGQKGMAVLGKSEGATTTPPGPGAPDLLAAMQSLRMATAEAQSLHQQVLNKHKQGPTPTATSNPIQDGLRKAGATQSNIRPGGGSDPRIPAAPRKLL

SEQ ID NO: 11879 - protein, 455 aa, Homo sapiens
MEGVLYKWTNYLSGWQPRWFLLCGGILSYYDSPEDAWKGCKGSIQMAVCEIQVHSVDNTRMDLIIPGEQYFYLKARSVAERQRWLVALGSAKACLTDSRTQKEKEFAENTENLKTKMSELRLYCDLLVQQVDKTKEVTTTGVSNSEEGIDVGTLLKSTCNTFLKTLEECMQIANAAFTSELLYRTPPGSPQLAMLKSSKMKHPIIPIHNSLERQMELSTCENGSLNMEINGEEEILMKNKNSLYLKSAEIDCSISSEENTDDNITVQGEIRKEDGMENLKNHDNNLTQSGSDSSCSPECLWEEGKEVIPTFFSTMNTSFSDIELLEDSGIPTEAFLASCYAVVPVLDKLGPTVFAPVKMDLVGNIKKVNQKYITNKEEFTTLQKIVLHEVEADVAQVRNSATEALLWLKRGLKFLKGFLTEVKNGEKDIQTALNNAYGKTLRQHHGWVVRGVFAV

SEQ ID NO: 11880 - protein, 439 aa, Homo sapiens
MEGVLYKWTNYLSGWQPRWFLLCGGILSYYDSPEDAWKGCKGSIQMAVCEIQVHSVDNTRMDLIIPGEQYFYLKARSVAERQRWLVALGSAKACLTDSRTQKEKEFAENTENLKTKMSELRLYCDLLVQQVDKTKEVTTTGVSNSEEGIDVGTLLKSTCNTFLKTLEECMQIANAAFTSELLYRTPPGSPQLAMLKSSKMKHPIIPIHNSLERQMELSTCENGSLNMEINGEEEILMKNKNSLYLKSAEIDCSISSEENTDDNITVQGEIRKEDGMENLKNHDNNLTQSGSDSSCSPECLWEEGKEVIPTFFSTMNTSFSDIELLEDSGIPTEAFLASCYAVVPVLDKLGPTVFAPVKMDLVGNIKKVNQKYITNKEEFTTLQKIVLHEVEADVAQVRNSATEALLWLKRGLKFLKGFLTEVKNGEKDIQTALSVGMWV

SEQ ID NO: 11881 - protein, 729 aa, Homo sapiens
MFPPSGSTGLIPPSHFQARPLSTLPRMAPTWLSDIPLVQPPGHQDVSERRLDTQRPQVTMWERDVSSDRQEPGRRGRSWGLEGSQALSQQAEVIVRQLQELRRLEEEVRLLRETSLQQKMRLEAQAMELEALARAEKAGRAEAEGLRAALAGAEVVRKNLEEGSQRELEEVQRLHQEQLSSLTQAHEEALSSLTSKAEGLEKSLSSLETRRAGEAKELAEAQREAELLRKQLSKTQEDLEAQVTLVENLRKYVGEQVPSEVHSQTWELERQKLLETMQHLQEDRDSLHATAELLQVRVQSLTHILALQEEELTRKVQPSDSLEPEFTRKCQSLLNRWREKVFALMVQLKAQELEHSDSVKQLKGQVASLQEKVTSQSQEQAILQRSLQDKAAEVEVERMGAKGLQLELSRAQEARRRWQQQTASAEEQLRLVVNAVSSCPLPPPVTDVSLELQQLREERNRLDAELQLSARLIQQEVGRAREQGEAERQQLSKVAQQLEQELQQTQESLASLGLQLEVARQGQQESTEEAASLRQELTQQQELYGQALQEKVAEVETRLREQLSDTERRLNEARREHAKAVVSLRQIQRRAAQEKERSQELRRLQEEARKEEGQRLARRLQELERDKNLMLATLQQEGLLSRYKQQRLLTVLPSLLDKKKSVVSSPRPPECSASAPVAAAVPTRESIKGSLSVLLDDLQDLSEAISKEEAVCQGDNLDRCSSSNPQMSS

SEQ ID NO: 11882 - protein, 871 aa, Homo sapiens
MWPHSAGARPWASTLTGKDPRVMACWCLDGLPSGLAEPWRELWRWRSRPLHCVPPFSPLARSSRDHRNLRRRGNIDGWRQNLEPSNNVEMFPPSGSTGLIPPSHFQARPLSTLPRMAPTWLSDIPLVQPPGHQDVSERRLDTQRPQVTMWERDVSSDRQEPGRRGRSWGLEGSQALSQQAEVIVRQLQELRRLEEEVRLLRETSLQQKMRLEAQAMELEALARAEKAGRAEAEGLRAALAGAEVVRKNLEEGSQRELEEVQRLHQEQLSSLTQAHEEALSSLTSKAEGLEKSLSSLETRRAGEAKELAEAQREAELLRKQLSKTQEDLEAQVTLVENLRKYVGEQVPSEVHSQTWELERQKLLETMQHLQEDRDSLHATAELLQVRVQSLTHILALQEEELTRKVQPSDSLEPEFTRKCQSLLNRWREKVFALMVQLKAQELEHSDSVKQLKGQVASLQEKVTSQSQEQAILQRSLQDKAAEVEVERMGAKGLQLELSRAQEARRRWQQQTASAEEQLRLVVNAVSSSQIWLETTMAKVEGAAAQLPSLNNRLSYAVRKVHTIRGLIARKLALAQLRQESCPLPPPVTDVSLELQQLREERNRLDAELQLSARLIQQEVGRAREQGEAERQQLSKVAQQLEQELQQTQESLASLGLQLEVARQGQQESTEEAASLRQELTQQQELYGQALQEKVAEVETRLREQLSDTERRLNEARREHAKAVVSLRQIQRRAAQEKERSQELRRLQEEARKEEGQRLARRLQELERDKNLMLATLQQEGLLSRYKQQRLLTVLPSLLDKKKSVVSSPRPPECSASAPVAAAVPTRESIKGSLSVLLDDLQDLSEAISKEEAVCQGDNLDRCSSSNPQMSS

SEQ ID NO: 11883 - protein, 525 aa, Homo sapiens
MLFLSFHAGSWESWCCCCLIPADRPWDRGQHWQLEMADTRSVHETRFEAAVKVIQSLPKNGSFQPTNEMMLKFYSFYKQATEGPCKLSRPGFWDPIGRYKWDAWSSLGDMTKEEAMIAYVEEMKKIIETMPMTEKVEELLRVIGPFYEIVEDKKSGRSSDITSDLGNVLTSTPNAKTVNGKAESSDSGAESEEEEAQEEVKGAEQSDNDKKMMKKSADHKNLEVIVTNGYDKDGFVQDIQNDIHASSSLNGRSTEEVKPIDENLGQTGKSAVCIHQDINDDHVEDVTGIQHLTSDSDSEVYCDSMEQFGQEESLDSFTSNNGPFQYYLGGHSSQPMENSGFREDIQVPPGNGNIGNMQVVAVEGKGEVKHGGEDGRNNSGAPHREKRGGETDEFSNVRRGRGHRMQHLSEGTKGRQVGSGGDGERWGSDRGSRGSLNEQIALVLMRLQEDMQNVLQRLQKLETLTALQAKSSTSTLQTAPQPTSQRPSWWPFEMSPGVLTFAIIWPFIAQWLVYLYYQRRRRKLN

SEQ ID NO: 11884 - protein, 376 aa, Homo sapiens
MTITRDEYPSNPMVLRGINQKAAFPQYQPVVMLEKGYTIHWNGPAPRTTFLYLVNFNKNDWIRVGLCYPSNTSFQVTFGYLQRQNGSLSKIEEYEPVHSLEELQRKQSERKFYFDSSTGLLFLYLKAKSHRHGHSYCSSQGCERVKIQAATDSKDISNCMAKAYPQYYRKPSVVKRMPAMLTGLCQGCGTRQVVFTSDPHKSYLPVQFQSPDKAETQRGDPSVISVNGTDFTFRSAGVLLLVVDPCSVPFRLTEKTVFPLADVSRIEEYLKTGIPPRSIVLLSTRGEIKQLNISHLLVPLGLAKPAHLYDKGSTIFLGFSGNFKPSWTKLFTSPAGQGLGVLEQFIPLQLDEYGCPRATTVRRRDLELLKQASKAH

SEQ ID NO: 11885 - protein, 322 aa, Homo sapiens
MDSTIPVLGTELTPINGREETPCYKQTLSFTGLTCIVSLVALTGNAVVLWLLGCRMRRNAVSIYILNLVAADFLFLSGHIICSPLRLINIRHPISKILSPVMTFPYFIGLSMLSAISTERCLSILWPIWYHCRRPRYLSSVMCVLLWALSLLRSILEWMFCDFLFSGANSVWCETSDFITIAWLVFLCVVLCGSSLVLLVRILCGSRKMPLTRLYVTILLTVLVFLLCGLPFGIQWALFSRIHLDWKVLFCHVHLVSIFLSALNSSANPIIYFFVGSFRQRQNRQNLKLVLQRALQDTPEVDEGGGWLPQETLELSGSRLEQ

SEQ ID NO: 11886 - protein, 1556 aa, Homo sapiens
MYVRVSFDTKPDLLLHLMTKEWQLELPKLLISVHGGLQNFELQPKLKQVFGKGLIKAAMTTGAWIFTGGVNTGVIRHVGDALKDHASKSRGKICTIGIAPWGIVENQEDLIGRDVVRPYQTMSNPMSKLTVLNSMHSHFILADNGTTGKYGAEVKLRRQLEKHISLQKINTRIGQGVPVVALIVEGGPNVISIVLEYLRDTPPVPVVVCDGSGRASDILAFGHKYSEEGGLINESLRDQLLVTIQKTFTYTRTQAQHLFIILMECMKKKELITVFRMGSEGHQDIDLAILTALLKGANASAPDQLSLALAWNRVDIARSQIFIYGQQWPVGSLEQAMLDALVLDRVDFVKLLIENGVSMHRFLTISRLEELYNTRHGPSNTLYHLVRDVKKREYPGFGWIYFKGNLPPDYRISLIDIGLVIEYLMGGAYRCNYTRKRFRTLYHNLFGPKRDDIPLRRGRKTTKKREEEVDIDLDDPEINHFPFPFHELMVWAVLMKRQKMALFFWQHGEEAMAKALVACKLCKAMAHEASENDMVDDISQELNHNSRDFGQLAVELLDQSYKQDEQLAMKLLTYELKNWSNATCLQLAVAAKHRDFIAHTCSQMLLTDMWMGRLRMRKNSGLKVILGILLPPSILSLEFKNKDDMPYMSQAQEIHLQEKEAEEPEKPTKEKEEEDMELTAMLGRNNGESSRKKDEEEVQSKHRLIPLGRKIYEFYNAPIVKFWFYTLAYIGYLMLFNYIVLVKMERWPSTQEWIVISYIFTLGIEKMREILMSEPGKLLQKVKVWLQEYWNVTDLIAILLFSVGMILRLQDQPFRSDGRVIYCVNIIYWYIRLLDIFGVNKYLGPYVMMIGKMMIDMMYFVIIMLVVLMSFGVARQAILFPNEEPSWKLAKNIFYMPYWMIYGEVFADQIDPPCGQNETREDGKIIQLPPCKTGAWIVPAIMACYLLVANILLVNLLIAVFNNTFFEVKSISNQVWKFQRYQLIMTFHERPVLPPPLIIFSHMTMIFQHLCCRWRKHESDPDERDYGLKLFITDDELKKVHDFEEQCIEEYFREKDDRFNSSNDERIRVTSERVENMSMRLEEVNEREHSMKASLQTVDIRLAQLEDLIGRMATALERLTGLERAESNKIRSRTSSDCTDAAYIVRQSSFNSQEGNTFKLQESIDPAGEETMSPTSPTLMPRMRSHSFYSVNMKDKGGIEKLESIFKERSLSLHRATSSHSVAKEPKAPAAPANTLAIVPDSRRPSSCIDIYVSAMDELHCDIDPLDNSVNILGLGEPSFSTPVPSTAPSSSAYATLAPTDRPPSRSIDFEDITSMDTRSFSSDYTHLPECQNPWDSEPPMYHTIERSKSSRYLATTPFLLEEAPIVKSHSFMFSPSRSYYANFGVPVKTAEYTSITDCIDTRCVNAPQAIADRAAFPGGLGDKVEDLTCCHPEREAELSHPSSDSEENEAKGRRATIAISSQEGDNSERTLSNNITVPKIERANSYSAEEPSAPYAHTRKSFSISDKLDRQRNTASLRNPFQRSKSSKPEGRGDSLSMRRLSRTSAFQSFESKHN

SEQ ID NO: 11887 - protein, 1186 aa, Homo sapiens
MFSSLQKSFNLAEEEIKTEQEVVEGMDISTRSKDPGSAERTAQKRKFPSPPHSSNGHSPQDTSTSPIKKKKKPGLLNSNNKEQDGRNDFYCWVCHREGQVLCCELCPRVYHAKCLRLTSEPEGDWFCPECEKITVAECIETQSKAMTMLTIEQLSYLLKFAIQKMKQPGTDAFQKPVPLEQHPDYAEYIFHPMDLCTLEKNAKKKMYGCTEAFLADAKWILHNCIIYNGGNHKLTQIAKVVIKICEHEMNEIEVCPECYLAACQKRDNWFCEPCSNPHPLVWAKLKGFPFWPAKALRDKDGQVDARFFGQHDRAWVPINNCYLMSKEIPFSVKKTKSIFNSAMQEMEVYVENIRRKFGVFNYSPFRTPYTPNSQYQMLLDPTNPSAGTAKIDKQEKVKLNFDMTASPKILMSKPVLSGGTGRRISLSDMPRSPMSTNSSVHTGSDVEQDAEKKATSSHFSASEESMDFLDKSTASPASTKTGQAGSLSGSPKPFSPQLSAPITTKTDKTSTTGSILNLNLDRSKAEMDLKELSESVQQQSTPVPLISPKRQIRSRFQLNLDKTIESCKAQLGINEISEDVYTAVEHSDSEDSEKSDSSDSEYISDDEQKSKNEPEDTEDKEGCQMDKEPSAVKKKPKPTNPVEIKEELKSTSPASEKADPGAVKDKASPEPEKDFSEKAKPSPHPIKDKLKGKDETDSPTVHLGLDSDSESELVIDLGEDHSGREGRKNKKEPKEPSPKQDVVGKTPPSTTVGSHSPPETPVLTRSSAQTSAAGATATTSTSSTVTVTAPAPAATGSPVKKQRPLLPKETAPAVQRVVWNSSSKFQTSSQKWHMQKMQRQQQQQQQQNQQQQPQSSQGTRYQTRQAVKAVQQKEITQSPSTSTITLVTSTQSSPLVTSSGSMSTLVSSVNADLPIATASADVAADIAKYTSKMMDAIKGTMTEIYNDLSKNTTGSTIAEIRRLRIEIEKLQWLHQQELSEMKHNLELTMAEMRQSLEQERDRLIAEVKKQLELEKQQAVDETKKKQWCANCKKEAIFYCCWNTSYCDYPCQQAHWPEHMKSCTQSATAPQQEADAEVNTETLNKSSQGSSSSTQSAPSETASASKEKETSAEKSKESGSTLDLSGSRETPSSILLGSNQGSDHSRSNKSSWSSSDEKRGSTRSDHNTSTSTKSLLPKESRLDTFWD

SEQ ID NO: 11888 - protein, 275 aa, Homo sapiens
MYVRVSFDTKPDLLLHLMTKEWQLELPKLLISVHGGLQNFELQPKLKQVFGKGLIKAAMTTGAWIFTGGVNTGVIRHVGDALKDHASKSRGKICTIGIAPWGIVENQEDLIGRDVVRPYQTMSNPMSKLTVLNSMHSHFILADNGTTGKYGAEVKLRRQLEKHISLQKINTRCLPFFSLDSRLFYSFWGSCQLDSVGIGQGVPVVALIVEGGPNVISIVLEYLRDTPPVPVVVCDGSGRASDILAFGHKYSEEGGSKYITNLKRERKKEEESKGI

SEQ ID NO: 11889 - protein, 1566 aa, Homo sapiens
MYVRVSFDTKPDLLLHLMTKEWQLELPKLLISVHGGLQNFELQPKLKQVFGKGLIKAAMTTGAWIFTGGVNTGVIRHVGDALKDHASKSRGKICTIGIAPWGIVENQEDLIGRDVVRPYQTMSNPMSKLTVLNSMHSHFILADNGTTGKYGAEVKLRRQLEKHISLQKINTRIGQGVPVVALIVEGGPNVISIVLEYLRDTPPVPVVVCDGSGRASDILAFGHKYSEEGGLINESLRDQLLVTIQKTFTYTRTQAQHLFIILMECMKKKELITVFRMGSEGHQDIDLAILTALLKGANASAPDQLSLALAWNRVDIARSQIFIYGQQWPVGSLEQAMLDALVLDRVDFVKLLIENGVSMHRFLTISRLEELYNTRHGPSNTLYHLVRDVKKGNLPPDYRISLIDIGLVIEYLMGGAYRCNYTRKRFRTLYHNLFGPKRPKALKLLGMEDDIPLRRGRKTTKKREEEVDIDLDDPEINHFPFPFHELMVWAVLMKRQKMALFFWQHGEEAMAKALVACKLCKAMAHEASENDMVDDISQELNHNSRDFGQLAVELLDQSYKQDEQLAMKLLTYELKNWSNATCLQLAVAAKHRDFIAHTCSQMLLTDMWMGRLRMRKNSGLKVILGILLPPSILSLEFKNKDDMPYMSQAQEIHLQEKEAEEPEKPTKEKEEEDMELTAMLGRNNGESSRKKDEEEVQSKHRLIPLGRKIYEFYNAPIVKFWFYTLAYIGYLMLFNYIVLVKMERWPSTQEWIVISYIFTLGIEKMREILMSEPGKLLQKVKVWLQEYWNVTDLIAILLFSVGMILRLQDQPFRSDGRVIYCVNIIYWYIRLLDIFGVNKYLGPYVMMIGKMMIDMMYFVIIMLVVLMSFGVARQAILFPNEEPSWKLAKNIFYMPYWMIYGEVFADQIDRKQVYDSHTPKSAPCGQNETREDGKIIQLPPCKTGAWIVPAIMACYLLVANILLVNLLIAVFNNTFFEVKSISNQVWKFQRYQLIMTFHERPVLPPPLIIFSHMTMIFQHLCCRWRKHESDPDERDYGLKLFITDDELKKVHDFEEQCIEEYFREKDDRFNSSNDERIRVTSERVENMSMRLEEVNEREHSMKASLQTVDIRLAQLEDLIGRMATALERLTGLERAESNKIRSRTSSDCTDAAYIVRQSSFNSQEGNTFKLQESIDPAGEETMSPTSPTLMPRMRSHSFYSVNMKDKGGIEKLESIFKERSLSLHRATSSHSVAKEPKAPAAPANTLAIVPDSRRPSSCIDIYVSAMDELHCDIDPLDNSVNILGLGEPSFSTPVPSTAPSSSAYATLAPTDRPPSRSIDFEDITSMDTRSFSSDYTHLPECQNPWDSEPPMYHTIERSKSSRYLATTPFLLEEAPIVKSHSFMFSPSRSYYANFGVPVKTAEYTSITDCIDTRCVNAPQAIADRAAFPGGLGDKVEDLTCCHPEREAELSHPSSDSEENEAKGRRATIAISSQEGDNSERTLSNNITVPKIERANSYSAEEPSAPYAHTRKSFSISDKLDRQRNTASLRNPFQRSKSSKPEGRGDSLSMRRLSRTSAFQSFESKHN

SEQ ID NO: 11890 - protein, 1579 aa, Homo sapiens
MYVRVSFDTKPDLLLHLMTKEWQLELPKLLISVHGGLQNFELQPKLKQVFGKGLIKAAMTTGAWIFTGGVNTGVIRHVGDALKDHASKSRGKICTIGIAPWGIVENQEDLIGRDVVRPYQTMSNPMSKLTVLNSMHSHFILADNGTTGKYGAEVKLRRQLEKHISLQKINTRCLPFFSLDSRLFYSFWGSCQLDSVGIGQGVPVVALIVEGGPNVISIVLEYLRDTPPVPVVVCDGSGRASDILAFGHKYSEEGGLINESLRDQLLVTIQKTFTYTRTQAQHLFIILMECMKKKELITVFRMGSEGHQDIDLAILTALLKGANASAPDQLSLALAWNRVDIARSQIFIYGQQWPVGSLEQAMLDALVLDRVDFVKLLIENGVSMHRFLTISRLEELYNTRHGPSNTLYHLVRDVKKGNLPPDYRISLIDIGLVIEYLMGGAYRCNYTRKRFRTLYHNLFGPKRPKALKLLGMEDDIPLRRGRKTTKKREEEVDIDLDDPEINHFPFPFHELMVWAVLMKRQKMALFFWQHGEEAMAKALVACKLCKAMAHEASENDMVDDISQELNHNSRDFGQLAVELLDQSYKQDEQLAMKLLTYELKNWSNATCLQLAVAAKHRDFIAHTCSQMLLTDMWMGRLRMRKNSGLKVILGILLPPSILSLEFKNKDDMPYMSQAQEIHLQEKEAEEPEKPTKEKEEEDMELTAMLGRNNGESSRKKDEEEVQSKHRLIPLGRKIYEFYNAPIVKFWFYTLAYIGYLMLFNYIVLVKMERWPSTQEWIVISYIFTLGIEKMREILMSEPGKLLQKVKVWLQEYWNVTDLIAILLFSVGMILRLQDQPFRSDGRVIYCVNIIYWYIRLLDIFGVNKYLGPYVMMIGKMMIDMMYFVIIMLVVLMSFGVARQAILFPNEEPSWKLAKNIFYMPYWMIYGEVFADQIDPPCGQNETREDGKIIQLPPCKTGAWIVPAIMACYLLVANILLVNLLIAVFNNTFFEVKSISNQVWKFQRYQLIMTFHERPVLPPPLIIFSHMTMIFQHLCCRWRKHESDPDERDYGLKLFITDDELKKVHDFEEQCIEEYFREKDDRFNSSNDERIRVTSERVENMSMRLEEVNEREHSMKASLQTVDIRLAQLEDLIGRMATALERLTGLERAESNKIRSRTSSDCTDAAYIVRQSSFNSQEGNTFKLQESIDPAGEETMSPTSPTLMPRMRSHSFYSVNMKDKGGIEKLESIFKERSLSLHRATSSHSVAKEPKAPAAPANTLAIVPDSRRPSSCIDIYVSAMDELHCDIDPLDNSVNILGLGEPSFSTPVPSTAPSSSAYATLAPTDRPPSRSIDFEDITSMDTRSFSSDYTHLPECQNPWDSEPPMYHTIERSKSSRYLATTPFLLEEAPIVKSHSFMFSPSRSYYANFGVPVKTAEYTSITDCIDTRCVNAPQAIADRAAFPGGLGDKVEDLTCCHPEREAELSHPSSDSEENEAKGRRATIAISSQEGDNSERTLSNNITVPKIERANSYSAEEPSAPYAHTRKSFSISDKLDRQRNTASLRNPFQRSKSSKPEGRGDSLSMRRLSRTSAFQSFESKHN

SEQ ID NO: 11891 - protein, 285 aa, Homo sapiens
MAKMELSKAFSGQRTLLSAILSMLSLSFSTTSLLSNYWFVGTQKVPKPLCEKGLAAKCFDMPVSLDGDTNTSTQEVVQYNWETGDDRFSFRSFRSGMWLSCEETVEEPGERCRSFIELTPPAKRGEKGLLEFATLQGPCHPTLRFGGKRLMEKASLPSPPLGLCGKNPMVIPGNADHLHRTSIHQLPPATNRLATHWEPCLWAQTERLCCCFLCPVRSPGDGGPHDVFTSLPSDCQLGSRRLETTCLELWLGLLHGLALLHLLHGVGCHHLQHVHQDGAGVQVQA

SEQ ID NO: 11892 - protein, 634 aa, Homo sapiens
MTPILTVLICLGLSLGPRTHVQAGHLPKPTLWAEPGSVITQGSPVTLRCQGGQETQEYRLYREKKTAPWITRIPQELVKKGQFPIPSITWEHTGRYRCYYGSDTAGRSESSDPLELVVTGAYIKPTLSAQPSPVVNSGGNVTLQCDSQVAFDGFILCKEGEDEHPQCLNSQPHARGSSRAIFSVGPVSPSRRWWYRCYAYDSNSPYEWSLPSDLLELLVLGVSKKPSLSVQPGPIVAPEETLTLQCGSDAGYNRFVLYKDGERDFLQLAGAQPQAGLSQANFTLGPVSRSYGGQYRCYGAHNLSSEWSAPSDPLDILIAGQFYDRVSLSVQPGPTVASGENVTLLCQSQGWMQTFLLTKEGAADDPWRLRSTYQSQKYQAEFPMGPVTSAHAGTYRCYGSQSSKPYLLTHPSDPLELVVSAGPEDQPLTPTGSDPQSGLGRHLGVVIGILVAVILLLLLLLLLFLILRHRRQGKHWTSTQRKADFQHPAGAVGPEPTDRGLQWRSSPAADAQEENLYAAVKHTQPEDGVEMDTRSPHDEDPQAVTYAEVKHSRPRREMASPPSPLSGEFLDTKDRQAEEDRQMDTEAAASEAPQDVTYAQLHSLTLRREATEPPPSQEGPSPAVPSIYATLAIH

SEQ ID NO: 11893 - protein, 789 aa, Homo sapiens
MTSFQEVPLQTSNFAHVIFQNVAKSYLPNAHLECHYTLTPYIHPHPKDWVGIFKVGWSTARDYYTFLWSPMPEHYVEGSTVNCVLAFQGYYLPNDDGEFYQFCYVTHKGEIRGASTPFQFRASSPVEELLTMEDEGNSDMLVVTTKAGLLELKIEKTMKEKEELLKLIAVLEKETAQLREQVGRMERELNHEKERCDQLQAEQKGLTEVTQSLKMENEEFKKRFSDATSKAHQLEEDIVSVTHKAIEKETELDSLKDKLKKAQHEREQLECQLKTEKDEKELYKVHLKNTEIENTKLMSEVQTLKNLDGNKESVITHFKEEIGRLQLCLAEKENLQRTFLLTTSSKEDTCFLKEQLRKAEEQVQATRQEVVFLAKELSDAVNVRDRTMADLHTARLENEKVKKQLADAVAELKLNAMKKDQDKTDTLEHELRREVEDLKLRLQMAADHYKEKFKECQRLQKQINKLSDQSANNNNVFTKKTGNQQKVNDASVNTDPATSASTVDVKPSPSAAEADFDIVTKGQVCEMTKEIADKTEKYNKCKQLLQDEKAKCNKYADELAKMELKWKEQVKIAENVKLELAEVQDNYKELKRSLENPAERKMEGQNSQSPQCFKTCSEQNGYVLTLSNAQPVLQYGNPYASQETRDGADGAFYPDEIQRPPVRVPSWGLEDNVVCSQPARNFSRPDGLEDSEDSKEDENVPTAPDPPSQHLRGHGTGFCFDSSFDVHKKCPLCELMFPPNYDQSKFEEHVESHWKVCPMCSEQFPPDYDQQVFERHVQTHFDQNVLNFD

SEQ ID NO: 11894 - protein, 1979 aa, Homo sapiens
MAQKGQLSDDEKFLFVDKNFINSPVAQADWAAKRLVWVPSEKQGFEAASIKEEKGDEVVVELVENGKKVTVGKDDIQKMNPPKFSKVEDMAELTCLNEASVLHNLRERYFSGLIYTYSGLFCVVVNPYKHLPIYSEKIVDMYKGKKRHEMPPHIYAIADTAYRSMLQDREDQSILCTGESGAGKTENTKKVIQYLAVVASSHKGKKDTSITQGPSFAYGELEKQLLQANPILEAFGNAKTVKNDNSSRFGKFIRINFDVTGYIVGANIETYLLEKSRAIRQARDERTFHIFYYMIAGAKEKMRSDLLLEGFNNYTFLSNGFVPIPAAQDDEMFQETVEAMAIMGFSEEEQLSILKVVSSVLQLGNIVFKKERNTDQASMPDNTAAQKVCHLMGINVTDFTRSILTPRIKVGRDVVQKAQTKEQADFAVEALAKATYERLFRWILTRVNKALDKTHRQGASFLGILDIAGFEIFEVNSFEQLCINYTNEKLQQLFNHTMFILEQEEYQREGIEWNFIDFGLDLQPCIELIERPNNPPGVLALLDEECWFPKATDKSFVEKLCTEQGSHPKFQKPKQLKDKTEFSIIHYAGKVDYNASAWLTKNMDPLNDNVTSLLNASSDKFVADLWKDVDRIVGLDQMAKMTESSLPSASKTKKGMFRTVGQLYKEQLGKLMTTLRNTTPNFVRCIIPNHEKRSGKLDAFLVLEQLRCNGVLEGIRICRQGFPNRIVFQEFRQRYEILAANAIPKGFMDGKQACILMIKALELDPNLYRIGQSKIFFRTGVLAHLEEERDLKITDVIMAFQAMCRGYLARKAFAKRQQQLTAMKVIQRNCAAYLKLRNWQWWRLFTKVKPLLQVTRQEEEMQAKEDELQKTKERQQKAENELKELEQKHSQLTEEKNLLQEQLQAETELYAEAEEMRVRLAAKKQELEEILHEMEARLEEEEDRGQQLQAERKKMAQQMLDLEEQLEEEEAARQKLQLEKVTAEAKIKKLEDEILVMDDQNNKLSKERKLLEERISDLTTNLAEEEEKAKNLTKLKNKHESMISELEVRLKKEEKSRQELEKLKRKLEGDASDFHEQIADLQAQIAELKMQLAKKEEELQAALARLDDEIAQKNNALKKIRELEGHISDLQEDLDSERAARNKAEKQKRDLGEELEALKTELEDTLDSTATQQELRAKREQEVTVLKKALDEETRSHEAQVQEMRQKHAQAVEELTEQLEQFKRAKANLDKNKQTLEKENADLAGELRVLGQAKQEVEHKKKKLEAQVQELQSKCSDGERARAELNDKVHKLQNEVESVTGMLNEAEGKAIKLAKDVASLSSQLQDTQELLQEETRQKLNVSTKLRQLEEERNSLQDQLDEEMEAKQNLERHISTLNIQLSDSKKKLQDFASTVEALEEGKKRFQKEIENLTQQYEEKAAAYDKLEKTKNRLQQELDDLVVDLDNQRQLVSNLEKKQRKFDQLLAEEKNISSKYADERDRAEAEAREKETKALSLARALEEALEAKEELERTNKMLKAEMEDLVSSKDDVGKNVHELEKSKRALETQMEEMKTQLEELEDELQATEDAKLRLEVNMQALKGQFERDLQARDEQNEEKRRQLQRQLHEYETELEDERKQRALAAAAKKKLEGDLKDLELQADSAIKGREEAIKQLRKLQAQMKDFQRELEDARASRDEIFATAKENEKKAKSLEADLMQLQEDLAAAERARKQADLEKEELAEELASSLSGRNALQDEKRRLEARIAQLEEELEEEQGNMEAMSDRVRKATQQAEQLSNELATERSTAQKNESARQQLERQNKELRSKLHEMEGAVKSKFKSTIAALEAKIAQLEEQVEQEAREKQAATKSLKQKDKKLKEILLQVEDERKMAEQYKEQAEKGNARVKQLKRQLEEAEEESQRINANRRKLQRELDEATESNEAMGREVNALKSKLRRGNETSFVPSRRSGGRRVIENADGSEEETDTRDADFNGTKASE

SEQ ID NO: 11895 - protein, 651 aa, Homo sapiens
MTPILTVLICLGLSLGPRTHVQAGHLPKPTLWAEPGSVITQGSPVTLRCQGGQETQEYRLYREKKTAPWITRIPQELVKKGQFPIPSITWEHTGRYRCYYGSDTAGRSESSDPLELVVTGAYIKPTLSAQPSPVVNSGGNVTLQCDSQVAFDGFILCKEGEDEHPQCLNSQPHARGSSRAIFSVGPVSPSRRWWYRCYAYDSNSPYEWSLPSDLLELLVLGVSKKPSLSVQPGPIVAPEETLTLQCGSDAGYNRFVLYKDGERDFLQLAGAQPQAGLSQANFTLGPVSRSYGGQYRCYGAHNLSSEWSAPSDPLDILIAGQFYDRVSLSVQPGPTVASGENVTLLCQSQGWMQTFLLTKEGAADDPWRLRSTYQSQKYQAEFPMGPVTSAHAGTYRCYGSQSSKPYLLTHPSDPLELVVSGPSGGPSSPTTGPTSTSAGPEDQPLTPTGSDPQSGLGRHLGVVIGILVAVILLLLLLLLLFLILRHRRQGKHWTSTQRKADFQHPAGAVGPEPTDRGLQWRSSPAADAQEENLYAAVKHTQPEDGVEMDTRSPHDEDPQAVTYAEVKHSRPRREMASPPSPLSGEFLDTKDRQAEEDRQMDTEAAASEAPQDVTYAQLHSLTLRREATEPPPSQEGPSPAVPSIYATLAIH

SEQ ID NO: 11896 - protein, 650 aa, Homo sapiens
MTPILTVLICLGLSLGPRTHVQAGHLPKPTLWAEPGSVITQGSPVTLRCQGGQETQEYRLYREKKTAPWITRIPQELVKKGQFPIPSITWEHTGRYRCYYGSDTAGRSESSDPLELVVTGAYIKPTLSAQPSPVVNSGGNVTLQCDSQVAFDGFILCKEGEDEHPQCLNSQPHARGSSRAIFSVGPVSPSRRWWYRCYAYDSNSPYEWSLPSDLLELLVLGVSKKPSLSVQPGPIVAPEETLTLQCGSDAGYNRFVLYKDGERDFLQLAGAQPQAGLSQANFTLGPVSRSYGGQYRCYGAHNLSSEWSAPSDPLDILIAGQFYDRVSLSVQPGPTVASGENVTLLCQSQGWMQTFLLTKEGAADDPWRLRSTYQSQKYQAEFPMGPVTSAHAGTYRCYGSQSSKPYLLTHPSDPLELVVSGPSGGPSSPTTGPTSTSGPEDQPLTPTGSDPQSGLGRHLGVVIGILVAVILLLLLLLLLFLILRHRRQGKHWTSTQRKADFQHPAGAVGPEPTDRGLQWRSSPAADAQEENLYAAVKHTQPEDGVEMDTRSPHDEDPQAVTYAEVKHSRPRREMASPPSPLSGEFLDTKDRQAEEDRQMDTEAAASEAPQDVTYAQLHSLTLRREATEPPPSQEGPSPAVPSIYATLAIH

SEQ ID NO: 11897 - protein, 651 aa, Homo sapiens
MTPILTVLICLGLSLGPRTHVQAGHLPKPTLWAEPGSVITQGSPVTLRCQGGQETQEYRLYREKKTAPWITRIPQELVKKGQFPIPSITWEHTGRYRCYYGSDTAGRSESSDPLELVVTGAYIKPTLSAQPSPVVNSGGNVTLQCDSQVAFDGFILCKEGEDEHPQCLNSQPHARGSSRAIFSVGPVSPSRRWWYRCYAYDSNSPYEWSLPSDLLELLVLGVSKKPSLSVQPGPIVAPEETLTLQCGSDAGYNRFVLYKDGERDFLQLAGAQPQAGLSQANFTLGPVSRSYGGQYRCYGAHNLSSEWSAPSDPLDILIAGQFYDRVSLSVQPGPTVASGENVTLLCQSQGWMQTFLLTKEGAADDPWRLRSTYQSQKYQAEFPMGPVTSAHAGTYRCYGSQSSKPYLLTHPSDPLELVVSGPSGGPSSPTTGPTSTSGPEDQPLTPTGSDPQSGLGRHLGVVIGILVAVILLLLLLLLLFLILRHRRQGKHWTSTQRKADFQHPAGAVGPEPTDRGLQWRSSPAADAQEENLYAAVKHTQPEDGVEMDTRQSPHDEDPQAVTYAEVKHSRPRREMASPPSPLSGEFLDTKDRQAEEDRQMDTEAAASEAPQDVTYAQLHSLTLRREATEPPPSQEGPSPAVPSIYATLAIH

SEQ ID NO: 11898 - protein, 300 aa, Homo sapiens
MYKDCIESTGDYFLLCDAEGPWGIILESLAILGIVVTILLLLAFLFLMRKIQDCSQWNVLPTQLLFLLSVLGLFGLAFAFIIELNQQTAPVRYFLFGVLFALCFSCLLAHASNLVKLVRGCVSFSWTTILCIAIGCSLLQIIIATEYVTLIMTRGMMFVNMTPCQLNVDFVVLLVYVLFLMALTFFVSKATFCGPCENWKQHGRLIFITVLFSIIIWVVWISMLLRGNPQFQRQPQWDDPVVCIALVTNAWVFLLLYIVPELCILYRSCRQECPLQGNACPVTAYQHSFQVENQELSRDC

SEQ ID NO: 11899 - protein, 296 aa, Homo sapiens
MAAGGPGAGSAAPVSSTSSLPLAALNMRVRRRLSLFLNVRTQVAADWTALAEEMDFEYLEIRQLETQADPTGRLLDAWQGRPGASVGRLLELLTKLGRDDVLLELGPSIEEDCQKYILKQQQEEAEKPLQVAAVDSSVPRTAELAGITTLDDPLGHMPERFDAFICYCPSDIQFVQEMIRQLEQTNYRLKLCVSDRDVLPGTCVWSIASELIEKRCRRMVVVVSDDYLQSKECDFQTKFALSLSPGAHQKRLIPIKYKAMKKEFPSILRFITVCDYTNPCTKSWFWTRLAKALSLP

SEQ ID NO: 11900 - protein, 205 aa, Homo sapiens
MSNVRVSNGSPSLERMDARQAEHPKPSACRNLFGPVDHEELTRDLEKHCRDMEEASQRKWNFDFQNHKPLEGKYEWQEVEKGSLPEFYYRPPRPPKGACKVPAQESQDVSGSRPAAPLIGAPANSEDTHLVDPKTDPSDSQTGLAEQCAGIRKRPATDDTSLLDEARKIYMKILKIHIADFMEWTSCISTEKQQHNNTKILGTLK

SEQ ID NO: 11901 - protein, 335 aa, Homo sapiens
MEDSGKTFSSEEEEANYWKDLAMTYKQRAENTQEELREFQEGSREYEAELETQLQQIETRNRDLLSENNRLRMELETIKEKFEVQHSEGYRQISALEDDLAQTKAIKDQLQKYIRELEQANDDLERAKRATIMSLEDFEQRLNQAIERNAFLESELDEKENLLESVQRLKDEARDLRQELAVQQKQEKPRTPMPSSVEAERTDTAVQATGSVPSTPIAHRGPSSSLNTPGSFRRGLDDSTGGTPLTPAARISALNIVGDLLRKVGALESKLASCRNLVYDQSPNRTGGPASGRSSKNRDGGERRPSSTSVPLGDKGLDTSCRWLSKSTTRSSSSC

SEQ ID NO: 11902 - protein, 481 aa, Homo sapiens
MTPTLAALLCLGLSLGPRTHVQAGPFPKPTLWAEPGSVISWGSPVTIWCQGSLEAQEYRLDKEGSPEPWDRNNPLEPKNKARFSIPSITEHHAGRYRCHYYSSAGWSEPSDPLELVMTGAYSKPTLSALPSPVVASGGNMTLQCGSQKGYHHFVLMKEGEHQLPRTLDSQQLHSGGFQALFPVGPVNPSHRWRFTCYYYYMNTPRVWSHPSDPLEILPSGVSRKPSLLTLQGPVLAPGQSLTLQCGSDVGYDRFVLYKEGERDFLQRPGQQPQAGLSQANFTLGPVSPSHGGQYRCYGAHNLSSEWSAPSDPLNILMAGQIYDTVSLSAQPGPTVASGENVTLLCQSWWQFDTFLLTKEGAAHPPLRLRSMYGAHKYQAEFPMSPVTSAHAGTYRCYGSYSSNPHLLSFPSEPLELMVSGHSGGSSLPPTGPPSTPASHAKDYTVENLIRMGMAGLVLVFLGILLFEAQHSQRNPQDAAGR

SEQ ID NO: 11903 - protein, 1742 aa, Homo sapiens
MMEGNGTENSCSRTRGWLQQDNDAKPWLWKFSNCFSRPEQTLPHSPQTKEYMENKKVAVELKDVPSPLHAGSKLFPAVPLPDIRSLQQPKIQLSSVPKVSCCAHCPNEPSTSPMRFGGGGGGSGGTSSLIHPGALLDSQSTRTITCQVGSGFAFQSASSLQNASARNNLAGIASDFPSMCLESNLSSCKHLPCCGKLHFQSCHGNVHKLHQFPSLQGCTSAGYFPCSDFTSGAPGHLEEHISQSELTPHLCTNSLHLNVVPPVCLKGSLYCEDCLNKPARNSIIDAAKVWPNIPPPNTQPAPLAVPLCNGCGTKGTGKETTLLLATSLGKAASKFGSPEVAVAGQVLENLPPIGVFWDIENCSVPSGRSATAVVQRIREKFFKGHREAEFICVCDISKENKEVIQELNNCQVTVAHINATAKNAADDKLRQSLRRFANTHTAPATVVLVSTDVNFALELSDLRHRHGFHIILVHKNQASEALLHHANELIRFEEFISDLPPRLPLKMPQCHTLLYVYNLPANKDGKSVSNRLRRLSDNCGGKVLSITGCSAILRFINQDSAERAQKRMENEDVFGNRIIVSFTPKNRELCETKSSNAIADKVKSPKKLKNPKLCLIKDASEQSSSAKATPGKGSQANSGSATKNTNVKSLQELCRMESKTGHRNSEHQQGHLRLVVPTHGNSSAAVSTPKNSGVAEPVYKTSQKKENLSARSVTSSPVEKKDKEETVFQVSYPSAFSKLVASRQVSPLLASQSWSSRSMSPNLLNRASPLAFNIANSSSEADCPDPFANGADVQVSNIDYRLSRKELQQLLQEAFARHGKVKSVELSPHTDYQLKAVVQMENLQDAIGAVNSLHRYKIGSKKILVSLATGAASKSLSLLSAETMSVLQDAPACCLPLFKFTDIYEKKFGHKLNVSDLYKLTDTVAIREQGNGRLVCLLPSSQARQSPLGSSQSHDGSSTNCSPIIFEELEYHEPVCRQHCSNKDFSEHEFDPDSYKIPFVILSLKTFAPQVHSLLQTHEGTVPLLSFPDCYIAEFGDLEVVQENQGGVPLEHFITCVPGVNIATAQNGIKVVKWIHNKPPPPNTDPWLLRSKSPVGNPQLIQFSREVIDLLKSQPSCVIPISHFIPSYHHHFAKQCRVSDYGYSKLIELLEAVPHVLQILGMGSKRLLTLTHRAQVKRFTQDLLKLLKSQASKQVIVREFSQAYHWCFSKDWDVTEYGVCELIDIVSEIPDTTICLSQQDNEMVICIPKRERTQDEIERTKQFSKDVVDLLRHQPHFRMPFNKFIPSYHHHFGRQCKLAYYGFTKLLELFEAIPDTLQVLECGEEKILTLTEVERFKALAAQFVKLLRSQKDNCLMMTDLLTEYAKTFGYTFRLQDYDVSSISALTQKLCHVVKVADIESGRQIQLINRKSLRSLTAQLLVLLMSWEGTTHLSVEELKRHYESTHNTPLNPCEYGFMTLTELLKSLPYLVEVFTNDKMEECVKLTSLYLFAKNVRSLLHTYHYQQIFLHEFSMAYTKYVGETLQPKTYGHSSVEELLGAIPQVVWIKGHGHKRIVVLKNDMKSRLSSLSLSPANHENQPSEGERILEVPESHTASELKLGADGSGPSHTEQELLRLTDDSPVDLLCAPVPSCLPSPQLRPDPVILQSADLIQFEERPQEPSEIMILNQEEKMEIPIPGKSKTLTSDSSSSCISAAVPVPPCPSSETSESLLSKDPVESPAKKQPKNRVKLAANFSLAPITKL

SEQ ID NO: 11904 - protein, 387 aa, Homo sapiens
MEGSPIPVLTVPTAPYEDQRPAGGGGLRRPTGLFEGQRNYLPNFIQSVLSSIDLRDRQGCTMVVGSDGRYFSRTAIEIVVQMAAANGIGRLIIGQNGILSTPAVSCIIRKIKAAGGIILTASHCPGGPGGEFGVKFNVANGGPAPDVVSDKIYQISKTIEEYAICPDLRIDLSRLGRQEFDLENKFKPFRVEIVDPVDIYLNLLRTIFDFHAIKGLLTGPSQLKIRIDAMHGVMGPYVRKVLCDELGAPANSAINCVPLEDFGGQHPDPNLTYATTLLEAMKGGEYGFGAAFDADGDRYMILGQNGFFVSPSDSLAIIAANLSCIPYFRQMGVRGFGRSMPTSMALDRVAKSMKVPVYETPAGWRFFSNLMDSGRCNLCGEESFGTV

SEQ ID NO: 11905 - protein, 567 aa, Homo sapiens
MEGSPIPVLTVPTAPYEDQRPAGGGGLRRPTGLFEGQRNYLPNFIQSVLSSIDLRDRQGCTMVVGSDGRYFSRTAIEIVVQMAAANGIGRLIIGQNGILSTPAVSCIIRKIKAAGGIILTASHCPGGPGGEFGVKFNVANGGPAPDVVSDKIYQISKTIEEYAICPDLRIDLSRLGRQEFDLENKFKPFRVEIVDPVDIYLNLLRTIFDFHAIKGLLTGPSQLKIRIDAMHGVMGPYVRKVLCDELGAPANSAINCVPLEDFGGQHPDPNLTYATTLLEAMKGGEYGFGAAFDADGDRYMILGQNGFFVSPSDSLAIIAANLSCIPYFRQMGVRGFGRSMPTSMALDRVAKSMKVPVYETPAGWRFFSNLMDSGRCNLCGEESFGTGSDHLREKDGLWAVLVWLSIIAARKQSVEEIVRDHWAKFGRHYYCRFDYEGLDPKTTYYIMRDLEALVTDKSFIGQQFAVGSHVYSVAKTDSFEYVDPVDGTVTKKQGLRIIFSDASRLIFRLSSSSGVRATLRLYAESYERDPSGHDQEPQAVLSPLIAIALKISQIHERTGRRGPTVIT

SEQ ID NO: 11906 - protein, 411 aa, Homo sapiens
MLLKTVLLLGHVAQVLMLDNGLLQTPPMGWLAWERFRCNINCDEDPKNCISEQLFMEMADRMAQDGWRDMGYTYLNIDDCWIGGRDASGRLMPDPKRFPHGIPFLADYVHSLGLKLGIYADMGNFTCMGYPGTTLDKVVQDAQTFAEWKVDMLKLDGCFSTPEERAQGYPKMAAALNATGRPIAFSCSWPAYEGGLPPRVNYSLLADICNLWRNYDDIQDSWWSVLSILNWFVEHQDILQPVAGPGHWNDPDMLLIGNFGLSLEQSRAQMALWTVLAAPLLMSTDLRTISAQNMDILQNPLMIKINQDPLGIQGRRIHKEKSLIEVYMRPLSNKASALVFFSCRTDMPYRYHSSLGQLNFTGSVIYEAQDVYSGDIISGLRDETNFTVIINPSGVVMWYLYPIKNLEMSQQ

SEQ ID NO: 11907 - protein, 427 aa, Homo sapiens
MVDLCNSTKGICLTGPSGPPGPPGAGGLPGHNGLDGQPGPQGPKGEKGANGKRGKMGIPGAAGNPGERGEKGDHGELGLQGNEGPPGQKGEKGDKGDVSNDVLLAGAKGDQGPPGPPGPPGPPGPPGPPGSRRAKGPRQPSMFNGQCPGETCAIPNDDTLVGKADEKASEHHSPQAESMITSIGNPVQVLKVTETFGTWIRESANKSDDRIWVTEHFSGIMVKEFKDQPSLLNGSYTFIHLPYYFHGCGHVVYNNSLYYHKGGSNTLVRFEFGQETSQTLKLENALYFDRKYLFANSKTYFNLAVDEKGLWIIYASSVDGSSILVAQLDERTFSVVQHVNTTYPKSKAGNAFIARGILYVTDTKDMRVTFAFDLLGGKQINANFDLRTSQSVLAMLAYNMRDQHLYSWEDGHLMLYPVQFLSTTLNQ

SEQ ID NO: 11908 - protein, 503 aa, Homo sapiens
MVLEMLNPIHYNITSIVPEAMPAATMPVLLLTGLFLLVWNYEGTSSIPGPGYCMGIGPLISHGRFLWMGIGSACNYYNRVYGEFMRVWISGEETLIISKSSSMFHIMKHNHYSSRFGSKLGLQCIGMHEKGIIFNNNPELWKTTRPFFMKALSGPGLVRMVTVCAESLKTHLDRLEEVTNESGYVDVLTLLRRVMLDTSNTLFLRIPLDESAIVVKIQGYFDAWQALLIKPDIFFKISWLYKKYEKSVKDLKDAIEVLIAEKRRRISTEEKLEECMDFATELILAEKRGDLTRENVNQCILEMLIAAPDTMSVSLFFMLFLIAKHPNVEEAIIKEIQTVIGERDIKIDDIQKLKVMENFIYESMRYQPVVDLVMRKALEDDVIDGYPVKKGTNIILNIGRMHRLEFFPKPNEFTLENFAKNVPYRYFQPFGFGPRGCAGKYIAMVMMKAILVTLLRRFHVKTLQGQCVESIQKIHDLSLHPDETKNMLEMIFTPRNSDRCLEH

SEQ ID NO: 11909 - protein, 617 aa, Homo sapiens
MALPQGLLTFRDVAIEFSQEEWKCLDPAQRTLYRDVMLENYRNLVSLDISSKCMMKEFSSTAQGNREVIHTGTLQRHESHHTGDFRFQEIDKDIHNLEFQWQEDERNSHEAPMTEIKKLTGSADRYDQRHAGNKPIKDQLGSSFHSHLPELHMFQTQGKIGNQVEKSINDASSISTSQRISCRPKTHISNNYGNNFRNSSLLTQKQEVHMREKSFQCNESGKAFNYSSLLRKHQIIHLGEKQYKCDVCGKVFNRKRNLVCHRRCHTGEKPYRCNECGKTFSQTYSLTCHRRLHTGEKPYKCEECDKAFSFKSNLKRHRRIHAGEKPYKCNECGKTFSQTSSLTCHRRLHTGEKPFKCNECGKTFSRKSSLTCHHRLHTGEKPYKCNECGKTFSQELTLKCHRRLHTGEKPYKCNECGKVFNKKANLARHHRLHSGEKPYKCTECVKTFSRNSALVIHKAIHIGEKRYKCNECGKTFSRISALVIHTAIHTGEKPYKCNECGKGFNRKTHLACHHRLHTGEKPYKCNECGKVFNRKTHLAHHHRLHTGDKPYKCNECGKVFNQKAHLARHHRLHTGEKPYKCNECGKVFNQKANLARHHRLHTGEKPYKFNECGKAFN

SEQ ID NO: 11910 - protein, 788 aa, Homo sapiens
MDASLEKIADPTLAEMGKNLKEAVKMLEDSQRRTEEENGKKLISGDIPGPLQGSGQDMVSILQLVQNLMHGDEDEEPQSPRIQNIGEQGHMALLGHSLGAYISTLDKEKLRKLTTRILSDTTLWLCRIFRYENGCAYFHEEEREGLAKICRLAIHSRYEDFVVDGFNVLYNKKPVIYLSAAARPGLGQYLCNQLGLPFPCLCRVPCNTVFGSQHQMDVAFLEKLIKDDIERGRLPLLLVANAGTAAVGHTDKIGRLKELCEQYGIWLHVEGVNLATLALGYVSSSVLAAAKCDSMTMTPGPWLGLPAVPAVTLYKHDDPALTLVAGLTSNKPTDKLRALPLWLSLQYLGLDGFVERIKHACQLSQRLQESLKKVNYIKILVEDELSSPVVVFRFFQELPGSDPVFKAVPVPNMTPSGVGRERHSCDALNRWLGEQLKQLVPASGLTVMDLEAEGTCLRFSPLMTAAVLGTRGEDVDQLVACIESKLPVLCCTLQLREEFKQEVEATAGLLYVDDPNWSGIGVVRYEHANDDKSSLKSDPEGENIHAGLLKKLNELESDLTFKIGPEYKSMKSCLYVGMASDNVDAAELVETIAATAREIEENSRLLENMTEVVRKGIQEAQVELQKASEERLLEEGVLRQIPVVGSVLNWFSPVQALQKGRTFNLTAGSLESTEPIYVYKAQGAGVTLPPTPSGSRTKQRLPGQKPFKRSLRGSDALSETSSVSHIEDLEKVERLSSGPEQITLEASSTEGHPGAPSPQHTDQTEAFQKGVPHPEDDHSQVEGPESLR

SEQ ID NO: 11911 - protein, 455 aa, Homo sapiens
MMRVSEPILDMDMANYSEVLDPTYTTLEFETMQILYNSSDSSAPETSMNTTDNGVNCLCAICGDRATGKHYGASSCDGCKGFFRRSIRKSHVYSCRFSRQCVVDKDKRNQCRYCRLRKCFRAGMKKEAVQNERDRISTRRSTFDGSNIPSINTLAQAEVRSRQISVSSPGSSTDINVKKIASIGDVCESMKQQLLVLVEWAKYIPAFCELPLDDQVALLRAHAGEHLLLGATKRSMMYKDILLLGNNYVIHRNSCEVEISRVANRVLDELVRPFQEIQIDDNEYACLKAIVFFDPDAKGLSDPVKIKNMRFQVQIGLEDYINDRQYDSRGRFGELLLLLPTLQSITWQMIEQIQFVKLFGMVKIDNLLQEMLLGGASNDGSHLHHPMHPHLSQDPLTGQTILLGPMSTLVHADQISTPETPLPSPPQGSGQEQYKIAANQASVISHQHLSKQKQL

SEQ ID NO: 11912 - protein, 678 aa, Homo sapiens
MALPQGQLTFKDVAIEFSQEEWTCLDPAQKTLYRDVMLENYRNLVSLDISCKCVNTDLPPKGKNNMGEAFYTVKLERLESCDTVGLSFQEVQKNTYDFECQWKDDEGNYKTVLMLQKENLPGRRAQRDRRAAGNRHIENQLGVSFQSHLPELQQFQHEGKIYEYNQVEKSPNNRGKHYKCDECGKVFSQNSRLTSHKRIHTGEKPYQCNKCGKAFTVRSNLTIHQVIHTGEKPYKCNECGKVFSQPSNLAGHQRIHTGEKPYKCNECGKAFRAHSKLTTHQVIHTGEKPYKCKECGKCFTQNSHLASHRRIHTGEKPYKCNECGKAFSVRSSLTTHQTIHTGEKPYKCNECGKVFRHNSYLAKHRRIHTGEKPYKCNECGKAFSMHSNLTKHQIIHTGEKPFKCNECVKVFTQYSHLANHRRIHTGEKPYRCDECGKAFSVRSSLTTHQAIHTGEKPYKCNDCGKVFTQNSHLASHRGIHSGEKPYKCDECGKAFSQTSQLARHWRVHTGEKPYKCNECGKAFSVHSSLTIHQTIHTGQKPYKCNDCGKVFRHNSYLAIHQRIHTGEKPYKCNECGKAFSVHSNLATHQVIHTGEKPYKCNECGKVFTQNSHLANHRRIHTGEKPYRCNECGKAFSVRSTLTTHMAVHTGDKPYKCNQCGKVFTQNSNLAKHRRIHSG

SEQ ID NO: 11913 - protein, 503 aa, Homo sapiens
MGTPASGRKRTPVKDRFSAEDEALSNIAREAEARLAAKRAARAEARDIRMRELERQQKEEDSERARYSHRSSHHRPYLGVEDALSIRSVGSHRNHSYSHSHGMKKRSSDSHKDLLASLYNGGLYNPYGPRTLDEKSDKQYAENYTRPSSRNSASATTPLSGNSSRRGSGDTSSLIDPDTSLSELRESLSEVEEKYKKAMVSNAQLDNEKNNLIYQVDTLKDVIEEQEEQMAEFYRENEEKSKELERQKHMCSVLQHKMEELKEGLRQRDELIEEKQRMQQKIDTMTKEVFDLQETLLWKDKKIGKHGLVIIPDGTPNGDVSHEPVAGAITVVSQEAAQVLESAGEGPLDVRLRKLAGEKEELLSQIRKLKLQLEEERQKCSRNDGTVGDLAGLQNGSDLQFIEMQRDANRQISEYKFKLSKAEQDITTLEQSISRLEGQVLRYKTAAENAEKVEDELKAEKRKLQRELRTALDKIEEMEMTNSHLAKRLEKMKANRTALLAQQ

SEQ ID NO: 11914 - protein, 851 aa, Homo sapiens
MMSDEKNLGVSQKLVSPSRSTSSCSSKQGSRQDSWEVVEGLRGEMNYTQEPPVQKGFLLKKRKWPLKGWHKRFFYLDKGILKYAKSQTDIEREKLHGCIDVGLSVMSVKKSSKCIDLDTEEHIYHLKVKSEEVFDEWVSKLRHHRMYRQNEIAMFPHEVNHFFSGSTITDSSSGVFDSISSRKRSSISKQNLFQTGSNVSFSCGGETRVPLWLQSSEDMEKCSKDLAHCHAYLVEMSQLLQSMDVLHRTYSAPAINAIQGGSFESPKKEKRSHRRWRSRAIGKDAKGTLQVPKPFSGPVRLHSSNPNLSTLDFGEEKNYSDGSETSSEFSKMQEDLCHIAHKVYFTLRSAFNIMSAEREKLKQLMEQDASSSPSAQVIGLKNALSSENSRDENRALVHQLSNESRLSITDSLSEFFDAQEVLLSPSSSENEISDDDSYVSDISDNLSLDNLSNDLDNERQTLGPVLDSGREAKSRRRTCLPAPCPSSSNISLWNILRNNIGKDLSKVAMPVELNEPLNTLQRLCEELEYSELLDKAAQIPSPLERMVYVAAFAISAYASSYYRAGSKPFNPVLGETYECIREDKGFQFFSEQVSHHPPISACHAESRNFVFWQDVRWKNKFWGKSMEIVPIGTTHVTLPVFGDHFEWNKVTSCIHNILSGQRWIEHYGEIVIKNLHDDSCYCKVNFIKAKYWSTNAHEIEGTVFDRSGKAVHRLFGKWHESIYCGGGSSSACVWRANPMPKGYEQYYSFTQFALELNEMDPSSKSLLPPTDTRFRPDQRFLEEGNLEEAEIQKQRIEQLQRERRRVLEENHVEHQPRFFRKSDDDSWVSNGTYLELRKDLGFSKLDHPVLW

SEQ ID NO: 11915 - protein, 906 aa, Homo sapiens
MQRELVYARGDGPGAPRPGSTAHPPHAIPNSPPSTPVPHSMPPSPSRIPYGGTRSMVVPGNATIPRDRISSLPVSRPISPSPSAILERRDVKPDEDMSGKNIAMYRNEGFYADPYLYHEGRMSIASSHGGHPLDVPDHIIAYHRTAIRSASAYCNPSMQAEMHMEQSLYRQKSRKYPDSHLPTLGSKTPPASPHRVSDLRMIDMHAHYNAHGPPHTMQPDRASPSRQAFKKEPGTLVYIEKPRSAAGLSSLVDLGPPLMEKQVFAYSTATIPKDRETSEKMMKTTANRNHTDSAGTPHVSGGKMLSALESTVPPSQPPPVGTSAIHMSLLEMRRSVAELRLQLQQMRQLQLQNQELLRAMMKKAELEISGKVMETMKRLEDPVQRQRVLVEQERQKYLHEEEKIVKKLCELEDFVEDLKKDSTAASRLVTLKDVEDGAFLLRQVGEAVATLKGEFPTLQNKMRAILRIEVEAVRFLKEEPHKLDSLLKRVRSMTDVLTMLRRHVTDGLLKGTDAAQAAQYMAMEKATAAEVLKSQEEAAHTSGQPFHSTGAPGDAKSEVVPLSGMMVRHAQSSPVVIQPSQHSVALLNPAQNLPHVASSPAVPQEATSTLQMSQAPQSPQIPMNGSAMQSLFIEEIHSVSAKNRAVSIEKAEKKWEEKRQNLDHYNGKEFEKLLEEAQANIMKSIPNLEMPPATGPLPRGDAPVDKVELSEDSPNSEQDLEKLGGKSPPPPPPPPRRSYLPGSGLTTTRSGDVVYTGRKENITAKASSEDAGPSPQTRATKYPAEEPASAWTPSPPPVTTSSSKDEEEEEEEGDKIMAELQAFQKCSFMDVNSNSHAEPSRADSHVKDTRSGATVPPKEKKGSSGAPQTSRMPVPMSAKNRPGTLDKPGKQSKLQDPRQYRQVVLP

SEQ ID NO: 11916 - protein, 866 aa, Homo sapiens
MQRELVYARGDGPGAPRPGSTAHPPHAIPNSPPSTPVPHSMPPSPSRIPYGGTRSMVVPGNATIPRDRISSLPVSRPISPSPSAILERRDVKPDEDMSGKNIAMYRNEGFYADPYLYHEGRMSIASSHGGHPLDVPDHIIAYHRTAIRSASAYCNPSMQAEMHMEQSLYRQKSRKYPDSHLPTLGSKTPPASPHRVSDLRMIDMHAHYNAHGPPHTMQPDRASPSRQAFKKEPGTLVYIEKPRSAAGLSSLVDLGPPLMEKQVFAYSTATIPKDRETSEKMMKTTANRNHTDSAGTPHVSGGKMLSALESTVPPSQPPPVGTSAIHMSLLEMRRSVAELRLQLQQMRQLQLQNQELLRAMMKKAELEISGKVMETMKRLEDPVQRQRVLVEQERQKYLHEEEKIVKKLCELEDFVEDLKKDSTAASRLVTLKDVEDGAFLLRQVGEAVATLKGEFPTLQNKMRAILRIEVEAVRFLKEEPHKLDSLLKRVRSMTDVLTMLRRHVTDGLLKGTDAAQAAQYMAMEKATAAEVLKSQEEAAHTSGQPFHSTGAPGDAKSEVVPLSGMMVRHAQSSPVVIQPSQHSVALLNPAQNLPHVASSPAVPQEATSTLQMSQAPQSPQIPMNGSAMQSLFIEEIHSVSAKNRAVSIEKAEKKWEEKRQNLDHYNGKEFEKLLEEAQANIMKSIPNLEMPPATGPLPRGDAPVDKVELSEDSPNSEQDLEKLGGKSPPPPPPPPRRSYLPGSGLTTTRSGDVVYTGRKENITAKASSEDAGPSPQTRATKYPAEEPASAWTPSPPPVTTSSSKDEEEEEEEGDKIMAELQGSSGAPQTSRMPVPMSAKNRPGTLDKPGKQSKLQDPRQYRQVVLP

SEQ ID NO: 11917 - protein, 384 aa, Homo sapiens
MDLSRPRWSLWRRVFLMASLLACGICQASGQIFITQTLGIKGYRTVVALDKVPEDVQEYSWYWGANDSAGNMIISHKPPSAQQPGPMYTGRERVNREGSLLIRPTALNDTGNYTVRVVAGNETQRATGWLEVLELGSNLGISVNASSLVENMDSVAADCLTNVTNITWYVNDVPTSSSDRMTISPDGKTLVILRVSRYDRTIQCMIESFPEIFQRSERISLTVAYGPDYVLLRSNPDDFNGIVTAEIGSQVEMECICYSFLDLKYHWIHNGSLLNFSDAKMNLSSLAWEQMGRYRCTVENPVTQLIMYMDVRIQAPHEDLTCCPQRFLHLRIHGDVPHHADSAGWRLHLWSPDPCSDQPLLNQDKSGSMSVHPRPEDKTRRASR

SEQ ID NO: 11918 - protein, 168 aa, Homo sapiens
MEYHPDLENLDEDGYTQLHFDSQSNTRIAVVSEKGVLSSPCPPNWIIYEKSCYLFSMSLNSWDGSKRQCWQLGSNLLKIDSSNELGFIVKQVSSQPDNSFWIGLSRPQTEVPWLWEDGSTFSSNLFQIRTTATQENPSPNCVWIHVSVIYDQLCSVPSYSICEKKFSM

SEQ ID NO: 11919 - protein, 511 aa, Homo sapiens
MSKVARSSSESDVQLWETEEDDMTEGDLGYGLGRKPGGIYEIEFSHRSRKRSDGKNFSPPPFPRKGEERNEASFQYSKHKSQQDTFPQVSRISNYRRQSSTVDSNSELSNEELRQCLNETLEEVEMLKTELEASQRQLRGKEEALKILQSMAILGKATSHTQAVLQKTMEQNRSLEKEINALQWEIEFDHNRFKNIEESWIQKYDRLNCENAVLKENLKVKTEEIKMLKSDNAVLNQRYLEALAMLDIKQQKMAQENMCCDKSGFAEASGLELAVLGACLCHGPGGNPCSCARMAASTRKLLLQLKQELEILQKSKEEAYVMADAFRIAFEQQLMRKNDQALQLTQMDKMHKKATKWMNWKHLKEDGFPSPRSKKTFGQRLLGMLPSENSSKRMEDQDSPQEVLKMLIDLLNDKEEALAHQRKVSYMLARALEDKDTASNENKEKNPIKENFPFNNPWRKTSEFSVLGDPIHSSVCILNSVGCICSIQHSQIDPNYRTLKRSHSLPSSIIF

SEQ ID NO: 11920 - protein, 232 aa, Homo sapiens
MSEEVTYATLTFQDSAGARNNRDGNNLRKRGHPAPSPIWRHAALGLVTLCLMLLIGLVTLGMMFLQISNDINSDSEKLSQLQKTIQQQQDNLSQQLGNSNNLSMEEEFLKSQISSVLKRQEQMAIKLCQELIIHTSDHRCNPCPKMWQWYQNSCYYFTTNEEKTWANSRKDCIDKNSTLVKIDSLEEKDFLMSQPLLMFSFFWLGLSWDSSGRSWFWEDGSVPSPSLYVSNY

SEQ ID NO: 11921 - protein, 387 aa, Homo sapiens
MLPALEHWIPKFFSFRTRTGSPLSLACRQPIVGPCDHIIANHHMQSISFASGGDPDTTDYVAYVAKDPVNQRACHILECHNGMAQDVISTIGQAFELRFKQYLKNPSLNTSCESEEVHIDSHAEEREDHEYYNEIPGKQPPVGGVSDMRIKVQATEQMAYCPIQCEKLCYLPGNSKCSSVYENCLEQSRAIGNVHPRGVQSQRDTSLLKHTCRVDLFDDPCYINTQALQSTPGSAGNQRSAQPLGSPWHCGKAPETVQPGATAQPASSHSLPHIKQQLWSEECYHGKLSRKAAESLLVKDGDFLVRESATSPGQYVLSGLQGGQAKHLLLVDPEGKVRTKDHVFDNVGHLIRYHMDNSLPIISSGSEVSLKQPVRKDNNPALLHSNK

SEQ ID NO: 11922 - protein, 247 aa, Homo sapiens
MPASSPFLLAPKGPPGNMGGPVREPALSVALWLSWGAALGAVACAMALLTQQTELQSLRREVSRLQGTGGPSQNGEGYPWQSLPEQSSDALEAWENGERSRKRRAVLTQKQKKQHSVLHLVPINATSKDDSDVTEVMWQPALRRGRGLQAQGYGVRIQDAGVYLLYSQVLFQDVTFTMGQVVSREGQGRQETLFRCIRSMPSHPDRAYNSCYSAGVFHLHQGDILSVIIPRARAKLNLSPHGTFLGL

SEQ ID NO: 11923 - protein, 767 aa, Homo sapiens
MPRQFPKLNISEVDEQVRLLAEKVFAKVLREEDSKDALSLFTVPEDCPIGQKEAKERELQKELAEQKSVETAKRKKSFKMIRSQSLSLQMPPQQDWKGPPAASPAMSPTTPVVTGATSLPTPAPYAMPEFQRVTISGDYCAGITLEDYEQAAKSLAKALMIREKYARLAYHRFPRITSQYLGHPRADTAPPEEGLPDFHPPPLPQEDPYCLDDAPPNLDYLVHMQGGILFVYDNKKMLEHQEPHSLPYPDLETYTVDMSHILALITDGPTKTYCHRRLNFLESKFSLHEMLNEMSEFKELKSNPHRDFYNVRKVDTHIHAAACMNQKHLLRFIKHTYQTEPDRTVAEKRGRKITLRQVFDGLHMDPYDLTVDSLDVHAGRQTFHRFDKFNSKYNPVGASELRDLYLKTENYLGGEYFARMVKEVARELEESKYQYSEPRLSIYGRSPEEWPNLAYWFIQHKVYSPNMRWIIQVPRIYDIFRSKKLLPNFGKMLENIFLPLFKATINPQDHRELHLFLKYVTGFDSVDDESKHSDHMFSDKSPNPDVWTSEQNPPYSYYLYYMYANIMVLNNLRRERGLSTFLFRPHCGEAGSITHLVSAFLTADNISHGLLLKKSPVLQYLYYLAQIPIAMSPLSNNSLFLEYSKNPLREFLHKGLHVSLSTDDPMQFHYTKEALMEEYAIAAQVWKLSTCDLCEIARNSVLQSGLSHQEKQKFLGQNYYKEGPEGNDIRKTNVAQIRMAFRYETLCNELSFLSDAMKSEEITALTN

SEQ ID NO: 11924 - protein, 776 aa, Homo sapiens
MALSSEPAEMPRQFPKLNISEVDEQVRLLAEKVFAKVLREEDSKDALSLFTVPEDCPIGQKEAKERELQKELAEQKSVETAKRKKSFKMIRSQSLSLQMPPQQDWKGPPAASPAMSPTTPVVTGATSLPTPAPYAMPEFQRVTISGDYCAGITLEDYEQAAKSLAKALMIREKYARLAYHRFPRITSQYLGHPRADTAPPEEGLPDFHPPPLPQEDPYCLDDAPPNLDYLVHMQGGILFVYDNKKMLEHQEPHSLPYPDLETYTVDMSHILALITDGPTKTYCHRRLNFLESKFSLHEMLNEMSEFKELKSNPHRDFYNVRKVDTHIHAAACMNQKHLLRFIKHTYQTEPDRTVAEKRGRKITLRQVFDGLHMDPYDLTVDSLDVHAGRQTFHRFDKFNSKYNPVGASELRDLYLKTENYLGGEYFARMVKEVARELEESKYQYSEPRLSIYGRSPEEWPNLAYWFIQHKVYSPNMRWIIQVPRIYDIFRSKKLLPNFGKMLENIFLPLFKATINPQDHRELHLFLKYVTGFDSVDDESKHSDHMFSDKSPNPDVWTSEQNPPYSYYLYYMYANIMVLNNLRRERGLSTFLFRPHCGEAGSITHLVSAFLTADNISHGLLLKKSPVLQYLYYLAQIPIAMSPLSNNSLFLEYSKNPLREFLHKGLHVSLSTDDPMQFHYTKEALMEEYAIAAQVWKLSTCDLCEIARNSVLQSGLSHQEKQKFLGQNYYKEGPEGNDIRKTNVAQIRMAFRYETLCNELSFLSDAMKSEEITALTN

SEQ ID NO: 11925 - protein, 764 aa, Homo sapiens
MERAVQGTDGGGGSNSSSRSSSRATSAGSSPSCSLAGRGVSSRSAAAGLGGGGSRSSPGSVAASPSGGGGRRREPALEGVLSKYTNLLQGWQNRYFVLDFEAGILQYFVNEQSKHQKPRGVLSLSGAIVSLSDEAPHMLVVYSANGEMFKLRAADAKEKQFWVTQLRACAKYHMEMNSKSAPSSRSRSLTLLPHGTPNSASPCSQRHLSVGAPGVVTITHHKSPAAARRAKSQYSGQLHEVREMMNQVEGQQKNLVHAIESLPGSGPLTALDQDLLLLKATSAATLSCLGECLNLLQQSVHQAGQPSQKPGASENILGWHGSKSHSTEQLKNGTLGSLPSASANITWAILPNSAEDEQTSQPEPEPNSGSELVLSEDEKSDNEDKEETELGVMEDQRSIILHLISQLKLGMDLTKVVLPTFILEKRSLLEMYADFMAHPDLLLAITAGATPEERVICFVEYYLTAFHEGRKGALAKKPYNPIIGETFHCSWEVPKDRVKPKRTASRSPASCHEHPMADDPSKSYKLRFVAEQVSHHPPISCFYCECEEKRLCVNTHVWTKSKFMGMSVGVSMIGEGVLRLLEHGEEYVFTLPSAYARSILTIPWVELGGKVSINCAKTGYSATVIFHTKPFYGGKVHRVTAEVKHNPTNTIVCKAHGEWNGTLEFTYNNGETKVIDTTTLPVYPKKIRPLEKQGPMESRNLWREVTRYLRLGDIDAATEQKRHLEEKQRVEERKRENLRTPWKPKYFIQEGDGWVYFNPLWKAH

SEQ ID NO: 11926 - protein, 520 aa, Homo sapiens
MAGGGSDLSTRLFTEDQDVDEGLVYDTVFKHFKRHKLEISNAIKKTFPFLEGLRDRELITNKMFEDSEDSCRNLVPVQRVVYNVLSELEKTFNLSVLEALFSEVNMQEYPDLIHIYKSFKNAIQDKLSFQESDRKEREERPDIKLSLKQGEVPESPEARKESDQACGKMDTVDIANNSTLGKPKRKRRKKKGHGWSRMGTRTQKNNQQNDNSKADGQLVSSEKKANMNLKDLSKIRGRKRGKPGTHFTQSDRAPQKRVRSRGTLAKCIQTEDGKWFTPMEFEIKGGYARSKNWRLSVRCGGWPLRRLMEEGSLPNPPRIYYRNKKRILKSQNNSSVDPCMRNLDECEVCRDGGELFCCDTCSRVFHEDCHIPPVESEKTPWNCIFCRMKESPGSQQCCQESEVLERQMCPEEQLKCEFLLLKVYCCSESSFFAKIPYYYYIREACQGLKEPMWLDKIKKRLNEHGYPQVEGFVQDMRLIFQNHRASYKYKDFGQMGLRLEAEFEKDFKEVFAIQETNGNS

SEQ ID NO: 11927 - protein, 605 aa, Homo sapiens
MQCCGLVHRRRVRVSYGSADSYTSRPSDSDVSLEEDREAVRREAERQAQAQLEKAKTKPVAFAVRTNVSYSAAHEDDVPVPGMAISFEAKDFLHVKEKFNNDWWIGRLVKEGCEIGFIPSPVKLENMRLQHEQRAKQGKFYSSKSGGNSSSSLGDIVPSSRKSTPPSSAIDIDATGLDAEENDIPANHRSPKPSANSVTSPHSKEKRMPFFKKTEHTPPYDVVPSMRPVVLVGPSLKGYEVTDMMQKALFDFLKHRFEGRISITRVTADISLAKRSVLNNPSKHAIIERSNTRSSLAEVQSEIERIFELARTLQLVVLDADTINHPAQLSKTSLAPIIVYVKISSPKVLQRLIKSRGKSQAKHLNVQMVAADKLAQCPPELFDVILDENQLEDACEHLADYLEAYWKATHPPSSSLPNPLLSRTLATSSLPLSPTLASNSQGSQGDQRTDRSAPIRSASQAEEEPSVEPVKKSQHRSSSSAPHHNHRSGTSRGLSRQETFDSETQESRDSAYVEPKEDYSHDHVDHYASHRDHNHRDETHGSSDHRHRESRHRSRDVDREQDHNECNKQRSRHKSKDRYCEKDGEVISKKRNEAGEWNRDVYIRQ

SEQ ID NO: 11928 - protein, 1099 aa, Homo sapiens
MSLNNSSNVFLDSVPSNTNRFQVSVINENHESSAAADDNTDPPHYEETSFGDEAQKRLRISFRPGNQECYDNFLQSGETAKTDASFHAYDSHTNTYYLQTFGHNTMDAVPKIEYYRNTGSISGPKVNRPSLLEIHEQLAKNVAVTPSSADRVANGDGIPGDEQAENKEDDQAGVVKFGWVKGVLVRCMLNIWGVMLFIRLSWIVGEAGIGLGVIIIGLSVVVTTLTGISMSAICTNGVVRGGGAYYLISRSLGPEFGGSIGLIFAFANAVAVAMYVVGFAETVVDLLKESDSMMVDPTNDIRIIGSITVVILLGISVAGMEWEAKAQVILLVILLIAIANFFIGTVIPSNNEKKSRGFFNYQASIFAENFGPRFTKGEGFFSVFAIFFPAATGILAGANISGDLEDPQDAIPRGTMLAIFITTVAYLGVAICVGACVVRDATGNMNDTIISGMNCNGSAACGLGYDFSRCRHEPCQYGLMNNFQVMSMVSGFGPLITAGIFSATLSSALASLVSAPKVFQALCKDNIYKALQFFAKGYGKNNEPLRGYILTFLIAMAFILIAELNTIAPIISNFFLASYALINFSCFHASYAKSPGWRPAYGIYNMWVSLFGAVLCCAVMFVINWWAAVITYVIEFFLYVYVTCKKPDVNWGSSTQALSYVSALDNALELTTVEDHVKNFRPQCIVLTGGPMTRPALLDITHAFTKNSGLCICCEVFVGPRKLCVKEMNSGMAKKQAWLIKNKIKAFYAAVAADCFRDGVRSLLQASGLGRMKPNTLVIGYKKNWRKAPLTEIENYVGIIHDAFDFEIGVVIVRISQGFDISQVLQVQEELERLEQERLALEATIKDNECEEESGGIRGLFKKAGKLNITKTTPKKDGSINTSQSMHVGEFNQKLVEASTQFKKKQEKGTIDVWWLFDDGGLTLLIPYILTLRKKWKDCKLRIYVGGKINRIEEEKIVMASLLSKFRIKFADIHIIGDINIRPNKESWKVFEEMIEPYRLHESCKDLTTAEKLKRETPWKITDAELEAVKEKSYRQVRLNELLQEHSRAANLIVLSLPVARKGSISDLLYMAWLEILTKNLPPVLLVRGNHKNVLTFYS

SEQ ID NO: 11929 - protein, 1670 aa, Homo sapiens
MSARTAPRPQVLLLPLLLVLLAAAPAASKGCVCKDKGQCFCDGAKGEKGEKGFPGPPGSPGQKGFTGPEGLPGPQGPKGFPGLPGLTGSKGVRGISGLPGFSGSPGLPGTPGNTGPYGLVGVPGCSGSKGEQGFPGLPGTLGYPGIPGAAGLKGQKGAPAKEEDIELDAKGDPGLPGAPGPQGLPGPPGFPGPVGPPGPPGFFGFPGAMGPRGPKGHMGERVIGHKGERGVKGLTGPPGPPGTVIVTLTGPDNRTDLKGEKGDKGAMGEPGPPGPSGLPGESYGSEKGAPGDPGLQGKPGKDGVPGFPGSEGVKGNRGFPGLMGEDGIKGQKGDIGPPGFRGPTEYYDTYQEKGDEGTPGPPGPRGARGPQGPSGPPGVPGSPGSSRPGLRGAPGWPGLKGSKGERGRPGKDAMGTPGSPGCAGSPGLPGSPGPPGPPGDIVFRKGPPGDHGLPGYLGSPGIPGVDGPKGEPGLLCTQCPYIPGPPGLPGLPGLHGVKGIPGRQGAAGLKGSPGSPGNTGLPGFPGFPGAQGDPGLKGEKGETLQPEGQVGVPGDPGLRGQPGRKGLDGIPGTPGVKGLPGPKGELALSGEKGDQGPPGDPGSPGSPGPAGPAGPPGYGPQGEPGLQGTQGVPGAPGPPGEAGPRGELSVSTPVPGPPGPPGPPGHPGPQGPPGIPGSLGKCGDPGLPGPDGEPGIPGIGFPGPPGPKGDQGFPGTKGSLGCPGKMGEPGLPGKPGLPGAKGEPAVAMPGGPGTPGFPGERGNSGEHGEIGLPGLPGLPGTPGNEGLDGPRGDPGQPGPPGEQGPPGRCIEGPRGAQGLPGLNGLKGQQGRRGKTGPKGDPGIPGLDRSGFPGETGSPGIPGHQGEMGPLGQRGYPGNPGILGPPGEDGVIGMMGFPGAIGPPGPPGNPGTPGQRGSPGIPGVKGQRGTPGAKGEQGDKGNPGPSEISHVIGDKGEPGLKGFAGNPGEKGNRGVPGMPGLKGLKGLPGPAGPPGPRGDLGSTGNPGEPGLRGIPGSMGNMGMPGSKGKRGTLGFPGRAGRPGLPGIHGLQGDKGEPGYSEGTRPGPPGPTGDPGLPGDMGKKGEMGQPGPPGHLGPAGPEGAPGSPGSPGLPGKPGPHGDLGFKGIKGLLGPPGIRGPPGLPGFPGSPGPMGIRGDQGRDGIPGPAGEKGETGLLRAPPGPRGNPGAQGAKGDRGAPGFPGLPGRKGAMGDAGPRGPTGIEGFPGPPGLPGAIIPGQTGNRGPPGSRGSPGAPGPPGPPGSHVIGIKGDKGSMGHPGPKGPPGTAGDMGPPGRLGAPGTPGLPGPRGDPGFQGFPGVKGEKGNPGFLGSIGPPGPIGPKGPPGVRGDPGTLKIISLPGSPGPPGTPGEPGMQGEPGPPGPPGNLGPCGPRGKPGKDGKPGTPGPAGEKGNKGSKGEPGPAGSDGLPGLKGKRGDSGSPATWTTRGFVFTRHSQTTAIPSCPEGTVPLYSGFSFLFVQGNQRAHGQDLGTLGSCLQRFTTMPFLFCNVNDVCNFASRNDYSYWLSTPALMPMNMAPITGRALEPYISRCTVCEGPAIAIAVHSQTTDIPPCPHGWISLWKGFSFIMFTSAGSEGTGQALASPGSCLEEFRASPFLECHGRGTCNYYSNSYSFWLASLNPERMFRKPIPSTVKAGELEKIISRCQVCMKKRH

SEQ ID NO: 11930 - protein, 590 aa, Homo sapiens
MSNLKMKEAALIYLDRSGGLQKFIDDCKYYNDSKQSYAVYRFKILINPSDVVELDAELGNHILHQPLKAAEVFQSVCFIAVKTLSLIGQLQTETQINIVLKLTHLPPLPSYGLDLCEFPLDYTSQRFYMMQGIVIAMTTITKYTQGARFLCSDEACPLSKGFQYIRVHVPGATESATIRNDFLCNLCASSLQEDRKFRVLGDKQIVEIIATKALRAFQGYSNNQPFRFQSLTIFLRDESVNKMNIGNEYKIIGIPTCVKTSQTAVCIEANSITFCNSKVPSGISDNFRCLLSLTSSSCWKFTAILANIFASQITPPGTYNLLKLCLLMSLVQTTDRNKELEDCLDILIITSDTLLIDRLLNFSINLVPRGIRHLVSTEIFPTLSRNKYGTGAVSIQAGSALLAKGGICFIGDLASHKKDKLEQLQTVLESRSITVYIPGKKFGEDIDQQMTFPVQCSFWSFVDVDSSSRRNAQKINTLIGQMDCSLIPANLVEAFGLLINCNESSPCHPFLPTVQHTLNKAINPEGLFYAASRQFTTEDFEKLLAFAKNLNVEFSLEAERMTHGYYLASRRIRTGSVCGSKLSASALKYL

SEQ ID NO: 11931 - protein, 753 aa, Homo sapiens
METYGYLQRESCFQGPHELYFKNLSKRNKQIMEKNGNNRKLRVCVATCNRADYSKLAPIMFGIKTEPEFFELDVVVLGSHLIDDYGNTYRMIEQDDFDINTRLHTIVRGEDEAAMVESVGLALVKLPDVLNRLKPDIMIVHGDRFDALALATSAALMNIRILHIEGGEVSGTIDDSIRHAITKLAHYHVCCTRSAEQHLISMCEDHDRILLAGCPSYDKLLSAKNKDYMSIIRMWLGDDVKSKDYIVALQHPVTTDIKHSIKMFELTLDALISFNKRTLVLFPNIDAGSKEMVRVMRKKGIEHHPNFRAVKHVPFDQFIQLVAHAGCMIGNSSCGVREVGAFGTPVINLGTRQIGRETGENVLHVRDADTQDKILQALHLQFGKQYPCSKIYGDGNAVPRILKFLKSIDLQEPLQKKFCFPPVKENISQDIDHILETLSALAVDLGGTNLRVAIVSMKGEIVKKYTQFNPKTYEERINLILQMCVEAAAEAVKLNCRILGVGISTGGRVNPREGIVLHSTKLIQEWNSVDLRTPLSDTLHLPVWVDNDGNCAALAERKFGQGKGLENFVTLITGTGIGGGIIHQHELIHGSSFCAAELGHLVVSLDGPDCSCGSHGCIEAYASGMALQREAKKLHDEDLLLVEGMSVPKDEAVGALHLIQAAKLGNAKAQSILRTAGTALGLGVVNILHTMNPSLVILSGVLASHYIHIVKDVIRQQALSSVQDVDVVVSDLVDPALLGAASMVLDYTTRRIY

SEQ ID NO: 11932 - protein, 902 aa, Homo sapiens
MDSERQVKDTDDIESPKRSIRDSGYIDCWDSERSDSLSPPRHGRDDSFDSLDSFGSRSRQTPSPDVVLRGSSDGRGSDSESDLPHRKLPDVKKDDMSARRTSHGEPKSAVPFNQYLPNKSNQTAYVPAPLRKKKAEREEYRKSWSTATSPLGGERPFRYGPRTPVSDDAESTSMFDMRCEEEAAVQPHSRARQEQLQLINNQLREEDDKWQDDLARWKSRRRSVSQDLIKKEEERKKMEKLLAGEDGTSERRKSIKTYREIVQEKERRERELHEAYKNARSQEEAEGILQQYIERFTISEAVLERLEMPKILERSHSTEPNLSSFLNDPNPMKYLRQQSLPPPKFTATVETTIARASVLDTSMSAGSGSPSKTVTPKAVPMLTPKPYSQPKNSQDVLKTFKVDGKVSVNGETVHREEEKERECPTVAPAHSLTKSQMFEGVARVHGSPLELKQDNGSIEINIKKPNSVPQELAATTEKTEPNSQEDKNDGGKSRKGNIELASSEPQHFTTTVTRCSPTVAFVEFPSSPQLKNDVSEEKDQKKPENEMSGKVELVLSQKVVKPKSPEPEATLTFPFLDKMPEANQLHLPNLNSQVDSPSSEKSPVMTPFKFWAWDPEEERRRQEKWQQEQERLLQERYQKEQDKLKEEWEKAQKEVEEEERRYYEEERKIIEDTVVPFTVSSSSADQLSTSSSMTEGSGTMNKIDLGNCQDEKQDRRWKKSFQGDDSDLLLKTRESDRLEEKGSLTEGALAHSGNPVSKGVHEDHQLDTEAGAPHCGTNPQLAQDPSQNQQTSNPTHSSEDVKPKTLPLDKSINHQIESPSERRKSISGKKLCSSCGLPLGKGAAMIIETLNLYFHIQCFRCGICKGQLGDAVSGTDVRIRNGLLNCNDCYMRSRSAGQPTTL

SEQ ID NO: 11933 - protein, 798 aa, Homo sapiens
MPPLKSPAAFHEQRRSLERARTEDYLKRKIRSRPERSELVRMHILEETSAEPSLQAKQLKLKRARLADDLNEKIAQRPGPMELVEKNILPVESSLKEAIIVGQVNYPKVADSSSFDEDSSDALSPEQPASHESQGSVPSPLEARVSEPLLSATSASPTQVVSQLPMGRDSREMLFLAEQPPLPPPPLLPPSLTNGTTIPTAKSTPTLIKQSQPKSASEKSQRSKKAKELKPKVKKLKYHQYIPPDQKQDRGAPPMDSSYAKILQQQQLFLQLQILNQQQQQHHNYQAILPAPPKSAGEALGSSGTPPVRSLSTTNSSSSSGAPGPCGLARQNSTSLTGKPGALPANLDDMKVAELKQELKLRSLPVSGTKTELIERLRAYQDQISPVPGAPKAPAATSILHKAGEVVVAFPAARLSTGPALVAAGLAPAEVVVATVASSGVVKFGSTGSTPPVSPTPSERSLLSTGDENSTPGDTFGEMVTSPLTQLTLQASPLQILVKEEGPRAGSCCLSPGGRAELEGRDKDQMLQEKDKQIEALTRMLRQKQQLVERLKLQLEQEKRAQQPAPAPAPLGTPVKQENSFSSCQLSQQPLGPAHPFNPSLAAPATNHIDPCAVAPGPPSVVVKQEALQPEPEPVPAPQLLLGPQGPSLIKGVAPPTLITDSTGTHLVLTVTNKNADSPGLSSGSPQQPSSQPGSPAPAPSAQMDLEHPLQPLFGTPTSLLKKEPPGYEEAMSQQPKQQENGSSSQQMDDLFDILIQSGGNPRNFSRFQGAAIPAREGEAIPEDSLWVPPGSTAITFC

SEQ ID NO: 11934 - protein, 1154 aa, Homo sapiens
MSKLRMVLLEDSGSADFRRHFVNLSPFTITVVLLLSACFVTSSLGGTDKELRLVDGENKCSGRVEVKVQEEWGTVCNNGWSMEAVSVICNQLGCPTAIKAPGWANSSAGSGRIWMDHVSCRGNESALWDCKHDGWGKHSNCTHQQDAGVTCSDGSNLEMRLTRGGNMCSGRIEIKFQGRWGTVCDDNFNIDHASVICRQLECGSAVSFSGSSNFGEGSGPIWFDDLICNGNESALWNCKHQGWGKHNCDHAEDAGVICSKGADLSLRLVDGVTECSGRLEVRFQGEWGTICDDGWDSYDAAVACKQLGCPTAVTAIGRVNASKGFGHIWLDSVSCQGHEPAIWQCKHHEWGKHYCNHNEDAGVTCSDGSDLELRLRGGGSRCAGTVEVEIQRLLGKVCDRGWGLKEADVVCRQLGCGSALKTSYQVYSKIQATNTWLFLSSCNGNETSLWDCKNWQWGGLTCDHYEEAKITCSAHREPRLVGGDIPCSGRVEVKHGDTWGSICDSDFSLEAASVLCRELQCGTVVSILGGAHFGEGNGQIWAEEFQCEGHESHLSLCPVAPRPEGTCSHSRDVGVVCSSKTQKTSLIGSHTVKGTGLGSHSCLFLKPCLLPGYTEIRLVNGKTPCEGRVELKTLGAWGSLCNSHWDIEDAHVLCQQLKCGVALSTPGGARFGKGNGQIWRHMFHCTGTEQHMGDCPVTALGASLCPSEQVASVICSGNQSQTLSSCNSSSLGPTRPTIPEESAVACIESGQLRLVNGGGRCAGRVEIYHEGSWGTICDDSWDLSDAHVVCRQLGCGEAINATGSAHFGEGTGPIWLDEMKCNGKESRIWQCHSHGWGQQNCRHKEDAGVICSEFMSLRLTSEASREACAGRLEVFYNGAWGTVGKSSMSETTVGVVCRQLGCADKGKINPASLDKAMSIPMWVDNVQCPKGPDTLWQCPSSPWEKRLASPSEETWITCDNKIRLQEGPTSCSGRVEIWHGGSWGTVCDDSWDLDDAQVVCQQLGCGPALKAFKEAEFGQGTGPIWLNEVKCKGNESSLWDCPARRWGHSECGHKEDAAVNCTDISVQKTPQKATTGRSSRQSSFIAVGILGVVLLAIFVALFFLTKKRRQRQRLAVSSRGENLVHQIQYREMNSCLNADDLDLMNSSGGHSEPH

SEQ ID NO: 11935 - protein, 1690 aa, Homo sapiens
MWSLHIVLMRCSFRLTKSLATGPWSLILILFSVQYVYGSGKKYIGPCGGRDCSVCHCVPEKGSRGPPGPPGPQGPIGPLGAPGPIGLSGEKGMRGDRGPPGAAGDKGDKGPTGVPGFPGLDGIPGHPGPPGPRGKPGMSGHNGSRGDPGFPGGRGALGPGGPLGHPGEKGEKGNSVFILGAVKGIQGDRGDPGLPGLPGSWGAGGPAGPTGYPGEPGLVGPPGQPGRPGLKGNPGVGVKGQMGDPGEVGQQGSPGPTLLVEPPDFCLYKGEKGIKGIPGMVGLPGPPGRKGESGIGAKGEKGIPGFPGPRGDPGSYGSPGFPGLKGELGLVGDPGLFGLIGPKGDPGNRGHPGPPGVLVTPPLPLKGPPGDPGFPGRYGETGDVGPPGPPGLLGRPGEACAGMIGPPGPQGFPGLPGLPGEAGIPGRPDSAPGKPGKPGSPGLPGAPGLQGLPGSSVIYCSVGNPGPQGIKGKVGPPGGRGPKGEKGNEGLCACEPGPMGPPGPPGLPGRQGSKGDLGLPGWLGTKGDPGPPGAEGPPGLPGKHGASGPPGNKGAKGDMVVSRVKGHKGERGPDGPPGFPGQPGSHGRDGHAGEKGDPGPPGDHEDATPGGKGFPGPLGPPGKAGPVGPPGLGFPGPPGERGHPGVPGHPGVRGPDGLKGQKGDTISCNVTYPGRHGPPGFDGPPGPKGFPGPQGAPGLSGSDGHKGRPGTPGTAEIPGPPGFRGDMGDPGFGGEKGSSPVGPPGPPGSPGVNGQKGIPGDPAFGHLGPPGKRGLSGVPGIKGPRGDPGCPGAEGPAGIPGFLGLKGPKGREGHAGFPGVPGPPGHSCERGAPGIPGQPGLPGYPGSPGAPGGKGQPGDVGPPGPAGMKGLPGLPGRPGAHGPPGLPGIPGPFGDDGLPGPPGPKGPRGLPGFPGFPGERGKPGAEGCPGAKGEPGEKGMSGLPGDRGLRGAKGAIGPPGDEGEMAIISQKGTPGEPGPPGDDGFPGERGDKGTPGMQGRRGEPGRYGPPGFHRGEPGEKGQPGPPGPPGPPGSTGLRGFIGFPGLPGDQGEPGSPGPPGFSGIDGARGPKGNKGDPASHFGPPGPKGEPGSPGCPGHFGASGEQGLPGIQGPRGSPGRPGPPGSSGPPGCPGDHGMPGLRGQPGEMGDPGPRGLQGDPGIPGPPGIKGPSGSPGLNGLHGLKGQKGTKGASGLHDVGPPGPVGIPGLKGERGDPGSPGISPPGPRGKKGPPGPPGSSGPPGPAGATGRAPKDIPDPGPPGDQGPPGPDGPRGAPGPPGLPGSVDLLRGEPGDCGLPGPPGPPGPPGPPGYKGFPGCDGKDGQKGPVGFPGPQGPHGFPGPPGEKGLPGPPGRKGPTGLPGPRGEPGPPADVDDCPRIPGLPGAPGMRGPEGAMGLPGMRGPSGPGCKGEPGLDGRRGVDGVPGSPGPPGRKGDTGEDGYPGGPGPPGPIGDPGPKGFGPGYLGGFLLVLHSQTDQEPTCPLGMPRLWTGYSLLYLEGQEKAHNQDLGLAGSCLPVFSTLPFAYCNIHQVCHYAQRNDRSYWLASAAPLPMMPLSEEAIRPYVSRCAVCEAPAQAVAVHSQDQSIPPCPQTWRSLWIGYSFLMHTGAGDQGGGQALMSPGSCLEDFRAAPFLECQGRQGTCHFFANKYSFWLTTVKADLQFSSAPAPDTLKESQAQRQKISRCQVCVKYS

SEQ ID NO: 11936 - protein, 550 aa, Homo sapiens
MPTEENIDRMCQDLRNQLYESYYLNFISAISRSKLEDIANAALAASAVTQVAKVFDQYLNFITLEDDMFVLCNQNKELVSYRAINRPDITDTEMETVMDTIVDSLFCFFVTLGAVPIIRCSRGTAAEMVAVKLDKKLRENLRDARNSLFTGDTLGAGQFSFQRPLLVLVDRNIDLATPLHHTWTYQALVHDVLDFHLNRVNLEESSGVENSPAGARPKRKNKKSYDLTPVDKFWQKHKGSPFPEVAESVQQELESYRAQEDEVKRLKSIMGLEGEDEGAISMLSDNTAKLTSAVSSLPELLEKKRLIDLHTNVATAVLEHIKARKLDVYFEYEEKIMSKTTLDKSLLDIISDPDAGTPEDKMRLFLIYYISTQQAPSEADLEQYKKALTDAGCNLNPLQYIKQWKAFTKMASAPASYGSTTTKPMGLLSRVMNTGSQFVMEGVKNLVLKQQNLPVTRILDNLMEMKSNPETDDYRYFDPKMLRGNDSSVPRNKNPFQEAIVFVVGGGNYIEYQNLVDYIKGKQGKHILYGCSELFNATQFIKQLSQLGQK

SEQ ID NO: 11937 - protein, 410 aa, Homo sapiens
MAMRELVEAECGGANPLMKLAGHFTQDKALRQEGLRPGPWPPGAPASEAVSVLEVESPGAASEAASKPLGVASEDELVAEFLQDQNAPLVSRAPQTFKMDDLLAEMQQIEQSNFRQAPQRAPGVADLALSENWAQEFLAAGDAVDVTQDYNETDWSQEFISEVTDPLSVSPARWAEEYLEQSEEKLWLGEPEGTATDRWYDEYHPEEDLQHTASDFVAKVDDPKLANSEGTSDAWVDQFTRPVNTSALDMEFERAKSAIELQAELEEMAKRDAEAHPWLSDYDDLTSATYDKGYQFEEENPLRDHPQPFEEGLRRLQEGDLPNAVLLFEAAVQQDPKHMEAWQYLGTTQAENEQELLAISALRRCLELKPDNQTALMALAVSFTNESLQRQACETLRDWLRYTPAYAHLV

SEQ ID NO: 11938 - protein, 485 aa, Homo sapiens
METNESTEGSRSRSRSLDIQPSSEGLGPTSEPFPSSDDSPRSALAAATAAAAAAASAAAATAAFTTAKAAALSTKTPAPCSEFMEPSSDPSLLGEPCAGPGFTHNIAHGSLGFEPVYVSCIAQDTCTTTDHSSNPGPVPGSSSGPVLGSSSGAGHGSGSGSGPGCGSVPGSGSGPGPGSGPGSGPGHGSGSHPGPASGPGPDTGPDSELSPCIPPGFRNLVADRVPNYTSWSQHCPWEPQKQPPWEFLQVLEPGARGLWKPPDIKGKLMVCYETLPRGQCLLYNWEEERATNHLDQVPSMQDGSESFFFRHGHRGLLTMQLKSPMPSSTTQKDSYQPPGNVYWPLRGKREAMLEMLLQHQICKEVQAEQEPTRKLFEVESVTHHDYRMELAQAGTPAPTKPHDYRQEQPETFWIQRAPQLPGVSNIRTLDTPFRKNCSFSTPVPLSLGKLLPYEPENYPYQLGEISSLPCPGGRLGGGGGRMTPF

SEQ ID NO: 11939 - protein, 259 aa, Homo sapiens
MNLVDLWLTRSLSMCLLLQSFVLMILCFHSASMCPKGCLCSSSGGLNVTCSNANLKEIPRDLPPETVLLYLDSNQITSIPNEIFKDLHQLRVLNLSKNGIEFIDEHAFKGVAETLQTLDLSDNRIQSVHKNAFNNLKARARIANNPWHCDCTLQQVLRSMASNHETAHNVICKTSVLDEHAGRPFLNAANDADLCNLPKKTTDYAMLVTMFGWFTMVISYVVYYVRQNQEDARRHLEYLKSLPSRQKKADEPDDISTVV

SEQ ID NO: 11940 - protein, 424 aa, Homo sapiens
MEVCYQLPVLPLDRPVPQHVLSRRGAISFSSSSALFGCPNPRQLSQRRGAISYDSSDQTALYIRMLGDVRVRSRAGFESERRGSHPYIDFRIFHSQSEIEVSVSARNIRRLLSFQRYLRSSRFFRGTAVSNSLNILDDDYNGQAKCMLEKVGNWNFDIFLFDRLTNGNSLVSLTFHLFSLHGLIEYFHLDMMKLRRFLVMIQEDYHSQNPYHNAVHAADVTQAMHCYLKEPKLANSVTPWDILLSLIAAATHDLDHPGVNQPFLIKTNHYLATLYKNTSVLENHHWRSAVGLLRESGLFSHLPLESRQQMETQIGALILATDISRQNEYLSLFRSHLDRGDLCLEDTRHRHLVLQMALKCADICNPCRTWELSKQWSEKVTEEFFHQGDIEKKYHLGVSPLCDRHTESIANIQIGNYTYLDIAG

SEQ ID NO: 11941 - protein, 558 aa, Homo sapiens
MAAAALGSSSGSASPAVAELCQNTPETFLEASKLLLTYADNILRNPNDEKYRSIRIGNTAFSTRLLPVRGAVECLFEMGFEEGETHLIFPKKASVEQLQKIRDLIAIERSSRLDGSNKSHKVKSSQQPAASTQLPTTPSSNPSGLNQHTRNRQGQSSDPPSASTVAADSAILEVLQSNIQHVLVYENPALQEKALACIPVQELKRKSQEKLSRARKLDKGINISDEDFLLLELLHWFKEEFFHWVNNVLCSKCGGQTRSRDRSLLPSDDELKWGAKEVEDHYCDACQFSNRFPRYNNPEKLLETRCGRCGEWANCFTLCCRAVGFEARYVWDYTDHVWTEVYSPSQQRWLHCDACEDVCDKPLLYEIGWGKKLSYVIAFSKDEVVDVTWRYSCKHEEVIARRTKVKEALLRDTINGLNKQRQLFLSENRRKELLQRIIVELVEFISPKTPKPGELGGRISGSVAWRVARGEMGLQRKETLFIPCENEKISKQLHLCYNIVKDRYVRVSNNNQTISGWENGVWKMESIFRKVETDWHMITVFTPMLIFLVPLKLFWKQN

SEQ ID NO: 11942 - protein, 321 aa, Homo sapiens
MTQQPLRGVTSLRFNQDQSCFCCAMETGVRIYNVEPLMEKGHLVLIWDDAREGKDSKEKLVLEFTFTKPVLSVRMRHDKIVIVLKNRIYVYSFPDNPRKLFEFDTRDNPKGLCDLCPSLEKQLLVFPGHKCGSLQLVDLASTKPGTSSAPFTINAHQSDIACVSLNQPGTVVASASQKGTLIRLFDTQSKEKLVELRRGTDPATLYCHDSSFLCASSDKGTVHIFALKDTRLNRRSALARVGKVGPMIGQYVDSQWSLASFTVPAESACICAFGRNTSKNVNSVIAICVDGTFHKYVFTPDGNCNREAFDVYLDICDDDDF

SEQ ID NO: 11943 - protein, 113 aa, Homo sapiens
MKPSPSQNRRSSDTGSKAPPTFKVSLMDQSVREGQDVIMSIRVQGEPKPVVSWLRNRQPVRPDQRRFAEEAEGGLCRLRILAAERGDAGFYTCKAVNEYGARQCEARLEVRGE

SEQ ID NO: 11944 - protein, 858 aa, Homo sapiens
MKKLWVKKRFQKTGHSRRAFGRLTHDSETAEDDISDVQGTQRLELRDDGAFSTPTGGSDTLVGTSLDTPPTSVTGTSEEQVSWWGSGQTVLEQEAGSGGGTRRLPGSPRQAQATGAGPRHLGVEPLVRASRANLVGASWGSEDSLSVASDLYGSAFSLYRGRALSIHVSVPQSGLRREEPDLQPQLASEAPRRPAQPPPSKSALLPPPSPRVGKRSPPGPPAQPAATPTSPHRRTQEPVLPEDTTTEEKRGKKSKSSGPSLAGTAESRPQTPLSEASGRLSALGRSPRLVRAGSRILDKLQFFEERRRSLERSDSPPAPLRPWVPLRKARSLEQPKSERGAPWGTPGASQEELRAPGSVAERRRLFQQKAASLDERTRQRSPASDLELRFAQELGRIRRSTSREELVRSHESLRATLQRAPSPREPGEPPLFSRPSTPKTSRAVSPAAAQPPSPSSAEKPGDEPGRPRSRGPAGRTEPGEGPQQEVRRRDQFPLTRSRAIQECRSPVPPPAADPPEARTKAPPGRKREPPAQAVRFLPWATPGLEGAAVPQTLEKNRAGPEAEKRLRRGPEEDGPWGPWDRRGARSQGKGRRARPTSPELESSDDSYVSAGEEPLEAPVFEIPLQNVVVAPGADVLLKCIITANPPPQVSWHKDGSALRSEGRLLLRAEGERHTLLLREARAADAGSYMATATNELGQATCAASLTVRPGGSTSPFSSPITSDEEYLSPPEEFPEPGETWPRTPTMKPSPSQNRRSSDTGSKAPPTFKVSLMDQSVREGQDVIMSIRVQGEPKPVVSWLRNRQPVRPDQRRFAEEAEGGLCRLRILAAERGDAGFYTCKAVNEYGARQCEARLEVRGE

SEQ ID NO: 11945 - protein, 1560 aa, Homo sapiens [sequence omitted]

SEQ ID NO: 11946 - protein, 265 aa, Homo sapiens
MSFNLQSSKKLFIFLGKSLFSLLEAMIFALLPKPRKNVAGEIVLITGAGSGLGRLLALQFARLGSVLVLWDINKEGNEETCKMAREAGATRVHAYTCDCSQKEGVYRVADQTYKAFLPAMIANDHGHLVCISSSAGLSGVNGLADYCASKFAAFGFAESVFVETFVQKQKGIKTTIVCPFFIKTGMFEGCTTGCPSLLPILEPKYAVEKIVEAILQEKMYLYMPKLLYFMMFLKSFLPLKTGLLIADYLGILHAMDGFVDQKKKL

SEQ ID NO: 11947 - protein, 94 aa, Homo sapiens
MLPSKKTVRMPSVTQRLRDPDINPCLSESDASTRCLDENNYDRERCSTYFLRYKNCRRFWNSIVMQRRKNGVKPFMPTAAERDEILRAVGNMPY

SEQ ID NO: 11948 - protein, 400 aa, Homo sapiens
MDEDGGGEGGGVPEDLSLEEREELLDIRRRKKELIDDIERLKYEIAEVMTEIDNLTSVEESKTTQRNKQIAMGRKKFNMDPKKGIQFLIENDLLQSSPEDVAQFLYKGEGLNKTVIGDYLGERDEFNIKVLQAFVELHEFADLNLVQALRQFLWSFRLPGEAQKIDRMMEAFASRYCLCNPGVFQSTDTCYVLSFAIIMLNTSLHNHNVRDKPTAERFIAMNRGINEGGDLPEELLRNLYESIKNEPFKIPEDDGNDLTHTFFNPDREGWLLKLGGGRVKTWKRRWFILTDNCLYYFEYTTDKEPRGIIPLENLSIREVEDPRKPNCFELYNPSHKGQVIKACKTEADGRVVEGNHVVYRISAPSPEEKEEWMKSIKASISRDPFYDMLATRKRRIANKK

SEQ ID NO: 11949 - protein, 1622 aa, Homo sapiens
MSLLCVRVKRAKFQGSPDKFNTYVTLKVQNVKSTTVAVRGDQPSWEQDFMFEISRLDLGLSVEVWNKGLIWDTMVGTVWIALKTIRQSDEEGPGEWSTLEAETLMKDDEICGTRNPTPHKILLDTRFELPFDIPEEEARYWTYKWEQINALGADNEYSSQEESQRKPLPTAAAQCCHWTYLGWGEQQTFEDPDSAVDDRDSDYRSETSNSFPPPYHTASQPNASVHQFPVPVRSPQQLLLQGSSRDSCNDSMQSYDLDYPERRAISPTSSSRYGSSCNVSQGSSQLSELDQYHEQDDDHRETDSIHSCHSSHSLSRDGQAGFGEQEKPLEVTGQAEKEAACEPKEMKEDATTHPPPDLVLQKDHFLGPQESFPEENASSPFTQARAHWIRAVTKVRLQLQEIPDDGDPSLPQWLPEGPAGGLYGIDSMPDLRRKKPLPLVSDLSLVQSRKAGITSAMATRTSLKDEELKSHVYKKTLQALIYPISCTTPHNFEVWTATTPTYCYECEGLLWGIARQGMRCSECGVKCHEKCQDLLNADCLQRAAEKSCKHGAEDRTQNIIMAMKDRMKIRERNKPEIFEVIRDVFTVNKAAHVQQMKTVKQSVLDGTSKWSAKITITVVCAQGLQAKDKTGSSDPYVTVQVSKTKKRTKTIFGNLNPVWEEKFHFECHNSSDRIKVRVWDEDDDIKSRVKQRLKRESDDFLGQTIIEVRTLSGEMDVWYNLEKRTDKSAVSGAIRLQISVEIKGEEKVAPYHVQYTCLHENLFHYLTDIQGSGGVRIPEARGDDAWKVYFDETAQEIVDEFAMRYGIESIYQAMTHFACLSSKYMCPGVPAVMSTLLANINAYYAHTTASTNVSASDRFAASNFGKERFVKLLDQLHNSLRIDLSTYRNNFPAGSPERLQDLKSTVDLLTSITFFRMKVQELQSPPRASQVVKDCVKACLNSTYEYIFNNCHDLYSRQYQLKQELPPEEQGPSIRNLDFWPKLITLIVSIIEEDKNSYTPVLNQFPQELNVGKVSAEVMWHLFAQDMKYALEEHEKDHLCKSADYMNLHFKVKWLHNEYVRDLPVLQGQVPEYPAWFEQFVLQWLDENEDVSLEFLRGALERDKKDGFQQTSEHALFSCSVVDVFTQLNQSFEIIRKLECPDPSILAHYMRRFAKTIGKVLMQYADILSKDFPAYCTKEKLPCILMNNVQQLRVQLEKMFEAMGGKELDLEAADSLKELQVKLNTVLDELSMVFGNSFQVRIDECVRQMADILGQVRGTGNASPDARASAAQDADSVLRPLMDFLDGNLTLFATVCEKTVLKRVLKELWRVVMNTMERMIVLPPLTDQTGTQLIFTAAKELSHLSKLKDHMVREETRNLTPKQCAVLDLALDTIKQYFHAGGNGLKKTFLEKSPDLQSLRYALSLYTQTTDTLIKTFVRSQTTQVHDGKGIRFTANEDIRPEKGSGVDDPVGEVSIQVDLFTHPGTGEHKVTVKVVAANDLKWQTAGMFRPFVEVTMVGPHQSDKKRKFTTKSKSNNWAPKYNETFHFLLGNEEGPESYELQICVKDYCFAREDRVLGLAVMPLRDVTAKGSCACWCPLGRKIHMDETGLTILRILSQRSNDEVAREFVKLKSESRSTEEGS

SEQ ID NO: 11950 - protein, 535 aa, Homo sapiens
MGQGPRSPHKVGRRFPAGGKRGRGAKGSGRPLPGRKRQPWPPPDGRSEPAPDSHPHLSPEALGYFRRALSALKEAPETGEERDLMVHNIMKEVETQALALSTNRTGSEMLQELLGFSPLKPLCRVWAALRSNLRTVACHRCGVHVLQSALLQLPRLLGSAAEEEEEEEEDGKDGPTETLEELVLGLAAEVCDDFLVYCGDTHGSFVVRTLLQVLGGTILESERARPRGSQSSEAQKTPAQECKPADFEVPETFLNRLQDLSSSFLKDIAVFITDKISSFCLQVALQVLHRKLPQFCAHLCNAVIGYLSTRGSSVDGSPLLLFLRDQTSSRLLEQVLLVLEPPRLQSLFEEHLQGQLQTLAAHPIANFPLQRLLDAVTTPELLSPVFEELSPVLEAVLAQGHPGVVIALVGACRRVGAYQAKVLQLLLEAFHCAEPSSRQVACVPLFATLMAYEVYYGLTEEEGAVPAEHQVAMAAARALGDVTVLGSLLLQHLLHFSTPGLVLRSLGALTGPQLLSLAQRPGRKLLLSLGSRTRS

SEQ ID NO: 11951 - protein, 316 aa, Homo sapiens
MENVTTMNEFLLLGLTGVQELQPFFFGIFLIIYLINLIGNGSILVMVVLEPQLHSPMYFFLGNLSCLDISYSSVTLPKLLVNLVCSRRAISFLGCITQLHFFHFLGSTEAILLAIMAFDRFVAICNPLRYTVIMNPQVCILLAAAAWLISFFYALMHSVMTAHLSFCGSQKLNHFFYDVKPLLELACSDTLLNQWLLSIVTGSISMGAFFLTLLSCFYVIGFLLFKNRSCRILHKALSTCASHFMVVCLFYGPVGFTYIRPASATSMIQDRIMAIMYSAVTPVLNPLIYTLRNKEVMMALKKIFGRKLFKDWQQHH

SEQ ID NO: 11952 - protein, 1557 aa, Homo sapiens
MAGGVRLLWVSLLVLLAQLGPQPGLGRLGERLRVRFTPVVCGLRCVHGPTGSRCTPTCAPRNATSVDSGAPGGAAPGGPGFRAFLCPLICHNGGVCVKPDRCLCPPDFAGKFCQLHSSGARPPAPAVPGLTRSVYTMPLANHRDDEHGVASMVSVHVEHPQEASVVVHQVERVSGPWEEADAEAVARAEAAARAEAAAPYTVLAQSAPREDGYSDASGFGYCFRELRGGECASPLPGLRTQEVCCRGAGLAWGVHDCQLCSERLGNSERVSAPDGPCPTGFERVNGSCEDVDECATGGRCQHGECANTRGGYTCVCPDGFLLDSSRSSCISQHVISEAKGPCFRVLRDGGCSLPILRNITKQICCCSRVGKAWGRGCQLCPPFGSEGFREICPAGPGYHYSASDLRYNTRPLGQEPPRVSLSQPRTLPATSRPSAGFLPTHRLEPRPEPRPDPRPGPELPLPSIPAWTGPEIPESGPSSGMCQRNPQVCGPGRCISRPSGYTCACDSGFRLSPQGTRCIDVDECRRVPPPCAPGRCENSPGSFRCVCGPGFRAGPRAAECLDVDECHRVPPPCDLGRCENTPGSFLCVCPAGYQAAPHGASCQDVDECTQSPGLCGRGACKNLPGSFRCVCPAGFRGSACEEDVDECAQEPPPCGPGRCDNTAGSFHCACPAGFRSRGPGAPCQDVDECARSPPPCTYGRCENTEGSFQCVCPMGFQPNTAGSECEDVDECENHLACPGQECVNSPGSFQCRTCPSGHHLHRGRCTDVDECSSGAPPCGPHGHCTNTEGSFRCSCAPGYRAPSGRPGPCADVNECLEGDFCFPHGECLNTDGSFACTCAPGYRPGPRGASCLDVDECSEEDLCQSGICTNTDGSFECICPPGHRAGPDLASCLDVDECRERGPALCGSQRCENSPGSYRCVRDCDPGYHAGPEGTCDDVDECQEYGPEICGAQRCENTPGSYRCTPACDPGYQPTPGGGCQDVDECRNRSFCGAHAVCQNLPGSFQCLCDQGYEGARDGRHCVDVNECETLQGVCGAALCENVEGSFLCVCPNSPEEFDPMTGRCVPPRTSAGTFPGSQPQAPASPVLPARPPPPPLPRRPSTPRQGPVGSGRRECYFDTAAPDACDNILARNVTWQECCCTVGEGWGSGCRIQQCPGTETAEYQSLCPHGRGYLAPSGDLSLRRDVDECQLFRDQVCKSGVCVNTAPGYSCYCSNGYYYHTQRLECIDNDECADEEPACEGGRCVNTVGSYHCTCEPPLVLDGSQRRCVSNESQSLDDNLGVCWQEVGADLVCSHPRLDRQATYTECCCLYGEAWGMDCALCPAQDSDDFEALCNVLRPPAYSPPRPGGFGLPYEYGPDLGPPYQGLPYGPELYPPPALPYDPYPPPPGPFARREAPYGAPRFDMPDFEDDGGPYGESEAPAPPGPGTRWPYRSRDTRRSFPEPEEPPEGGSYAGSLAEPYEELEAEECGILDGCTNGRCVRVPEGFTCRCFDGYRLDMTRMACVDINECDEAEAASPLCVNARCLNTDGSFRCICRPGFAPTHQPHHCAPARPRA

SEQ ID NO: 11953 - protein, 731 aa, Homo sapiens
LPTGFVAPILCVLLPSPTREAATVASATGDSASERESAAPAAAPTAEAPPPSVVTRPEPQALPSPAIRAPLPDLYPFGTMRGGGFGDRDRDRDRGGFGARGGGGLPPKKFGNPGERLRKKKWDLSELPKFEKNFYVEHPEVARLTPYEVDELRRKKEITVRGGDVCPKPVFAFHHANFPQYVMDVLMDQHFTEPTPIQCQGFPLALSGRDMVGIAQTGSGKTLAYLLPAIVHINHQPYLERGDGPICLVLAPTRELAQQVQQVADDYGKCSRLKSTCIYGGAPKGPQIRDLERGVEICIATPGRLIDFLESGKTNLRRCTYLVLDEADRMLDMGFEPQIRKIVDQIRPDRQTLMWSATWPKEVRQLAEDFLRDYTQINVGNLELSANHNILQIVDVCMESEKDHKLIQLMEEIMAEKENKTIIFVETKRRCDDLTRRMRRDGWPAMCIHGDKSQPERDWVLNEFRSGKAPILIATDVASRGLDVEDVKFVINYDYPNSSEDYVHRIGRTARSTNKGTAYTFFTPGNLKQARELIKVLEEANQAINPKLMQLVDHRGGGGGGGKGGRSRYRTTSSANNPNLMYQDECDRRLRGVKDGGRRDSASYRDRSETDRAGYANGSGYGSPNSAFGAQAGQYTYGQGTYGAAAYGTSSYTAQEYGAGTYGASSTTSTGRSSQSSSQQFSGIGRSGQQPQPLMSQQFAQPPGATNMIGYMGQTAYQYPPPPPPPPPSRK

SEQ ID NO: 11954 - protein, 582 aa, Homo sapiens
MCIRQLKFFTTACVCECPQNILSPQPSCVNLGMMWTWALWMLPSLCKFSLAALPAKPENISCVYYYRKNLTCTWSPGKETSYTQYTVKRTYAFGEKHDNCTTNSSTSENRASCSFFLPRITIPDNYTIEVEAENGDGVIKSHMTYWRLENIAKTEPPKIFRVKPVLGIKRMIQIEWIKPELAPVSSDLKYTLRFRTVNSTSWMEVNFAKNRKDKNQTYNLTGLQPFTEYVIALRCAVKESKFWSDWSQEKMGMTEEEAPCGLELWRVLKPAEADGRRPVRLLWKKARGAPVLEKTLGYNIWYYPESNTNLTETMNTTNQQLELHLGGESFWVSMISYNSLGKSPVATLRIPAIQEKSFQCIEVMQACVAEDQLVVKWQSSALDVNTWMIEWFPDVDSEPTTLSWESVSQATNWTIQQDKLKPFWCYNISVYPMLHDKVGEPYSIQAYAKEGVPSEGPETKVENIGVKTVTITWKEIPKSERKGIICNYTIFYQAEGGKGFCKHAHSEVEKNPKPQIDAMDRPVVGMAPPSHCDLQPGMNHLASLNLSENGAKSTHLLGFWGLNESEVTVPERRVLRKWKELL

SEQ ID NO: 11955 - protein, 559 aa, Homo sapiens
MNPLFGPNLFLLQQEQQGLAGPLGDSLGGDHFAGGGDLPPAPLSPAGPAAYSPPGPGPAPPAAMALRNDLGSNINVLKTLNLRFRCFLAKVHELERRNRLLEKQLQQALEEGKQGRRGLGRRDQAVQTGFVSPIRPLGLQLGARPAAVCSPSARVLGSPARSPAGPLAPSAASLSSSSTSTSTTYSSSARFMPGTIWSFSHARRLGPGLEPTLVQGPGLSWVHPDGVGVQIDTITPEIRALYNVLAKVKRERDEYKRRWEEEYTVRIQLQDRVNELQEEAQEADACQEELALKVEQLKAELVVFKGLMSNNLSELDTKIQEKAMKVDMDICRRIDITAKLCDVAQQRNCEDMIQMFQVPSMGGRKRERKAAVEEDTSLSESEGPRQPDGDEEESTALSINEEMQRMLNQLREYDFEDDCDSLTWEETEETLLLWEDFSGYAMAAAEAQGEQEDSLEKVIKDTESLFKTREKEYQETIDQIELELATAKNDMNRHLHEYMEMCSMKRGLDVQMETCRRLITQSGDRKSPAFTAVPLSDPPPPPSEAEDSDRDVSSDSSMR

SEQ ID NO: 11956 - protein, 397 aa, Homo sapiens [sequence omitted]

SEQ ID NO: 11957 - protein, 347 aa, Homo sapiens
MASGILVNVKEEVTCPICLELLTQPLSLDCGHSFCQACLTANHKKSMLDKGESSCPVCRISYQPENIRPNRHVANIVEKLREVKLSPEGQKVDHCARHGEKLLLFCQEDGKVICWLCERSQEHRGHHTFLTEEVAREYQVKLQAALEMLRQKQQEAEELEADIREEKASWKTQIQYDKTNVLADFEQLRDILDWEESNELQNLEKEEEDILKSLTNSETEMVQQTQSLRELISDLEHRLQGSVMELLQGVDGVIKRTENVTLKKPETFPKNQRRVFRAPDLKGMLEVFRELTDVRRYWGKEKSHYHKPPCGLSLLLSLSFRILCSLLGSCFKIYDSPSKTHITYPSL

SEQ ID NO: 11958 - protein, 697 aa, Homo sapiens
MMAAVKSTEAHPSSNKDPTQGQKSALQGNSPDSEASRQRFRQFCYQEVTGPHEAFSKLWELCCQWLRPKTHSKEEILELLVLEQFLTILPEEIQTWVREQHPENGEEAVALVEDVQRAPGQQVLDSEKDLKVLMKEMAPLGATRESLRSQWKQEVQPEEPTFKGSQSSHQRPGEQSEAWLAPQAPRNLPQNTGLHDQETGAVVWTAGSQGPAMRDNRAVSLCQQEWMCPGPAQRALYRGATQRKDSHVSLATGVPWGYEETKTLLAILSSSQFYGKLQTCQQNSQIYRAMAEGLWEQGFLRTPEQCRTKFKSLQLSYRKVRRGRVPEPCIFYEEMNALSGSWASAPPMASDAVPGQEGSDIEAGELNHQNGEPTEVEDGTVDGADRDEKDFRNPGQEVRKLDLPVLFPNRLGFEFKNEIKKENLKWDDSEEVEINKALQRKSRGVYWHSELQKGLESEPTSRRQCRNSPGESEEKTPSQEKMSHQSFCARDKACTHILCGKNCSQSVHSPHKPALKLEKVSQCPECGKTFSRSSYLVRHQRIHTGEKPHKCSECGKGFSERSNLTAHLRTHTGERPYQCGQCGKSFNQSSSLIVHQRTHTGEKPYQCIVCGKRFNNSSQFSAHRRIHTGESPYKCAVCGKIFNNSSHFSAHRKTHTGEKPYRCSHCERGFTKNSALTRHQTVHMKAVLSSQEGRDAL

SEQ ID NO: 11959 - protein, 489 aa, Homo sapiens
MTVVGNPRSWSCQWLPILILLLGTGHGPGVEGVTHYKAGDPVILYVNKVGPYHNPQETYHYYQLPVCCPEKIRHKSLSLGEVLDGDRMAESLYEIRFRENVEKRILCHMQLSSAQVEQLRQAIEELYYFEFVVDDLPIRGFVGYMEESGFLPHSHKIGLWTHLDFHLEFHGDRIIFANVSVRDVKPHSLDGLRPDEFLGLTHTYSVRWSETSVERRSDRRRGDDGGFFPRTLEIHWLSIINSMVLVFLLVGFVAVILMRVLRNDLARYNLDEETTSAGSGDDFDQGDNGWKIIHTDVFRFPPYRGLLCAVLGVGAQFLALGTGIIVMALLGMFNVHRHGAINSAAILLYALTCCISGYVSSHFYRQIGGERWVWNIILTTSLFSVPFFLTWSVVNSVHWANGSTQALPATTILLLLTVWLLVGFPLTVIGGIFGKNNASPFDAPCRTKNIAREIPPQPWYKSTVIHMTVGGFLPFRYPPFIPWLLLSGS

SEQ ID NO: 11960 - protein, 821 aa, Homo sapiens
MDVVDPDIFNRDPRDHYDLLQRLGGGTYGEVFKARDKVSGDLVALKMVKMEPDDDVSTLQKEILILKTCRHANIVAYHGSYLWLQKLWICMEFCGAGSLQDIYQVTGSLSELQISYVCREVLQGLAYLHSQKKIHRDIKGANILINDAGEVRLADFGISAQIGATLARRLSFIGTPYWMAPEVAAVALKGGYNELCDIWSLGITAIELAELQPPLFDVHPLRVLFLMTKSGYQPPRLKEKGKWSAAFHNFIKVTLTKSPKKRPSATKMLSHQLVSQPGLNRGLILDLLDKLKNPGKGPSIGDIEDEEPELPPAIPRRIRSTHRSSSLGIPDADCCRRHMEFRKLRGMETRPPANTARLQPPRDLRSSSPRKQLSESSDDDYDDVDIPTPAEDTPPPLPPKPKFRSPSDEGPGSMGDDGQLSPGVLVRCASGPPPNSPRPGPPPSTSSPHLTAHSEPSLWNPPSRELDKPPLLPPKKEKMKRKGCALLVKLFNGCPLRIHSTAAWTHPSTKDQHLLLGAEEGIFILNRNDQEATLEMLFPSRTTWVYSINNVLMSLSGKTPHLYSHSILGLLERKETRAGNPIAHISPHRLLARKNMVSTKIQDTKGCRACCVAEGASSGGPFLCGALETSVVLLQWYQPMNKFLLVRQVLFPLPTPLSVFALLTGPGSELPAVCIGVSPGRPGKSVLFHTVRFGALSCWLGEMSTEHRGPVQVTQVEEDMVMVLMDGSVKLVTPEGSPVRGLRTPEIPMTEAVEAVAMVGGQLQAFWKHGVQVWALGSDQLLQELRDPTLTFRLLGSPRPVVVETRPVDDPTAPSNLYIQE

SEQ ID NO: 11961 - protein, 676 aa, Homo sapiens
MSRRTRCEDLDELHYQDTDSDVPEQRDSKCKVKWTHEENRTDQQCQYRWLRVLNPDLVKGPWTKEEDQKVIELVKKYGTKQWTLIAKHLKGRLGKQCRERWHNHLNPEVKKSCWTEEEDRIICEAHKVLGNRWAEIAKMLPGRTDNAVKNHWNSTIKRKVDTGGFLSESKDCKPPVYLLLELEDKDGLQSAQPTEGQGSLLTNWPSVPPTIKEEENSEEELAAATTSKEQEPIGTDLDAVRTPEPLEEFPKREDQEGSPPETSLPYKWVVEAANLLIPAVGSSLSEALDLIESDPDAWCDLSKFDLPEEPSAEDSINNSLVQLQASHQQQVLPPRQPSALVPSVTEYRLDGHTISDLSRSSRGELIPISPSTEVGGSGIGTPPSVLKRQRKRRVALSPVTENSTSLSFLDSCNSLTPKSTPVKTLPFSPSQFLNFWNKQDTLELESPSLTSTPVCSQKVVVTTPLHRDKTPLHQKHAAFVTPDQKYSMDNTPHTPTPFKNALEKYGPLKPLPQTPHLEEDLKEVLRSEAGIELIIEDDIRPEKQKRKPGLRRSPIKKVRKSLALDIVDEDVKLMMSTLPKSLSLPTTAPSNSSSLTLSGIKEDNSLLNQGFLQAKPEKAAVAQKPRSHFTTPAPMSSAWKTVACGGTRDQLFMQEKARQLLGRLKPSHTSRTLILS

SEQ ID NO: 11962 - protein, 459 aa, Homo sapiens
MAAPLEAQDQAPGEGEGLLIVKVEDSSWEQESAQHEDGRDSEACRQRFRQFCYGDVHGPHEAFSQLWELCCRWLRPELRTKEQILELLVLEQFLTVLPGEIQGWVREQHPGSGEEAVALVEDLQKQPVKAWRQDVPSEEAEPEAAGRGSQATGPPPTVGARRRPSVPQEQHSHSAQPPALLKEGRPGETTDTCFVSGVHGPVALGDIPFYFSREEWGTLDPAQRDLFWDIKRENSRNTTLGFGLKGQSEKSLLQEMVPVVPGQTGSDVTVSWSPEEAEAWESENRPRAALGPVVGARRGRPPTRRRQFRDLAAEKPHSCGQCGKRFRWGSDLARHQRTHTGEKPHKCPECDKSFRSSSDLVRHQGVHTGEKPFSCSECGKSFSRSAYLADHQRIHTGEKPFGCSDCGKSFSLRSYLLDHRRVHTGERPFGCGECDKSFKQRAHLIAHQSLHAKMAQPVG

SEQ ID NO: 11963 - protein, 530 aa, Homo sapiens
MAAYQQEEQMQLPRADAIRSRLIDTFSLIEHLQGLSQAVPRHTIRELLDPSRQKKLVLGDQHQLVRFSIKPQRIEQISHAQRLLSRLHVRCSQRPPLSLWAGWVLECPLFKNFIIFLVFLNTIILMVEIELLESTNTKLWPLKLTLEVAAWFILLIFILEILLKWLSNFSVFWKSAWNVFDFVVTMLSLLPEVVVLVGVTGQSVWLQLLRICRVLRSLKLLAQFRQIQIIILVLVRALKSMTFLLMLLLIFFYIFAVTGVYVFSEYTRSPRQDLEYHVFFSDLPNSLVTVFILFTLDHWYALLQDVWKVPEVSRIFSSIYFILWLLLGSIIFRSIIVAMMVTNFQNIRKELNEEMARREVQLKADMFKRQIIQRRKNMSHEALTSSHSKIEDSSRGASQQRESLDLSEVSEVESNYGATEEDLITSASKTEETLSKKREYQSSSCVSSTSSSYSSSSESRFSESIGRLDWETLVHENLPGLMEMDQDDRVWPRDSLFRYFELLEKLQYNLEERKKLQEFAVQALMNLEDK

SEQ ID NO: 11964 - protein, 562 aa, Homo sapiens
MIQSDKGADPPDKKDMKLSTATNPQNGLSQILRLVLQELSLFYGRDVNGVCLLYDLLHSPWLQALLKIYDCLQEFKEKKLVPATPHAQVLSYEVVELLRETPTSPEIQELRQMLQAPHFKGATIKRHEMTGDILVARIIHGGLAERSGLLYAGDKLVEVNGVSVEGLDPEQVIHILAMSRGTIMFKVVPVSDPPVNSQQMVYVRAMTEYWPQEDPDIPCMDAGLPFQKGDILQIVDQNDALWWQARKISDPATCAGLVPSNHLLKRKQREFWWSQPYQPHTCLKSTLYKEEFVGYGQKFFIAGFRRSMRLCRRKSHLSPLHASVCCTGSCYSAVGAPYEEVVRYQRRPSDKYRLIVLMGPSGVGVNELRRQLIEFNPSHFQSAVPHTTRTKKSYEMNGREYHYVSKETFENLIYSHRMLEYGEYKGHLYGTSVDAVQTVLVEGKICVMDLEPQDIQGVRTHELKPYVIFIKPSNMRCMKQSRKNAKVITDYYVDMKFKDEDLQEMENLAQRMETQFGQFFDHVIVNDSLHDACAQLLSAIQKAQEEPQWVPATWISSDTESQ

SEQ ID NO: 11965 - protein, 238 aa, Homo sapiens
MRDVTISKSEYAPSEKMITKVQDFQEDKELFRYCTLPEILKYVECFTGPNIMAMHTMLINKPPDSGKKTSRHPLHQDLHYFPFRPSDLIVCAWTAMEHISRNNGCLVVLPGTHKGSLKPHDYPKWEGGVNKMFHGIQDYEENKARVHLVMEKGDTVFFHPLLIHGSGQNKTQGFRKAISCHFASADCHYIDVKGTSQENIEKEVVGIAHKFFGAENSVNLKDIWMFRARLVKGERTNL

SEQ ID NO: 11966 - protein, 321 aa, Homo sapiens
MRCYVNIPHPTSGTISSASFHPQQFQYTLDNNVLTLEQRKFYEENGFLVIKNLVPDADIQRFRNEFEKICRKEVKPLGLTVMRDVTISKSEYAPSEKMITKVQDFQEDKELFRYCTLPEILKYVECFTGPNIMAMHTMLINKPPDSGNCKKTSRHPLHQDLHYFPFRPSDLIVCAWTAMEHISRNNGCLVVLPGTHKGSLKPHDYPKWEGGVNKMFHGIQDYEENKARVHLVMEKGDTVFFHPLLIHGSGQNKTQGFRKAISCHFASADCHYIDVKGTSQENIEKEVVGIAHKFFGAENSVNLKDIWMFRARLVKGERTNL

SEQ ID NO: 11967 - protein, 1154 aa, Homo sapiens [sequence omitted]

SEQ ID NO: 11968 - protein, 317 aa, Homo sapiens
MVRARHQPGGLCLLLLLLCQFMEDRSAQAGNCWLRQAKNGRCQVLYKTELSKEECCSTGRLSTSWTEEDVNDNTLFKWMIFNGGAPNCIPCKETCENVDCGPGKKCRMNKKNKPRCVCAPDCSNITWKGPVCGLDGKTYRNECALLKARCKEQPELEVQYQGRCKKTCRDVFCPGSSTCVVDQTNNAYCVTCNRICPEPASSEQYLCGNDGVTYSSACHLRKATCLLGRSIGLAYEGKCIKAKSCEDIQCTGGKKCLWDFKVGRGRCSLCDELCPDSKSDEPVCASDNATYASECAMKEAACSSGVLLEVKHSGSCN

SEQ ID NO: 11969 - protein, 320 aa, Homo sapiens
MSSCNFTHATFVLIGIPGLEKAHFWVGFPLLSMYVVAMFGNCIVVFIVRTERSLHAPMYLFLCMLAAIDLALSTSTMPKILALFWFDSREISFEACLTQMFFIHALSAIESTILLAMAFDRYVAICHPLRHAAVLNNTVTAQIGIVAVVRGSLFFFPLPLLIKRLAFCHSNVLSHSYCVHQDVMKLAYADTLPNVVYGLTAILLVMGVDVMFISLSYFLIIRTVLQLPSKSERAKAFGTCVSHIGVVLAFYVPLIGLSVVHRFGNSLHPIVRVVMGDIYLLLPPVINPIIYGAKTKQIRTRVLAMFKISCDKDLQAVGGK

SEQ ID NO: 11970 - protein, 639 aa, Homo sapiens
MTPASASGEDSGSFYSWQKAKREQGLVTFEDVAVDFTQEEWQYLNPPQRTLYRDVMLETYSNLVFVGQQVTKPNLILKLEVEECPAEGKIPFWNFPEVCQVDEQIERQHQDDQDKCLLMQVGFSDKKTIITKSARDCHEFGNILHLSTNLVASIQRPDKHESFGNNMVDNLDLFSRSSAENKYDNGCAKLFFHTEYEKTNPGMKPYGYKECGKGLRRKKGLSLHQRIKNGEKPFECTACRKTFSKKSHLIVHWRTHTGEKPFGCTECGKAFSQKSQLIIHLRTHTGERPFECPECGKAFREKSTVIIHYRTHTGEKPYECNECGKAFTQKSNLIVHQKTHTGEKTYECTKCGESFIQKLDLIIHHSTHTGKKPHECNECKKTFSDKSTLIIHQRTHTGEKPHKCTECGKSFNEKSTLIVHQRTHTGEKPYECDVCGKTFTQKSNLGVHQRTHSGEKPFECNECEKAFSQKSYLMLHQRGHTGEKPYECNECEKAFSQKSYLIIHQRTHTEEKPYKCNECGKAFREKSKLIIHQRIHTGEKPYECPVCWKAFSQKSQLIIHQRTHTGEKPYACTECGKAFREKSTFTVHQRTHTGEKPYKCTECGKAFTQKSNLIVHQRTHAGKKAHGRGHTRKSKFMAH

SEQ ID NO: 11971 - protein, 511 aa, Homo sapiens
MEGNKLEEQDSSPPQSTPGLMKGNKREEQGLGPEPAAPQQPTAEEEALIEFHRSYRELFEFFCNNTTIHGAIRLVCSQHNRMKTAFWAVLWLCTFGMMYWQFGLLFGEYFSYPVSLNINLNSDKLVFPAVTICTLNPYRYPEIKEELEELDRITEQTLFDLYKYSSFTTLVAGSRSRRDLRGTLPHPLQRLRVPPPPHGARRARSVASSLRDNNPQVDWKDWKIGFQLCNQNKSDCFYQTYSSGVDAVREWYRFHYINILSRLPETLPSLEEDTLGNFIFACRFNQVSCNQANYSHFHHPMYGNCYTFNDKNNSNLWMSSMPGINNGLSLMLRAEQNDFIPLLSTVTGARVMVHGQDEPAFMDDGGFNLRPGVETSISMRKETLDRLGGDYGDCTKNGSDVPVENLYPSKYTQQVCIHSCFQESMIKECGCAYIFYPRPQNVEYCDYRKHSSWGYCYYKLQVDFSSDHLGCFTKCRKPCRNGSSRCYRDRTITPSTTREMEWPKSTSSSRS

SEQ ID NO: 11972 - protein, 852 aa, Homo sapiens
MMAKSALRENGTNSETFRQRFRRFHYQEVAGPREAFSQLWELCCRWLRPEVRTKEQIVELLVLEQFLTVLPGEIQNWVQEQCPENGEEAVTLVEDLEREPGRPRSSVTVSVKGQEVRLEKMTPPKSSQELLSVRQESVEPQPRGVPKKERARSPDLGPQEQMNPKEKLKPFQRSGLPFPKSGVVSRLEQGEPWIPDLLGSKEKELPSGSHIGDRRVHADLLPSKKDRRSWVEQDHWSFEDEKVAGVHWGYEETRTLLAILSQTEFYEALRNCHRNSQVYGAVAERLREYGFLRTLEQCRTKFKGLQKSYRKVKSGHPPETCPFFEEMEALMSAQVIALPSNGLEAAASHSGLVGSDAETEEPGQRGWQHEEGAEEAVAQESDSDDMDLEATPQDPNSAAPVVFRSPGGVHWGYEETKTYLAILSETQFYEALRNCHRNSQLYGAVAERLWEYGFLRTPEQCRTKFKSLQTSYRKVKNGQAPETCPFFEEMDALVSVRVAAPPNDGQEETASCPVQGTSEAEAQKQAEEADEATEEDSDDDEEDTEIPPGAVITRAPVLFQSPRGFEAGFENEDNSKRDISEEVQLHRTLLARSERKIPRYLHQGKGNESDCRSGRQWAKTSGEKRGKLTLPEKSLSEVLSQQRPCLGERPYKYLKYSKSFGPNSLLMHQVSHQVENPYKCADCGKSFSRSARLIRHRRIHTGEKPYKCLDCGKSFRDSSNFITHRRIHTGEKPYQCGECGKCFNQSSSLIIHQRTHTGEKPYQCEECGKSFNNSSHFSAHRRIHTGERPHVCPDCGKSFSKSSDLRAHHRTHTGEKPYGCHDCGKCFSKSSALNKHGEIHAREKLLTQSAPK

SEQ ID NO: 11973 - protein, 456 aa, Homo sapiens
MFLLLPFDSLIVNLLGISLTVLFTLLLVFIIVPAIFGVSFGIRKLYMKSLLKIFAWATLRMERGAKEKNHQLYKPYTNGIIAKDPTSLEEEIKEIRRSGSSKALDNTPEFELSDIFYFCRKGMETIMDDEVTKRFSAEELESWNLLSRTNYNFQYISLRLTVLWGLGVLIRYCFLLPLRIALAFTGISLLVVGTTVVGYLPNGRFKEFMSKHVHLMCYRICVRALTAIITYHDRENRPRNGGICVANHTSPIDVIILASDGYYAMVGQVHGGLMGVIQRAMVKACPHVWFERSEVKDRHLVAKRLTEHVQDKSKLPILIFPEGTCINNTSVMMFKKGSFEIGATVYPVAIKYDPQFGDAFWNSSKYGMVTYLLRMMTSWAIVCSVWYLPPMTREADEDAVQFANRVKSAIARQGGLVDLLWDGGLKREKVKDTFKEEQQKLYSKMIVGNHKDRSRS

SEQ ID NO: 11974 - protein, 792 aa, Homo sapiens
SQKIATFTDIGNSLAHVEHLLRDLASFEEKSGVAVERARALSLDGEQLIGNKHYAVDSIRPKCQELRHLCDQFSAEIARRRGLLSKSLELHRRLETSMKWCDEGIYLLASQPVDKCQSQDGAEAALQEIEKFLETGAENKIQELNAIYKEYESILNQDLMEHVRKVFQKQASMEEVFHRRQASLKKLAARQTRPVQPVAPRPEALAKSPCPSPGIRRGSENSSSEGGALRRGPYRRAKSEMSESRQGRGSAGEEEESLAILRRHVMSELLDTERAYVEELLCVLEGYAAEMDNPLMAHLLSTGLHNKKDVLFGNMEEIYHFHNRIFLRELENYTDCPELVGRCFLERMEDFQIYEKYCQNKPRSESLWRQCSDCPFFQECQRKLDHKLSLDSYLLKPVQRITKYQLLLKEMLKYSRNCEGAEDLQEALSSILGILKAVNDSMHLIAITGYDGNLGDLGKLLMQGSFSVWTDHKRGHTKVKELARFKPMQRHLFLHEKAVLFCKKREENGEGYEKAPSYSYKQSLNMAAVGITENVKGDAKKFEIWYNAREEVYIVQAPTPEIKAAWVNEIRKVLTSQLQACREASQHRALEQSQSLPLPAPTSTSPSRGNSRNIKKLEERKTDPLSLEGYVSSAPLTKPPEKGKASPTSPDKKAKRHEVKSDPTPFGVRGWSKTSHSLEAPEDDGGWSSAEEQINSSDAEEDGGLGPKKLVPGKYTVVADHEKGGPDALRVRSGDVVELVQEGDEGLWYVRDPTTGKEGWVPASSLSVRLGPSGSAQCLSSSGKAHVPRAHP

SEQ ID NO: 11975 - protein, 325 aa, Homo sapiens
MGPRARPALLLLMLLQTAVLQGRLLPLGYVDDQLFVFYDHESRRVEPRTPWVSSRISSQMWLQLSQSLKGWDHMFTVDFWTIMENHNHSKESHTLQVILGCEMQEDNSTEGYWKYGYDGQDHLEFCPDTLDWRAAEPRAWPTKLEWERHKIRARQNRAYLERDCPAQLQQLLELGRGVLDQQVPPLVKVTHHVTSSVTTLRCRALNYYPQNITMKWLKDKQPMDAKEFEPKDVLPNGDGTYQGWITLAVPPGEEQRYTCQVEHPGLDQPLIVIWEPSPSGTLVIGVISGIAVFVVILFIGILFIILRKRQGSRGAMGHYVLAERE

SEQ ID NO: 11976 - protein, 40 aa, Homo sapiens
MGETLGDSPIDPESDSFTDTLSANISQVFQDDSCLWMSLS

SEQ ID NO: 11977 - protein, 1096 aa, Homo sapiens
MPLRGGAGPSPASHGPTHGPSDPRTCLPGRGAGGMRPHGRGALGCCGLCSFYTCHGAAGDEIMHQDIVPLCAADIQDQLKKRFAYLSGGRGQDGSPVITFPDYPAFSEIPDKEFQNVMTYLTSIPSLQDAGIGFILVIDRRRDKWTSVKASVLRIAASFPANLQLVLVLRPTGFFQRTLSDIAFKFNRDDFKMKVPVIMLSSVPDLHGYIDKSQLTEDLGGTLDYCHSRWLCQRTAIESFALMVKQTAQMLQSFGTELAETELPNDVQSTSSVLCAHTEKKDKAKEDLRLALKEGHSVLESLRELQAEGSEPSVNQDQLDNQATVQRLLAQLNETEAAFDEFWAKHQQKLEQCLQLRHFEQGFREVKAILDAASQKIATFTDIGNSLAHVEHLLRDLASFEEKSGVAVERARALSLDGEQLIGNKHYAVDSIRPKCQELRHLCDQFSAEIARRRGLLSKSLELHRRLETSMKWCDEGIYLLASQPVDKCQSQDGAEAALQEIEKFLETGAENKIQELNAIYKEYESILNQDLMEHVRKVFQKQASMEEVFHRRQASLKKLAARQTRPVQPVAPRPEALAKSPCPSPGIRRGSENSSSEGGALRRGPYRRAKSEMSESRQGRGSAGEEEESLAILRRHVMSELLDTERAYVEELLCVLEGYAAEMDNPLMAHLLSTGLHNKKDVLFGNMEEIYHFHNRIFLRELENYTDCPELVGRCFLERMEDFQIYEKYCQNKPRSESLWRQCSDCPFFQECQRKLDHKLSLDSYLLKPVQRITKYQLLLKEMLKYSRNCEGAEDLQEALSSILGILKAVNDSMHLIAITGYDGNLGDLGKLLMQGSFSVWTDHKRGHTKVKELARFKPMQRHLFLHEKAVLFCKKREENGEGYEKAPSYSYKQSLNMAAVGITENVKGDAKKFEIWYNAREEVYIVQAPTPEIKAAWVNEIRKVLTSQLQACREASQHRALEQSQSLPLPAPTSTSPSRGNSRNIKKLEERKTDPLSLEGYVSSAPLTKPPEKGKGWSKTSHSLEAPEDDGGWSSAEEQINSSDAEEDGGLGPKKLVPGKYTVVADHEKGGPDALRVRSGDVVELVQEGDEGLW

SEQ ID NO: 11978 - protein, 452 aa, Homo sapiens
MAAATGPSFWLGNETLKVPLALFALNRQRLCERLRKNPAVQAGSIVVLQGGEETQRYCTDTGVLFRQESFFHWAFGVTEPGCYGVIDVDTGKSTLFVPRLPASHATWMGKIHSKEHFKEKYAVDDVQYVDEIASVLTSQKPSVLLTLRGVNTDSGSVCREASFDGISKFEVNNTILHPEIVECLFEHYCYSRGGMRHSSYTCICGSGENSAVLHYGHAGAPNDRTIQNGDMCLFDMGGEYYCFASDITCSFPANGKFTADQKAVYEAVLRSSRAVMGAMKPGVWWPDMHRLADRIHLEELAHMGILSGSVDAMVQAHLGAVFMPHGLGHFLGIDVHDVGGYPEGVERIDEPGLRSLRTARHLQPGMVLTVEPGIYFIDHLLDEALADPARASFLNREVLQRFRGFGGVRIEEDVVVTDSGIELLTCVPRTVEEIEACMAGCDKAFTPFSGPK

SEQ ID NO: 11979 - protein, 1032 aa, Homo sapiens [sequence omitted]

SEQ ID NO: 11980 - protein, 999 aa, Homo sapiens
MEAAHLLPAADVLRHFSVTAEGGLSPAQVTGARERYGPNELPSEEGKSLWELVLEQFEDLLVRILLLAALVSFVLAWFEEGEETTTAFVEPLVIMLILVANAIVGVWQERNAESAIEALKEYEPEMGKVIRSDRKGVQRIRARDIVPGDIVEVAVGDKVPADLRLIEIKSTTLRVDQSILTGESVSVTKHTEAIPDPRAVNQDKKNMLFSGTNITSGKAVGVAVATGLHTELGKIRSQMAAVEPERTPLQRKLDEFGRQLSHAISVICVAVWVINIGHFADPAHGGSWLRGAVYYFKIAVALAVAAIPEGLPAVITTCLALGTRRMARKNAIVRSLPSVETLGCTSVICSDKTGTLTTNQMSVCRMFVVAEADAGSCLLHEFTISGTTYTPEGEVRQGDQPVRCGQFDGLVELATICALCNDSALDYNEAKGVYEKVGEATETALTCLVEKMNVFDTDLQALSRVERAGACNTVIKQLMRKEFTLEFSRDRKSMSVYCTPTRPHPTGQGSKMFVKGAPESVIERCSSVRVGSRTAPLTPTSREQILAKIRDWGSGSDTLRCLALATRDAPPRKEDMELDDCSKFVQYETDLTFVGCVGMLDPPRPEVAACITRCYQAGIRVVMITGDNKGTAVAICRRLGIFGDTEDVAGKAYTGREFDDLSPEQQRQACRTARCFARVEPAHKSRIVENLQSFNEITAMTGDGVNDAPALKKAEIGIAMGSGTAVAKSAAEMVLSDDNFASIVAAVEEGRAIYSNMKQFIRYLISSNVGEVVCIFLTAILGLPEALIPVQLLWVNLVTDGLPATALGFNPPDLDIMEKLPRSPREALISGWLFFRYLAIGVYVGLATVAAATWWFVYDAEGPHINFYQLRNFLKCSEDNPLFAGIDCEVFESRFPTTMALSVLVTIEMCNALNSVSENQSLLRMPPWMNPWLLVAVAMSMALHFLILLVPPLPLIFQVTPLSGRQWVVVLQISLPVILLDEALKYLSRNHMHEEMSQK

SEQ ID NO: 11981 - protein, 1491 aa, Homo sapiens
MYSEWRSLHLVIQNDQGHTSVLHSYPESVGREVANAVVRPLGQVLGTPSVAGSENLLKTDKEVKWTMEVICYGLTLPLDGETVKYCVDVYTDWIMALVLPKDSIPLPVIKEPNQYVQTILKHLQNLFVPRQEQGSSQIRLCLQVLRAIQKLARESSLMARETWEVLLLFLLQINDILLAPPTVQGGIAENLAEKLIGVLFEVWLLACTRCFPTPPYWKTAKEMVANWRHHPAVVEQWSKVICALTSRLLRFTYGPSFPAFKVPDEDASLIPPEMDNECVAQTWFRFLHMLSNPVDLSNPAIISSTPKFQEQFLNVSGMPQELNQYPCLKHLPQIFFRAMRGISCLVDAFLGISRPRSDSAPPTPVNRLSMPQSAAVSTTPPHNRRHRAVTVNKATMKTSTVSTAHASKVQHQTSSTSPLSSPNQTSSEPRPLPAPRRPKVNSILNLFGSWLFDAAFVHCKLHNGINRDSSMTAITTQASMEFRRKGSQMSTDTMVSNPMFDASEFPDNYEAGRAEACGTLCRIFCSKKTGEEILPAYLSRFYMLLIQGLQINDYVCHPVLASVILNSPPLFCCDLKGIDVVVPYFISALETILPDRELSKFKSYVNPTELRRSSINILLSLLPLPHHFGTVKSEVVLEGKFSNDDSSSYDKPITFLSLKLRLVNILIGALQTETDPNNTQMILGAMLNIVQDSALLEAIGCQMEMGGGENNLKSHSRTNSGISSASGGSTEPTTPDSERPAQALLRDYDSAAGLLIRSIHLVTQRLNSQWRQDMSISLAALELLSGLAKVKVMVDSGDRKRAISSVCTYIVYQCSRPAPLHSRDLHSMIVAAFQCLCVWLTEHPDMLDEKDCLKEVLEIVELGISGSKSKNNEQEVKYKGDKEPNPASMRVKDAAEATLTCIMQLLGAFPSPSGPASPCSLVNETTLIKYSRLPTINKHSFRYFVLDNSVILAMLEQPLGNEQNDFFPSVTVLVRGMSGRLAWAQQLCLLPRGAKANQKLFVPEPRPVPKNDVGFKYSVKHRPFPEEVDKIPFVKADLSIPDLHEIVTEELEERHEKLRSGMAQQIAYEIHLEQQSEEELQKRSFPDPVTDCKPPPPAQEFQTARLFLSHFGFLSLEALKEPANSRLPPHLIALDSTIPGFFDDIGYLDLLPCRPFDTVFIFYMKPGQKTNQEILKNVESSRTVQPHFLEFLLSLGWSVDVGRHPGWTGHVSTSWSINCCDDGEGSQQEEVISSEDIGASIFNGQKKVLYYADALTEIAFVVPSPVESLTDSLESNISDQDSDSNMDLMPGILKQPSLTLELFPNHTDNLNSSQRLSPSSRMRKLPQGRPVPPLGPETRVSVVWVERYDDIENFPLSELMTEISTGVETTANSSTSLRSTTLEKEVPVIFIHPLNTGLFRIKIQGATGKFNMVIPLVDGMIVSRRALGFLVRQTVINICRRKRLESDSYSPPHVRRKQKITDIVNKYRNKQLEPEFYTSLFQEVGLKNCSS

SEQ ID NO: 11982 - protein, 998 aa, Homo sapiens
MEAAHLLPAADVLRHFSVTAEGGLSPAQVTGARERYGPNELPSEEGKSLWELVLEQFEDLLVRILLLAALVSFVLAWFEEGEETTTAFVEPLVIMLILVANAIVGVWQERNAESAIEALKEYEPEMGKVIRSDRKGVQRIRARDIVPGDIVEVAVGDKVPADLRLIEIKSTTLRVDQSILTGESVSVTKHTEAIPDPRAVNQDKKNMLFSGTNITSGKAVGVAVATGLHTELGKIRSQMAAVEPERTPLQRKLDEFGRQLSHAISVICVAVWVINIGHFADPAHGGSWLRGAVYYFKIAVALAVAAIPEGLPAVITTCLALGTRRMARKNAIVRSLPSVETLGCTSVICSDKTGTLTTNQMSVCRMFVVAEADAGSCLLHEFTISGTTYTPEGEVRQGDQPVRCGQFDGLVELATICALCNDSALDYNEAKGVYEKVGEATETALTCLVEKMNVFDTDLQALSRVERAGACNTVIKQLMRKEFTLEFSRDRKSMSVYCTPTRPHPTGQGSKMFVKGAPESVIERCSSVRVGSRTAPLTPTSREQILAKIRDWGSGSDTLRCLALATRDAPPRKEDMELDDCSKFVQYETDLTFVGCVGMLDPPRPEVAACITRCYQAGIRVVMITGDNKGTAVAICRRLGIFGDTEDVAGKAYTGREFDDLSPEQQRQACRTARCFARVEPAHKSRIVENLQSFNEITAMTGDGVNDAPALKKAEIGIAMGSGTAVAKSAAEMVLSDDNFASIVAAVEEGRAIYSNMKQFIRYLISSNVGEVVCIFLTAILGLPEALIPVQLLWVNLVTDGLPATALGFNPPDLDIMEKLPRSPREALISGWLFFRYLAIGVYVGLATVAAATWWFVYDAEGPHINFYQLRNFLKCSEDNPLFAGIDCEVFESRFPTTMALSVLVTIEMCNALNSVSENQSLLRMPPWMNPWLLVAVAMSMALHFLILLVPPLPLIFQVTPLSGRQWVVVLQISLPVILLDEALKYLSRNHMHEMSQK

SEQ ID NO: 11983 - protein, 697 aa, Homo sapiens
MAVRALKLLTTLLAVVAAASQAEVESEAGWGMVTPDLLFAEGTAAYARGDWPGVVLSMERALRSRAALRALRLRCRTQCAADFPWELDPDWSPSPAQASGAAALRDLSFFGGLLRRAACLRRCLGPPAAHSLSEEMELEFRKRSPYNYLQVAYFKINKLEKAVAAAHTFFVGNPEHMEMQQNLDYYQTMSGVKEADFKDLETQPHMQEFRLGVRLYSEEQPQEAVPHLEAALQEYFVAYEECRALCEGPYDYDGYNYLEYNADLFQAITDHYIQVLNCKQNCVTELASHPSREKPFEDFLPSHYNYLQFAYYNIGNYTQAVECAKTYLLFFPNDEVMNQNLAYYAAMLGEEHTRSIGPRESAKEYRQRSLLEKELLFFAYDVFGIPFVDPDSWTPEEVIPKRLQEKQKSERETAVRISQEIGNLMKEIETLVEEKTKESLDVSRLTREGGPLLYEGISLTMNSKLLNGSQRVVMDGVISDHECQELQRLTNVAATSGDGYRGQTSPHTPNEKFYGVTVFKALKLGQEGKVPLQSAHLYYNVTEKVRRIMESYFRLDTPLYFSYSHLVCRTAIEEVQAERKDDSHPVHVDNCILNAETLVCVKEPPAYTFRDYSAILYLNGDFDGGNFYFTELDAKTVTAEVQPQCGRAVGFSSGTENPHGVKAVTRGQRCAIALWFTLDPRHSERVRAARAGQGAGR

SEQ ID NO: 11984 - protein, 487 aa, Homo sapiens
MSLPNSSCLLEDKMCEGNKTTMASPQLMPLVVVLSTICLVTVGLNLLVLYAVRSERKLHTVGNLYIVSLSVADLIVGAVVMPMNILYLLMSKWSLGRPLCLFWLSMDYVASTASIFSVFILCIDRYRSVQQPLRYLKYRTKTRASATILGAWFLSFLWVIPILGWNHFMQQTSVRREDKCETDFYDVTWFKVMTAIINFYLPTLLMLWFYAKIYKAVRQHCQHRELINRSLPSFSEIKLRPENPKGDAKKPGKESPWEVLKRKPKDAGGGSVLKSPSQTPKEMKSPVVFSQEDDREVDKLYCFPLDIVHMQAAAEGSSRDYVAVNRSHGQLKTDEQGLNTHGASEISEDQMLGDSQSFSRTDSDTTTETAPGKGKLRSGSNTGLDYIKFTWKRLRSHSRQYVSGLHMNRERKAAKQLGFIMAAFILCWIPYFIFFMVIAFCKNCCNEHLHMFTIWLGYINSTLNPLIYPLCNENFKKTFKRILHIRS

SEQ ID NO: 11985 - protein, 498 aa, Homo sapiens
MATKTELSPTARESKNAQDMQVDETLIPRKVPSLCSARYGIALVLHFCNFTTIAQNVIMNITMVAMVNSTSPQSQLNDSSEVLPVDSFGGLSKAPKSLPAKAPVYDWSPQIQGIIFGAVGYGGILTMAPSGYLAGRVGTKRVVGISLFATSFLTLCIPLATDFGIVLLIVTRIVQGLSQSSILGGQFAIWEKWGPPQERSRLCSIALSGMLLGCFTAILIGGFISETLGWPFVFYIFGGVGCVCCLLWFVVIYDDPVSYPWISTSEKEYIISSLKQQVGSSKQPLPIKAMLRSLPIWSICLGCFSHQWLVSTMVVYIPTYISSVYHVNIRDNGLLSALPFIVAWVIGMVGGYLADFLLTKKFRLITVRKIATILGSLPSSALIVSLPYLNSGYITATALLTLSCGLSTLCQSGIYINVLDIAPRYSSFLMGASRGFSSIAPVIVPTVSGFLLSQDPEFGWRNVFFLLFAVNLLGLLFYLIFGEADVQEWAKERKLTRL

SEQ ID NO: 11986 - protein, 605 aa, Homo sapiens
MMDLELPPPGLPSQQDMDLIDILWRQDIDLGVSREVFDFSQRRKEYELEKQKKLEKERQEQLQKEQEKAFFAQLQLDEETGEFLPIQPAQHIQSETSGSANYSQVAHIPKSDALYFDDCMQLLAQTFPFVDDNEVSSATFQSLVPDIPGHIESPVFIATNQAQSPETSVAQVAPVDLDGMQQDIEQVWEELLSIPELQCLNIENDKLVETTMVPSPEAKLTEVDNYHFYSSIPSMEKEVGNCSPHFLNAFEDSFSSILSTEDPNQLTVNSLNSDATVNTDFGDEFYSAFIAEPSISNSMPSPATLSHSLSELLNGPIDVSDLSLCKAFNQNHPESTAEFNDSDSGISLNTSPSVASPEHSVESSSYGDTLLGLSDSEVEELDSAPGSVKQNGPKTPVHSSGDMVQPLSPSQGQSTHVHDAQCENTPEKELPVSPGHRKTPFTKDKHSSRLEAHLTRDELRAKALHIPFPVEKIINLPVVDFNEMMSKEQFNEAQLALIRDIRRRGKNKVAAQNCRKRKLENIVELEQDLDHLKDEKEKLLKEKGENDKSLHLLKKQLSTLYLEVFSMLRDEDGKPYSPSEYSLQQTRDGNVFLVPKSKKPDVKKN

SEQ ID NO: 11987 - protein, 589 aa, Homo sapiens
MDLIDILWRQDIDLGVSREVFDFSQRRKEYELEKQKKLEKERQEQLQKEQEKAFFAQLQLDEETGEFLPIQPAQHIQSETSGSANYSQVAHIPKSDALYFDDCMQLLAQTFPFVDDNEVSSATFQSLVPDIPGHIESPVFIATNQAQSPETSVAQVAPVDLDGMQQDIEQVWEELLSIPELQCLNIENDKLVETTMVPSPEAKLTEVDNYHFYSSIPSMEKEVGNCSPHFLNAFEDSFSSILSTEDPNQLTVNSLNSDATVNTDFGDEFYSAFIAEPSISNSMPSPATLSHSLSELLNGPIDVSDLSLCKAFNQNHPESTAEFNDSDSGISLNTSPSVASPEHSVESSSYGDTLLGLSDSEVEELDSAPGSVKQNGPKTPVHSSGDMVQPLSPSQGQSTHVHDAQCENTPEKELPVSPGHRKTPFTKDKHSSRLEAHLTRDELRAKALHIPFPVEKIINLPVVDFNEMMSKEQFNEAQLALIRDIRRRGKNKVAAQNCRKRKLENIVELEQDLDHLKDEKEKLLKEKGENDKSLHLLKKQLSTLYLEVFSMLRDEDGKPYSPSEYSLQQTRDGNVFLVPKSKKPDVKKN

SEQ ID NO: 11988 - protein, 1198 aa, Homo sapiens
MGDMTNSDFYSKNQRNESSHGGEFGCTMEELRSLMELRGTEAVVKIKETYGDTEAICRRLKTSPVEGLPGTAPDLEKRKQIFGQNFIPPKKPKTFLQLVWEALQDVTLIILEIAAIISLGLSFYHPPGEGNEGCATAQGGAEDEGEAEAGWIEGAAILLSVICVVLVTAFNDWSKEKQFRGLQSRIEQEQKFTVVRAGQVVQIPVAEIVVGDIAQVKYGDLLPADGLFIQGNDLKIDESSLTGESDQVRKSVDKDPMLLSGTHVMEGSGRMLVTAVGVNSQTGIIFTLLGAGGEEEEKKDKKAKQQDGAAAMEMQPLKSAEGGDADDRKKASMHKKEKSVLQGKLTKLAVQIGKAGLVMSAITVIILVLYFTVDTFVVNKKPWLPECTPVYVQYFVKFFIIGVTVLVVAVPEGLPLAVTISLAYSVKKMMKDNNLVRHLDACETMGNATAICSDKTGTLTTNRMTVVQAYVGDVHYKEIPDPSSINTKTMELLINAIAINSAYTTKILPPEKEGALPRQVGNKTECGLLGFVLDLKQDYEPVRSQMPEEKLYKVYTFNSVRKSMSTVIKLPDESFRMYSKGASEIVLKKCCKILNGAGEPRVFRPRDRDEMVKKVIEPMACDGLRTICVAYRDFPSSPEPDWDNENDILNELTCICVVGIEDPVRPEVPEAIRKCQRAGITVRMVTGDNINTARAIAIKCGIIHPGEDFLCLEGKEFNRRIRNEKGEIEQERIDKIWPKLRVLARSSPTDKHTLVKGIIDSTHTEQRQVVAVTGDGTNDGPALKKADVGFAMGIAGTDVAKEASDIILTDDNFSSIVKAVMWGRNVYDSISKFLQFQLTVNVVAVIVAFTGACITQDSPLKAVQMLWVNLIMDTFASLALATEPPTETLLLRKPYGRNKPLISRTMMKNILGHAVYQLALIFTLLFVGEKMFQIDSGRNAPLHSPPSEHYTIIFNTFVMMQLFNEINARKIHGERNVFDGIFRNPIFCTIVLGTFAIQIVIVQFGGKPFSCSPLQLDQWMWCIFIGLGELVWGQVIATIPTSRLKFLKEAGRLTQKEEIPEEELNEDVEEIDHAERELRRGQILWFRGLNRIQTQIRVVKAFRSSLYEGLEKPESRTSIHNFMAHPEFRIEDSQPHIPLIDDTDLEEDAALKQNSSPPSSLNKNNSAIDSGINLTTDTSKSATSSSPGSPIHSLETSL

SEQ ID NO: 11989 - protein, 1011 aa, Homo sapiens
MVAAHAAHSSSSAEWIACLDKRPLERSSEDVDIIFTRLKEVKAFEKFHPNLLHQICLCGYYENLEKGITLFRQGDIGTNWYAVLAGSLDVKVSETSSHQDAVTICTLGIGTAFGESILDNTPRHATIVTRESSELLRIEQKDFKALWEKYRQYMAGLLAPPYGVMETGSNNDRIPDKENTPLIEPHVPLRPANTITKVPSEKILRAGKILRNAILSRAPHMIRDRKYHLKTYRQCCVGTELVDWMMQQTPCVHSRTQAVGMWQVLLEDGVLNHVDQEHHFQDKYLFYRFLDDEHEDAPLPTEEEKKECDEELQDTMLLLSQMGPDAHMRMILRKPPGQRTVDDLEIIYEELLHIKALSHLSTTVKRELAGVLIFESHAKGGTVLFNQGEEGTSWYIILKGSVNVVIYGKGVVCTLHEGDDFGKLALVNDAPRAASIVLREDNCHFLRVDKEDFNRILRDVEANTVRLKEHDQDVLVLEKVPAGNRASNQGNSQPQQKYTVMSGTPEKILEHFLETIRLEATLNEATDSVLNDFIMMHCVFMPNTQLCPALVAHYHAQPSQGTEQEKMDYALNNKRRVIRLVLQWAAMYGDLLQEDDVSMAFLEEFYVSVSDDARMIAALKEQLPELEKIVKQISEDAKAPQKKHKVLLQQFNTGDERAQKRQPIRGSDEVLFKVYCMDHTYTTIRVPVATSVKEVISAVADKLGSGEGLIIVKMSSGGEKVVLKPNDVSVFTTLTINGRLFACPREQFDSLTPLPEQEGPTVGTVGTFELMSSKDLAYQMTIYDWELFNCVHELELIYHTFGRHNFKKTTANLDLFLRRFNEIQFWVVTEICLCSQLSKRVQLLKKFIKIAAHCKEYKNLNSFFAIVMGLSNVAVSRLALTWEKLPSKFKKFYAEFESLMDPSRNHRAYRLTVAKLEPPLIPFMPLLIKDMTFTHEGNKTFIDNLVNFEKMRMIANTARTVRYYRSQPFNPDAAQANKNHQDVRSYVRQLNVIDNQRTLSQMSHRLEPRRP

SEQ ID NO: 11990 - protein, 1159 aa, Homo sapiens
MPGTPGSLEMGLLTFRDVAIEFSPEEWQCLDTAQQNLYRNVMLENYRNLAFLGICPHFPQDFWPEQSMEDSFQKVLLRKYEKCGHENLQLRKGCKSVDECKVHKEGYNKLNQCLTTAQSKVFQCGKYLKVFYKFLNSNRHTIRHTGKKCFKCKKCVKSFCIRLHKTQHKCVYITEKSCKCKECEKTFHWSSTLTNHKEIHTEDKPYKCEECGKAFKQLSTLTTHKIICAKEKIYKCEECGKAFLWSSTLTRHKRIHTGEKPYKCEECGKAFSHSSTLAKHKRIHTGEKPYKCEECGKAFSRSSTLAKHKRIHTGEKPYKCKECGKAFSNSSTLANHKITHTEEKPYKCKECDKAFKRLSTLTKHKIIHAGEKLYKCEECGKAFNRSSNLTIHKFIHTGEKPYKCEECGKAFNWSSSLTKHKRFHTREKPFKCKECGKAFIWSSTLTRHKRIHTGEKPYKCEECGKAFRQSSTLTKHKIIHTGEKPYKFEECGKAFRQSLTLNKHKIIHSREKPYKCKECGKAFKQFSTLTTHKIIHAGKKLYKCEECGKAFNHSSSLSTHKIIHTGEKSYKCEECGKAFLWSSTLRRHKRIHTGEKPYKCEECGKAFSHSSALAKHKRIHTGEKPYKCKECGKAFSNSSTLANHKITHTEEKPYKCKECDKTFKRLSTLTKHKIIHAGEKLYKCEECGKAFNRSSNLTIHKFIHTGEKPYKCEECGKAFNWSSSLTKHKRIHTREKPFKCKECGKAFIWSSTLTRHKRIHTGEKPYKCEECGKAFSRSSTLTKHKTIHTGEKPYKCKECGKAFKHSSALAKHKIIHAGEKLYKCEECGKAFNQSSNLTTHKIIHTKEKPSKSEECDKAFIWSSTLTEHKRIHTREKTYKCEECGKAFSQPSHLTTHKRMHTGEKPYKCEECGKAFSQSSTLTTHKIIHTGEKPYKCEECGKAFRKSSTLTEHKIIHTGEKPYKCEECGKAFSQSSTLTRHTRMHTGEKPYKCEECGKAFNRSSKLTTHKIIHTGEKPYKCEECGKAFISSSTLNGHKRIHTREKPYKCEECGKAFSQSSTLTRHKRLHTGEKPYKCGECGKAFKESSALTKHKIIHTGEKPYKCEKCGKAFNQSSILTNHKKIHTITPVIPLLWEAEAGGSRGQEMETILANTVKPLLY

SEQ ID NO: 11991 - protein, 867 aa, Homo sapiens
MLYKKYRQYMAGLLAPPYGVMETGSNNDRIPDKENTPLIEPHVPLRPANTITKVPSEKILRAGKILRNAILSRAPHMIRDRKYHLKTYRQCCVGTELVDWMMQQTPCVHSRTQAVGMWQVLLEDGVLNHVDQEHHFQDKYLFYRFLDDEHEDAPLPTEEEKKECDEELQDTMLLLSQMGPDAHMRMILRKPPGQRTVDDLEIIYEELLHIKALSHLSTTVKRELAGVLIFESHAKGGTVLFNQGEEGTSWYIILKGSVNVVIYGKGVVCTLHEGDDFGKLALVNDAPRAASIVLREDNCHFLRVDKEDFNRILRDVEANTVRLKEHDQDVLVLEKVPAGNRASNQGNSQPQQKYTVMSGTPEKILEHFLETIRLEATLNEATDSVLNDFIMMHCVFMPNTQLCPALVAHYHAQPSQGTEQEKMDYALNNKRRVIRLVLQWAAMYGDLLQEDDVSMAFLEEFYVSVSDDARMIAALKEQLPELEKIVKQISEDAKAPQKKHKVLLQQFNTGDERAQKRQPIRGSDEVLFKVYCMDHTYTTIRVPVATSVKEVISAVADKLGSGEGLIIVKMSSGGEKVVLKPNDVSVFTTLTINGRLFACPREQFDSLTPLPEQEGPTVGTVGTFELMSSKDLAYQMTIYDWELFNCVHELELIYHTFGRHNFKKTTANLDLFLRRFNEIQFWVVTEICLCSQLSKRVQLLKKFIKIAAHCKEYKNLNSFFAIVMGLSNVAVSRLALTWEKLPSKFKKFYAEFESLMDPSRNHRAYRLTVAKLEPPLIPFMPLLIKDMTFTHEGNKTFIDNLVNFEKMRMIANTARTVRYYRSQPFNPDAAQANKNHQDVRSYVRQLNVIDNQRTLSQMSHRLEPRRP

SEQ ID NO: 11992 - protein, 820 aa, Homo sapiens
MWSWKCLLFWAVLVTATLCTARPSPTLPEQAQPWGAPVEVESFLVHPGDLLQLRCRLRDDVQSINWLRDGVQLAESNRTRITGEEVEVQDSVPADSGLYACVTSSPSGSDTTYFSVNVSDALPSSEDDDDDDDSSSEEKETDNTKPNPVAPYWTSPEKMEKKLHAVPAAKTVKFKCPSSGTPNPTLRWLKNGKEFKPDHRIGGYKVRYATWSIIMDSVVPSDKGNYTCIVENEYGSINHTYQLDVVERSPHRPILQAGLPANKTVALGSNVEFMCKVYSDPQPHIQWLKHIEVNGSKIGPDNLPYVQILKTAGVNTTDKEMEVLHLRNVSFEDAGEYTCLAGNSIGLSHHSAWLTVLEALEERPAVMTSPLYLEIIIYCTGAFLISCMVGSVIVYKMKSGTKKSDFHSQMAVHKLAKSIPLRRQVTVSADSSASMNSGVLLVRPSRLSSSGTPMLAGVSEYELPEDPRWELPRDRLVLGKPLGEGCFGQVVLAEAIGLDKDKPNRVTKVAVKMLKSDATEKDLSDLISEMEMMKMIGKHKNIINLLGACTQDGPLYVIVEYASKGNLREYLQARRPPGLEYCYNPSHNPEEQLSSKDLVSCAYQVARGMEYLASKKCIHRDLAARNVLVTEDNVMKIADFGLARDIHHIDYYKKTTNGRLPVKWMAPEALFDRIYTHQSDVWSFGVLLWEIFTLGGSPYPGVPVEELFKLLKEGHRMDKPSNCTNELYMMMRDCWHAVPSQRPTFKQLVEDLDRIVALTSNQEYLDLSMPLDQYSPSFPDTRSSTCSSGEDSVFSHEPLPEEPCLPRHPAQLANGGLKRR

SEQ ID NO: 11993 - protein, 1037 aa, Homo sapiens [sequence omitted]

SEQ ID NO: 11994 - protein, 308 aa, Homo sapiens
MIHDAQMDYYGTRLATCSSDRSVKIFDVRNGGQILIADLRGHEGPVWQVAWAHPMYGNILASCSYDRKVIIWREENGTWEKSHEHAGHDSSVNSVCWAPHDYGLILACGSSDGAISLLTYTGEGQWEVKKINNAHTIGCNAVSWAPAVVPGSLIDHPSGQKPNYIKRFASGGCDNLIKLWKEEEDGQWKEEQKLEAHSDWVRDVAWAPSIGLPTSTIASCSQDGRVFIWTCDDASSNTWSPKLLHKFNDVVWHVSWSITANILAVSGGDNKVTLWKESVDGQWVCISDVNKGQGSVSASVTEGQQNEQ

SEQ ID NO: 11995 - protein, 284 aa, Homo sapiens
MIHDAQMDYYGTRLATCSSDRSVKIFDVRNGGQILIADLRGHEGPVWQVAWAHPMYGNILASCSYDRKVIIWREENGTWEKSHEHAGHDSSVNSVCWAPHDYGLILACGSSDGAISLLTYTGEGQWEVKKINNAHTIGCNAVSWAPAVVPGSLIDHPSGQKPNYIKRFASGGCDNLIKLWKEEEDGQWKEEQKLEAHSDWVRDVAWAPSIGLPTSTIASCSQDGRVFIWTCDDASSNTWSPKLLHKFNDVVWHVSWSITANILAVSGGDNKEELQMQPQIDHLP

SEQ ID NO: 11996 - protein, 638 aa, Homo sapiens
MSDKSELKAELERKKQRLAQIREEKKRKEEERKKKETDQKKEAVAPVQEESDLEKKRREAEALLQSMGLTPESPIVFSEYWVPPPMSPSSKSVSTPSEAGSQDSGDGAVGSRTLHWDTDPSVLQLHSDSDLGRGPIKLGMAKITQVDFPPREIVTYTKETQTPVMAQPKEDEEEDDDVVAPKPPIEPEEEKTLKKDEENDSKAPPHELTEEEKQQILHSEEFLSFFDHSTRIVERALSEQINIFFDYSGRDLEDKEGEIQAGAKLSLNRQFFDERWSKHRVVSCLDWSSQYPELLVASYNNNEDAPHEPDGVALVWNMKYKKTTPEYVFHCQSAVMSATFAKFHPNLVVGGTYSGQIVLWDNRSNKRTPVQRTPLSAAAHTHPVYCVNVVGTQNAHNLISISTDGKICSWSLDMLSHPQDSMELVHKQSKAVAVTSMSFPVGDVNNFVVGSEEGSVYTACRHGSKAGISEMFEGHQGPITGIHCHAAVGAVDFSHLFVTSSFDWTVKLWTTKNNKPLYSFEDNADYVYDVMWSPTHPALFACVDGMGRLDLWNLNNDTEVPTASISVEGNPALNRVRWTHSGREIAVGDSEGQIVIYDVGEQIAVPRNDEWARFGRTLAEINANRADAEEEAATRIPA

SEQ ID NO: 11997 - protein, 588 aa, Homo sapiens
MLENYRNLVFLGIAAFKPDLIIFLEQGKEPWNMKRHEMVEEPPVICSHFSQEFWPEQGIEDSFQKMILRRYDKCGHENLHLKISCTNVDECNVHKEGYNKLNQSLTTTQSKVFQCGKYANVFHKCSNSNRHKIRHTGEKGLKCKEYVRSFCMLSHLSQHERIYTRENSYKCEENGKAFNWSSTLTYYKSIHTGEKPYKCEECGKAFSKFSILTKHKVIHTGEKPYKCEECGKAFNRSSILTKHKIIHTGEKPYKCEECGKGFSSVSTLNTHKAIHAEEKPYKCEECGKASNSSSKLMEHKRIHTGEKPYKCEECGKAFSWSSSLTEHKRIHAGEKPYKCEECGKAFNRSSILTKHKIIHTGEKPYKCEGCGKAFSKVSTLNTHKAIHAEEKPYKCEECGKASNSSSKLMEHKRIHTGEKPYKCEECGKAFSWSSSLTEHKRIHAGEKPYKCEECGKAFTWSSSFTKHKRIHAAEKPYKCEECGKGFSTFSILTKHKIIHTGEKRYKCEECGKAFSWSSILTEHKIIHTGEKPYKCEECGKAFSRSSSLTRHKRIHTGEKPYKCEECGKAFKSSSTVSYHKKIHTGENP

SEQ ID NO: 11998 - protein, 1280 aa, Homo sapiens
MGSLTFRDVAIEFSLEEWQCLDTAQQNLYRNVMLENYRNLVFLGIAAFKPDLIIFLEEGKESWNMKRHEMVEESPVICSHFAQDLWPEQGIEDSFQKVILRRYEKCGHENLHLKIGYTNVDECKVHKEGYNKLNQSLTTTQSKVFQRGKYANVFHKCSNSNRHKIRHTGKKHLQCKEYVRSFCMLSHLSQHKRIYTRENSYKCEEGGKAFNWSSTLTYYKSAHTGEKPYRCKECGKAFSKFSILTKHKVIHTGEKSYKCEECGKAFNQSAILTKHKIIHTGEKPNKCEECGKAFSKVSTLTTHKAIHAGEKPYKCKECGKAFSKVSTLITHKAIHAGEKPYKCKECGKAFSKFSILTKHKVIHTGEKPYKCEECGKAYKWPSTLSYHKKIHTGEKPYKCEECGKGFSMFSILTKHEVIHTGEKPYKCEECGKAFNWSSNLMEHKKIHTGETPYKCEECGKGFSMFSILTKHKVIHNGEKPYKCEECDKATHAGEKPYKCEECGKAFNWSSNLMEHKRIHTGEKPYKCEECGKSFSTFSILTKHKVIHTGEKPYKCEECGKAYKWSSTLSYHKKIHTVEKPYKCEECGKAFNQSAILIKHKRIHTGEKPYKCEECGKTFSKVSTLTTHKAIHAGEKPYKCKECGKTFIKVSTLTTHKAIHAGEKPYKCKECGKAFSKFSILTKHKVIHTGEKPYKCEECGKAFNWSSNLMEHKRIHTGEKPYKCEECGKSFSTFSVLTKHKVIHTGEKPYKCEECGKAYKWSSTLSYHKKIHTVEKPYKCEECGKAFNRSAILIKHKRIHTDEKPYKCEECGKTFSKVSTLTTHKAIHAGEKPYKCKECGKAFSKFSILTKHKVIHTGEKPYKCEECGKAYKWPSTLSYHKKIHTGEKPYKCEECGKGFSMFSILTKHEVIHTGEKPYKCEECGKAFSWLSVFSKHKKTHAGEKFYKCEACGKAYKSSSTLSYHKKIHTEEKPYKYEECGKGFSTFSILTKHKVIHTGEKPYKCEECGKAFNWSSNLMEHKKIHTGETPYKCEECDKAFSWPSSLTEHKATHAGEKPYKCEECGKAFSWPSRLTEHKATHAGEEPYKCEECGKAFNWSSNLMEHKRIHTGEKPYKCEECGKSFSTFSILTKHKVIHTGEKPYKCEECGKAYKWSSTLSYHKKIHTVEKPYKCEECGKGFVMFSILAKHKVIHTGEKLYKCEECGKAYKWPSTLRYHKKIHTGEKPYKCEECGKAFSTFSILTKHKVIHTGEKPYKCEECGKAFSWLSVFSKHKKIHTGEKL

SEQ ID NO: 11999 - protein, 702 aa, Homo sapiens
MLLLLGLCLGLSLCVGSQEEAQSWGHSSEQDGLRVPRQVRLLQRLKTKPLMTEFSVKSTIISRYAFTTVSCRMLNRASEDQDIEFQMQIPAAAFITNFTMLIGDKVYQGEITEREKKSGDRVKEKRNKTTEENGEKGTEIFRASAVIPSKDKAAFFLSYEELLQRRLGKYEHSISVRPQQLSGRLSVDVNILESAGIASLEVLPLHNSRQRGSGRGEDDSGPPPSTVINQNETFANIIFKPTVVQQARIAQNGILGDFIIRYDVNREQSIGDIQVLNGYFVHYFAPKDLPPLPKNVVFVLDSSASMVGTKLRQTKDALFTILHDLRPQDRFSIIGFSNRIKVWKDHLISVTPDSIRDGKVYIHHMSPTGGTDINGALQRAIRLLNKYVAHSGIGDRSVSLIVFLTDGKPTVGETHTLKILNNTREAARGQVCIFTIGIGNDVDFRLLEKLSLENCGLTRRVHEEEDAGSQLIGFYDEIRTPLLSDIRIDYPPSSVVQATKTLFPNYFNGSEIIIAGKLVDRKLDHLHVEVTASNSKKFIILKTDVPVRPQKAGKDVTGSPRPGGDGEGDTNHIERLWSYLTTKELLSSWLQSDDEPEKERLRQRAQALAVSYRFLTPFTSMKLRGPVPRMDGLEEAHGMSAAMGPEPVVQSVRGAGTQPGPLLKKPYQPRIKISKTSVRGFRREEQIFSNVMKFPFASILEL

SEQ ID NO: 12000 - protein, 942 aa, Homo sapiens
MLLLLGLCLGLSLCVGSQEEAQSWGHSSEQDGLRVPRQVRLLQRLKTKPLMTEFSVKSTIISRYAFTTVSCRMLNRASEDQDIEFQMQIPAAAFITNFTMLIGDKVYQGEITEREKKSGDRVKEKRNKTTEENGEKGTEIFRASAVIPSKDKAAFFLSYEELLQRRLGKYEHSISVRPQQLSGRLSVDVNILESAGIASLEVLPLHNSRQRGSGRGEDDSGPPPSTVINQNETFANIIFKPTVVQQARIAQNGILGDFIIRYDVNREQSIGDIQVLNGYFVHYFAPKDLPPLPKNVVFVLDSSASMVGTKLRQTKDALFTILHDLRPQDRFSIIGFSNRIKVWKDHLISVTPDSIRDGKVYIHHMSPTGGTDINGALQRAIRLLNKYVAHSGIGDRSVSLIVFLTDGKPTVGETHTLKILNNTREAARGQVCIFTIGIGNDVDFRLLEKLSLENCGLTRRVHEEEDAGSQLIGFYDEIRTPLLSDIRIDYPPSSVVQATKTLFPNYFNGSEIIIAGKLVDRKLDHLHVEVTASNSKKFIILKTDVPVRPQKAGKDVTGSPRPGGDGEGDTNHIERLWSYLTTKELLSSWLQSDDEPEKERLRQRAQALAVSYRFLTPFTSMKLRGPVPRMDGLEEAHGMSAAMGPEPVVQSVRGAGTQPGPLLKKPYQPRIKISKTSVDGDPHFVVDFPLSRLTVCFNIDGQPGDILRLVSDHRDSGVTVNGELIGAPAPPNGHKKQRTYLRTITILINKPERSYLEITPSRVILDGGDRLVLPCNQSVVVGSWGLEVSVSANANVTVTIQGSIAFVILIHLYKKPAPFQRHHLGFYIANSEGLSSNCHGLLGQFLNQDARLTEDPAGPSQNLTHPLLLQVGEGPEAVLTVKGHQVPVVWKQRKIYNGEEQIDCWFARNNAAKLIDGEYKDYLASHPFDTGMTLGRGMSREL

SEQ ID NO: 12001 - protein, 821 aa, Homo sapiens
MPTVISASVAPRTAAEPRSPGPVPHPAQSKATEAGGGNPSGIYSAIISRNFPIIGVKEKTFEQLHKKCLEKKVLYVDPEFPPDETSLFYSQKFPIQFVWKRPPEICENPRFIIDGANRTDICQGELGDCWFLAAIACLTLNQHLLFRVIPHDQSFIENYAGIFHFQFWRYGEWVDVVIDDCLPTYNNQLVFTKSNHRNEFWSALLEKAYAKLHGSYEALKGGNTTEAMEDFTGGVAEFFEIRDAPSDMYKIMKKAIERGSLMGCSIDDGTNMTYGTSPSGLNMGELIARMVRNMDNSLLQDSDLDPRGSDERPTRTIIPVQYETRMACGLVRGHAYSVTGLDEVPFKGEKVKLVRLRNPWGQVEWNGSWSDRWKDWSFVDKDEKARLQHQVTEDGEFWMSYEDFIYHFTKLEICNLTADALQSDKLQTWTVSVNEGRWVRGCSAGGCRNFPDTFWTNPQYRLKLLEEDDDPDDSEVICSFLVALMQKNRRKDRKLGASLFTIGFAIYEVPKEMHGNKQHLQKDFFLYNASKARSKTYINMREVSQRFRLPPSEYVIVPSTYEPHQEGEFILRVFSEKRNLSEEVENTISVDRPVKKKKTKPIIFVSDRANSNKELGVDQESEEGKGKTSPDKQKQSPQPQPGSSDQESEEQQQFRNIFKQIAGDDMEICADELKKVLNTVVNKHKDLKTHGFTLESCRSMIALMDTDGSGKLNLQEFHHLWNKIKAWQKIFKHYDTDQSGTINSYEMRNAVNDAGFHLNNQLYDIITMRYADKHMNIDFDSFICCFVRLEGMFRAFHAFDKDGDGIIKLNVLEWLQLTMYA

SEQ ID NO: 12002 - protein, 498 aa, Homo sapiens
MELLTFRDVTIEFSLEEWEFLNPAQQSLYRKVMLENYRNLVSLGLTVSKPELISRLEQRQEPWNVKRHETIAKPPAMSSHYTEDLLPEQCMQDSFQKVILRRYGSCGLEDLHLRKDGENVGECKDQKEIYNGLNQCLSTLPSKIFPYNKCVKVFSKSSNLNRENIRHTTEKLFKCMQCGKVFKSHSGLSYHKIIHTEEKLCICEECGKTFKWFSYLTKHKRIHTGEKPYKCEECGKAFNWCSSLTKHKRIHTGEKPYKCEECGKAFHWCSPFVRHKKIHTGEKPYTCEDCGRAFNRHSHLTKHKTIHTGKKPYKCKECGKAFNHCSLLTIHERTHTGEKPYKCEECGKAFNSSSILTEHKVIHSGEKPYKCEKCDKVFKRFSYLTKHKRIHTGEKPYKCEECGKAFNWSSILTEHKRIHTGEKPYNCEECGKAFNRCSHLTRHKKIHTAVKRYKCEECGKAFKRCSHLNEHKRVQRGEKSCKYKKCGEAFNHCSNLTT

SEQ ID NO: 12003 - protein, 711 aa, Homo sapiens
MSSVQSQQEQLSQSDPSPSPNSCSSFELIDMDAGSLYEPVSPHWFYCKIIDSKETWIPFNSEDSQQLEEAYSSGKGCNGRVVPTDGGRYDVHLGERMRYAVYWDELASEVRRCTWFYKGDKDNKYVPYSESFSQVLEETYMLAVTLDEWKKKLESPNREIIILHNPKLMVHYQPVAGSDDWGSTPTEQGRPRTVKRGVENISVDIHCGEPLQIDHLVFVVHGIGPACDLRFRSIVQCVNDFRSVSLNLLQTHFKKAQENQQIGRVEFLPVNWHSPLHSTGVDVDLQRITLPSINRLRHFTNDTILDVFFYNSPTYCQTIVDTVASEMNRIYTLFLQRNPDFKGGVSIAGHSLGSLILFDILTNQKDSLGDIDSEKDSLNIVMDQGDTPTLEEDLKKLQLSEFFDIFEKEKVDKEALALCTDRDLQEIGIPLGPRKKILNYFSTRKNSMGIKRPAPQPASGANIPKESEFCSSSNTRNGDYLDVGIGQVSVKYPRLIYKPEIFFAFGSPIGMFLTVRGLKRIDPNYRFPTCKGFFNIYHPFDPVAYRIEPMVVPGVEFEPMLIPHHKGRKRMHLELREGLTRMSMDLKNNLLGSLRMAWKSFTRAPYPALQASETPEETEAEPESTSEKPSDVNTEETSVAVKEEVLPINVGMLNGGQRIDYVLQEKPIESFNEYLFALQSHLCYWESEDTVLLVLKEIYQTQGIFLDQPLQ

SEQ ID NO: 12004 - protein, 363 aa, Homo sapiens
MKRSLNENSARSTAGCLPVPLFNQKKRNRQPLTSNPLKDDSGISTPSDNYDFPPLPTDWAWEAVNPELAPVMKTVDTGQIPHSVSRPLRSQDSVFNSIQSNTGRSQGGWSYRDGNKNTSLKTWNKNDFKPQCKRTNLVANDGKNSCPVSSGAQQQKQLRIPEPPNLSRNKETELLRQTHSSKISGCTMRGLDKNSALQTLKPNFQQNQYKKQMLDDIPEDNTLKETSLYQLQFKEKASSLRIISAVIESMKYWREHAQKTVLLFEVLAVLDSAVTPGPYYSKTFLMRDGKNTLPCVFYEIDRELPRLIRGRVHRCVGNYDQKKNIFQCVSVRPASVSEQKTFQAFVKIADVEMQYYINVMNET

SEQ ID NO: 12005 - protein, 643 aa, Homo sapiens
MSPFLRIGLSNFDCGSCQSCQGEAVNPYCAVLVKEYVESENGQMYIQKKPTMYPPWDSTFDAHINKGRVMQIIVKGKNVDLISETTVELYSLAERCRKNNGKTEIWLELKPQGRMLMNARYFLEMSDTKDMNEFETEGFFALHQRRGAIKQAKVHHVKCHEFTATFFPQPTFCSVCHEFVWGLNKQGYQCRQCNAAIHKKCIDKVIAKCTGSAINSRETMFHKERFKIDMPHRFKVYNYKSPTFCEHCGTLLWGLARQGLKCDACGMNVHHRCQTKVANLCGINQKLMAEALAMIESTQQARCLRDTEQIFREGPVEIGLPCSIKNEARPPCLPTPGKREPQGISWESPLDEVDKMCHLPEPELNKERPSLQIKLKIEDFILHKMLGKGSFGKVFLAEFKKTNQFFAIKALKKDVVLMDDDVECTMVEKRVLSLAWEHPFLTHMFCTFQTKENLFFVMEYLNGGDLMYHIQSCHKFDLSRATFYAAEIILGLQFLHSKGIVYRDLKLDNILLDKDGHIKIADFGMCKENMLGDAKTNTFCGTPDYIAPELFVREPEKRLGVRGDIRQHPLFREINWEELERKEIDPPFRPKVKSPFDCSNFDKEFLNEKPRLSFADRALINSMDQNMFRNFSFMNPGMERLIS

SEQ ID NO: 12006 - protein, 1069 aa, Homo sapiens
MSDQAPKVPEEMFREVKYYAVGDIDPQVIQLLKAGKAKEVSYNALASHIISEDGDNPEVGEAREVFDLPVVKPSWVILSVQCGTLLPVNGFSPESCQIFFGITACLSQVSSEDRSALWALVTFYGGDCQLTLNKKCTHLIVPEPKGEKYECALKRASIKIVTPDWVLDCVSEKTKKDEAFYHPRLIIYEEEEEEEEEEEEVENEEQDSQNEGSTDEKSSPASSQEGSPSGDQQFSPKSNTEKSKGELMFDDSSDSSPEKQERNLNWTPAEVPQLAAAKRRLPQGKEPGLINLCANVPPVPGNILPPEVRGNLMAAGQNLQSSERSEMIATWSPAVRTLRNITNNADIQQMNRPSNVAHILQTLSAPTKNLEQQVNHSQQGHTNANAVLFSQVKVTPETHMLQQQQQAQQQQQQHPVLHLQPQQIMQLQQQQQQQISQQPYPQQPPHPFSQQQQQQQQAHPHQFSQQQLQFPQQQLHPPQQLHRPQQQLQPFQQQHALQQQFHQLQQHQLQQQQLAQLQQQHSLLQQQQQQQIQQQQLQRMHQQQQQQQMQSQTAPHLSQTSQALQHQVPPQQPPQQQQQQQPPPSPQQHQLFGHDPAVEIPEEGFLLGCVFAIADYPEQMSDKQLLATWKRIIQAHGGTVDPTFTSRCTHLLCESQVSSAYAQAIRERKRCVTAHWLNTVLKKKKMVPPHRALHFPVAFPPGGKPCSQHIISVTGFVDSDRDDLKLMAYLAGAKYTGYLCRSNTVLICKEPTGLKYEKAKEWRIPCVNAQWLGDILLGNFEALRQIQYSRYTAFSLQDPFAPTQHLVLNLLDAWRVPLKVSAELLMSIRLPPKLKQNEVANVQPSSKRARIEDVPPPTKKLTPELTPFVLFTGFEPVQVQQYIKKLYILGGEVAESAQKCTHLIASKVTRTVKFLTAISVVKHIVTPEWLEECFRCQKFIDEQNYILRDAEAEVLFSFSLEESLKRAHVSPLFKAKYFYITPGICPSLSTMKAIVECAGGKVLSKQPSFRKLMEHKQNSSLSEIILISCENDLHLCREYFARGIDVHNAEFVLTGVLTQTLDYESYKFN

SEQ ID NO: 12007 - protein, 410 aa, Homo sapiens
MVLSQRQRDELNRAIADYLRSNGYEEAYSVFKKEAELDVNEELDKKYAGLLEKKWTSVIRLQKKVMELESKLNEAKEEFTSGGPLGQKRDPKEWIPRPPEKYALSGHRSPVTRVIFHPVFSVMVSASEDATIKVWDYETGDFERTLKGHTDSVQDISFDHSGKLLASCSADMTIKLWDFQGFECIRTMHGHDHNVSSVAIMPNGDHIVSASRDKTIKMWEVQTGYCVKTFTGHREWVRMVRPNQDGTLIASCSNDQTVRVWVVATKECKAELREHEHVVECISWAPESSYSSISEATGSETKKSGKPGPFLLSGSRDKTIKMWDVSTGMCLMTLVGHDNWVRGVLFHSGGKFILSCADDKTLRVWDYKNKRCMKTLNAHEHFVTSLDFHKTAPYVVTGSVDQTVKVWECR

SEQ ID NO: 12008 - protein, 375 aa, Homo sapiens
MEFEITFRPDSGDGVLLYSYDTGSKDFLSINLAGGHVEFRFDCGSGTGVLRSEDPLTLGNWHELRVSRTAKNGILQVDKQKIVEGMAEGGFTQIKCNTDIFIGGVPNYDDVKKNSGVLKPFSGSIQKIILNDRTIHVKHDFTSGVNVENAAHPCVRAPCAHGGSCRPRKEGYDCDCPLGFEGLHCQKAIIEAIEIPQFIGRSYLTYDNPDILKRVSGSRSNVFMRFKTTAKDGLLLWRGDSPMRPNSDFISLGLRDGALVFSYNLGSGVASIMVNGSFNDGRWHRVKAVRDGQSGKITVDDYGARTGKSPGMMRQLNINGALYVGGMKEIALHTNRQYMRGLVGCISHFTLSTDYHISLVEDAVDGKNINTCGAK

SEQ ID NO: 12009 - protein, 1088 aa, Homo sapiens
MYGSARSVGKVEPSSQSPGRSPRLPRSPRLGHRRTNSTGGSSGSSVGGGSGKTLSMENIQSLNAAYATSGPMYLSDHENVGSETPKSTMTLGRSGGRLPYGVRMTAMGSSPNIASSGVASDTIAFGEHHLPPVSMASTVPHSLRQARDNTIMDLQTQLKEVLRENDLLRKDVEVKESKLSSSMNSIKTFWSPELKKERALRKDEASKITIWKEQYRVVQEENQHMQMTIQALQDELRIQRDLNQLFQQDSSSRTGEPCVAELTEENFQRLHAEHERQAKELFLLRKTLEEMELRIETQKQTLNARDESIKKLLEMLQSKGLSAKATEEDHERTRRLAEAEMHVHHLESLLEQKEKENSMLREEMHRRFENAPDSAKTKALQTVIEMKDSKISSMERGLRDLEEEIQMLKSNGALSTEEREEEMKQMEVYRSHSKFMKNKIGQVKQELSRKDTELLALQTKLETLTNQFSDSKQHIEVLKESLTAKEQRAAILQTEVDALRLRLEEKETMLNKKTKQIQDMAEEKGTQAGEIHDLKDMLDVKERKVNVLQKKIENLQEQLRDKEKQMSSLKERVKSLQADTTNTDTALTTLEEALAEKERTIERLKEQRDRDEREKQEEIDNYKKDLKDLKEKVSLLQGDLSEKEASLLDLKEHASSLASSGLKKDSRLKTLEIALEQKKEECLKMESQLKKAHEAALEARASPEMSDRIQHLEREITRYKDESSKAQAEVDRLLEILKEVENEKNDKDKKIAELERQVKDQNKKVANLKHKEQVEKKKSAQMLEEARRREDNLNDSSQQLQDSLRKKDDRIEELEEALRESVQITAEREMVLAQEESARTNAEKQVEELLMAMEKVKQELESMKAKLSSTQQSLAEKETHLTNLRAERRKHLEEVLEMKQEALLAAISEKDANIALLELSSSKKKTQEEVAALKREKDRLVQQLKQQTQNRMKLMADNYEDDHFKSSHSNQTNHKPSPDQIIQPLLELDQNRSKLKLYIGHLTTLCHDRDPLILRGLTPPASYNLDDDQAAWENELQKMTRGQLQDELEKGERDNAELQEFANAILQQIADHCPDILEQVVNALEESS

SEQ ID NO: 12010 - protein, 218 aa, Homo sapiens
MGLSTVPDLLLPLVLLELLVGIYPSGVIGLVPHLGDREKRDSVCPQGKYIHPQNNSICCTKCHKGTYLYNDCPGPGQDTDCRECESGSFTASENHLRHCLSCSKCRKEMGQVEISSCTVDRDTVCGCRKNQYRHYWSENLFQCFNCSLCLNGTVHLSCQEKQNTVCTCHAGFFLRENECVSCSKVLLCRPGWNAVARSRLTATSASQIQAILLLQPPK

SEQ ID NO: 12011 - protein, 428 aa, Homo sapiens
MKSTADLHQKLGKAIELEAIKPTYQVLNVQEKKRKSLDNEVEKTANLVISNWNQQIKAKKKLMVSTKKHEALFQLVESSKQSMTEKEKRKLLNKLTKSTEKLEKEDENYYQKNMAGYSTRLKWENTLENCYQSILELEKERIQLLCNNLNQYSQHISLFGQTLTTCHTQIHCAISKIDIEKDIQAVMEETAILSTENKSEFLLTDYFEEDPNSAMDKERRKSLLKPKLLRLQRDIEKASKDKEGLERMLKTYSSTSSFSDAKSQKDTAALMDENNLKLDLLEANSYKLSSMLAELEQRPQPSHPCSNSIFRWREKEHTHSYVKISRPFLMKRLENIVSKASSGGQSNPGSSTPAPGAAQLSSRLCKALYSFQARQDDELNLEKGDIVIIHEKKEGGWWFGSLNGKKGHFPAAYVEELPSNAGNTATKA

SEQ ID NO: 12012 - protein, 478 aa, Homo sapiens
MRDPLTDCPYNKVYKNLKEFSQNGENFCKQVTSVLQQSCVSSAWAWASEGMKSTADLHQKLGKAIELEAIKPTYQVLNVQEKKRKSLDNEVEKTANLVISNWNQQIKAKKKLMVSTKKHEALFQLVESSKQSMTEKEKRKLLNKLTKSTEKLEKEDENYYQKNMAGYSTRLKWENTLENCYQSILELEKERIQLLCNNLNQYSQHISLFGQTLTTCHTQIHCAISKIDIEKDIQAVMEETAILSTENKSEFLLTDYFEEDPNSAMDKERRKSLLKPKLLRLQRDIEKASKDKEGLERMLKTYSSTSSFSDAKSQKDTAALMDENNLKLDLLEANSYKLSSMLAELEQRPQPSHPCSNSIFRWREKEHTHSYVKISRPFLMKRLENIVSKASSGGQSNPGSSTPAPGAAQLSSRLCKALYSFQARQDDELNLEKGDIVIIHEKKEGGWWFGSLNGKKGHFPAAYVEELPSNAGNTATKA

SEQ ID NO: 12013 - protein, 911 aa, Homo sapiens
MNFQAGGGQSPQQQQSLAAPGGGGAAAQQLVCGGQFGGAGPGAGGGGGPSQQLAGGPPQQFALSNSAAIRAEIQRFESVHPNIYAIYDLIERIEDLALQNQIREHVISIEDSFVNSQEWTLSRSVPELKVGIVGNLSSGKSALVHRYLTGTYVQEESPEGGRFKKEIVVDGQSYLLLIRDEGGPPELQFAAWVDAVVFVFSLEDEISFQTVYNYFLRLCSFRNASEVPMVLVGTQDAISAANPRVIDDSRARKLSTDLKRCTYYETCATYGLNVERVFQDVAQKVVALRKKQQLAIGPCKSLPNSPSHSAVSAASIPAVHINQATNGGGSAFSDYSSSVPSTPSISQRELRIETIAASSTPTPIRKQSKRRSNIFTSRKGADLDREKKAAECKVDSIGSGRAIPIKQGILLKRSGKSLNKEWKKKYVTLCDNGLLTYHPSLHDYMQNIHGKEIDLLRTTVKVPGKRLPRATPATAPGTSPRANGLSVERSNTQLGGGTGAPHSASSASLHSERPLSSSAWAGPRPEGLHQRSCSVSSADQWSEATTSLPPGMQHPASGPAEVLSSSPKLDPPPSPHSNRKKHRRKKSTGTPRPDGPSSATEEAEESFEFVVVSLTGQTWHFEASTAEERELWVQSVQAQILASLQGCRSAKDKTRLGNQNAALAVQAVRTVRGNSFCIDCDAPNPDWASLNLGALMCIECSGIHRHLGAHLSRVRSLDLDDWPPELLAVMTAMGNALANSVWEGALGGYSKPGPDACREEKERWIRAKYEQKLFLAPLPSSDVPLGQQLLRAVVEDDLRLLVMLLAHGSKEEVNETYGDGDGRTALHLSSAMANVVFTQLLIWYGVDVRSRDARGLTPLAYARRAGSQECADILIQHGCPGEGCGLAPTPNREPANGTNPSAELHRSPSLL

SEQ ID NO: 12014 - protein, 172 aa, Homo sapiens
MSVEHADIWVKSYSLYSRERYICNSGFKRKAGTSSLTECVLNKATNVAHWTTPSLKCIKPAASSPSSNNTAATTAAIVPGSQLMPSKSPSTGTTEISSHESSHGTPSQTTAKNWELTASASHQPPGVYPQGHSDTTVAISTSTVLLCGLSAVSLLACYLKSRQTPPLASVEM

SEQ ID NO: 12015 - protein, 353 aa, Homo sapiens
MRLAGRQVPEQRSPPPPGLGSARPGSPAVSCGAAAMAPRRARGCRTLGLPALLLLLLLRPPATRDARDRLAVLAGRSRISESFNHEVQTHEACVRLRTMENCPQCHHHRTSRQQAGITCPPPMSVEHADIWVKSYSLYSRERYICNSGFKRKAGTSSLTECVLNKATNVAHWTTPSLKCIRDPALVHQRPAPPSTVTTAGVTPQPESLSPSGKEPAASSPSSNNTAATTAAIVPGSQLMPSKSPSTGTTEISSHESSHGTPSQTTAKNWELTASASHQPPGVYPQGHSDTTVAISTSTVLLCGLSAVSLLACYLKSRQTPPLASVEMEAMEALPVTWGTSSRDEDLENCSHHL

SEQ ID NO: 12016 - protein, 169 aa, Homo sapiens
MAPRRARGCRTLGLPALLLLLLLRPPATREPAASSPSSNNTAATTAAIVPGSQLMPSKSPSTGTTEISSHESSHGTPSQTTAKNWELTASASHQPPGVYPQGHSDTTVAISTSTVLLCGLSAVSLLACYLKSRQTPPLASVEMEAMEALPVTWGTSSRDEDLENCSHHL

SEQ ID NO: 12017 - protein, 308 aa, Homo sapiens
MAPRRARGCRTLGLPALLLLLLLRPPATRDARDRLAVLAGRSRISESFNHEVQTHEACVRLRTMENCPQCHHHRTSRQQAGITCPPPMSVEHADIWVKSYSLYSRERYICNSGFKRKAGTSSLTECVLNKATNVAHWTTPSLKCIRDPALVHQRPAPPSTVTTAGVTPQPESLSPSGKEPAASSPSSNNTAATTAAIVPGSQLMPSKSPSTGTTEISSHESSHGTPSQTTAKNWELTASASHQPPGVYPQGHSDTTVAISTSTVLLCGLSAVSLLACYLKSSLDAFIKIRGGFSTWLLGLPHSTVGSG

SEQ ID NO: 12018 - protein, 252 aa, Homo sapiens
MAPRRARGCRTLGLPALLLLLLLRPPATRGITCPPPMSVEHADIWVKSYSLYSRERYICNSGFKRKAGTSSLTECVLNKATNVAHWTTPSLKCIRDPALVHQRPAPPSTVTTAGVTPQPESLSPSGKEPAASSPSSNNTAATTAAIVPGSQLMPSKSPSTGTTEISSHESSHGTPSQTTAKNWELTASASHQPPGVYPQGHSDTTVAISTSTVLLCGLSAVSLLACYLKSRASVCSCHPRSAGHTCSVGSVC

SEQ ID NO: 12019 - protein, 538 aa, Homo sapiens
MASDPIFTLAPPLHCHYGAFPPNASGWEQPPNASGVSVASAALAASAASRVATSTDPSCSGFAPPDFNHCLKDWDYNGLPVLTTNAIGQWDLVCDLGWQVILEQILFILGFASGYLFLGYPADRFGRRGIVLLTLGLVGPCGVGGAAAGSSTGVMALRFLLGFLLAGVDLGVYLMRLELCDPTQRLRVALAGELVGVGGHFLFLGLALVSKDWRFLQRMITAPCILFLFYGWPGLFLESARWLIVKRQIEEAQSVLRILAERNRPHGQMLGEEAQEALQDLENTCPLPATSSFSFASLLNYRNIWKNLLILGFTNFIAHAIRHCYQPVGGGGSPSDFYLCSLLASGTAALACVFLGVTVDRFGRRGILLLSMTLTGIASLVLLGLWDCEHPIFPTVWAQQGNPNRDLNEAAITTFSVLGLFSSQAAAILSTLLAAEVIPTTVRGRGLGLIMALGALGGLSGPAQRLHMGHGAFLQHVVLAACALLCILSIMLLPETKRKLLPEVLRDGELCRRPSLLRQPPPTRCDHVPLLATPNPAL

SEQ ID NO: 12020 - protein, 986 aa, Homo sapiens
MAKSNSVGQDSCQDSEGDMIFPAESSCALPQEGSAGPGSPGSAPPSRKRSWSSEEESNQATGTSRWDGVSKKAPRHHLSVPCTRPREARQEAEDSTSRLSAESGETDQDAGDVGPDPIPDSYYGLLGTLPCQEALSHICSLPSEVLRHVFAFLPVEDLYWNLSLVCHLWREIISDPLFIPWKKLYHRYLMNEEQAVSKVDGILSNCGIEKESDLCVLNLIRYTATTKCSPSVDPERVLWSLRDHPLLPEAEACVRQHLPDLYAAAGGVNIWALVAAVVLLSSSVNDIQRLLFCLRRPSSTVTMPDVTETLYCIAVLLYAMREKGINISNRIHYNIFYCLYLQENSCTQATKVKEEPSVWPGKKTIQLTHEQQLILNHKMEPLQVVKIMAFAGTGKTSTLVKYAEKWSQSRFLYVTFNKSIAKQAERVFPSNVICKTFHSMAYGHIGRKYQSKKKLNLFKLTPFMVNSVLAEGKGGFIRAKLVCKTLENFFASADEELTIDHVPIWCKNSQGQRVMVEQSEKLNGVLEASRLWDNMRKLGECTEEAHQMTHDGYLKLWQLSKPSLASFDAIFVDEAQDCTPAIMNIVLSQPCGKIFVGDPHQQIYTFRGAVNALFTVPHTHVFYLTQSFRFGVEIAYVGATILDVCKRVRKKTLVGGNHQSGIRGDAKGQVALLSRTNANVFDEAVRVTEGEFPSRIHLIGGIKSFGLDRIIDIWILLQPEEERRKQNLVIKDKFIRRWVHKEGFSGFKRYVTAAEDKELEAKIAVVEKYNIRIPELVQRIEKCHIEDLDFAEMESHHVGQAGLELPTSEYILGTVHKAKGLEFDTVHVLDDFVKVPCARHNLPQLPHFRVESFSEDEWNLLYVAVTRAKKRLIMTKSLENILTLAGEYFLQAELTSNVLKTGVVRCCVGQCNNAIPVDTVLTMKKLPITYSNRKENKGGYLCHSCAEQRIGPLAFLTASPEQVRAMERTVENIVLPRHEALLFLVF

SEQ ID NO: 12021 - protein, 849 aa, Homo sapiens
MLWALWPRWLADKMLPLLGAVLLQKREKRGPLWRHWRRETYPYYDLQVKVLRATNIRGTDLLSKADCYVQLWLPTASPSPAQTRIVANCSDPEWNETFHYQIHGAVKNVLELTLYDKDILGSDQLSLLLFDLRSLKCGQPHKHTFPLNHQDSQELQVEFVLEKSQVPASEVITNGVLVAHPCLRIQGTLRGDGTAPREEYGSRQLQLAVPGAYEKPQLLPLQPPTEPGLPPTFTFHVNPVLSSRLHVELMELLAAVQSGPSAELEAQTSKLGEGGILLSSLPLGQEEQCSVALGEGQEVALSMKVEMSSGDLDLRLGFDLSDGEQEFLDRRKQVVSKALQQVLGLSEALDSGQVPVVAVLGSGGGTRAMSSLYGSLAGLQELGLLDTVTYLSGVSGSTWCISTLYRDPAWSQVALQGPIERAQVHVCSSKMGALSTERLQYYTQELGVRERSGHSVSLIDLWGLLVEYLLYQEENPAKLSDQQEAVRQGQNPYPIYTSVNVRTNLSGEDFAEWCEFTPYEVGFPKYGAYVPTELFGSELFMGRLLQLQPEPRICYLQGMWGSAFATSLDEIFLKTAGSGLSFLEWYRGSVNITDDCQKPQLHNPSRLRTRLLTPQGPFSQAVLDIFTSRFTSAQSFNFTRGLCLHKDYVAGREFVAWKDTHPDAFPNQLTPMRDCLYLVDGGFAINSPFPLALLPQRAVDLILSFDYSLEAPFEVLKMTEKYCLDRGIPFPSIEVGPEDMEEARECYLFAKAEDPRSPIVLHFPLVNRTFRTHLAPGVERQTAEEKAFGDFVINRPDTPYGMMNFTYEPQDFYRLVALSRYNVLNNVETLKCALQLALDRHQARERAGA

SEQ ID NO: 12022 - protein, 2022 aa, Homo sapiens
MSVKEAGSSGRREQAAYHLHIYPQLSTTESQASCRVTATKDSTTSDVIKDAIASLRLDGTKCYVLVEVKESGGEEWVLDANDSPVHRVLLWPRRAQDEHPQEDGYYFLLQERNADGTIKYVHMQLVAQATATRRLVERGLLPRQQADFDDLCNLPELTEGNLLKNLKHRFLQQKIYTYAGSILVAINPFKFLPIYNPKYVKMYENQQLGKLEPHVFALADVAYYTMLRKRVNQCIVISGESGSGKTQSTNFLIHCLTALSQKGYASGVERTILGAGPVLEAFGNAKTAHNNNSSRFGKFIQVSYLESGIVRGAVVEKYLLEKSRLVSQEKDERNYHVFYYLLLGVSEEERQEFQLKQPEDYFYLNQHNLKIEDGEDLKHDFERLKQAMEMVGFLPATKKQIFAVLSAILYLGNVTYKKRATGREEGLEVGPPEVLDTLSQLLKVKREILVEVLTKRKTVTVNDKLILPYSLSEAITARDSMAKSLYSALFDWIVLRINHALLNKKDVEEAVSCLSIGVLDIFGFEDFERNSFEQFCINYANEQLQYYFNQHIFKLEQEEYQGEGITWHNIGYTDNVGCIHLISKKPTGLFYLLDEESNFPHATSQTLLAKFKQQHEDNKYFLGTPVMEPAFIIQHFAGKVKYQIKDFREKNMDYMRPDIVALLRGSDSSYVRELIGMDPVAVFRWAVLRAAIRAMAVLREAGRLRAERAEKAAGMSSPGAQSHPEELPRGASTPSEKLYRDLHNQMIKSIKGLPWQGEDPRSLLQSLSRLQKPRAFILKSKGIKQKQIIPKNLLDSKSLKLIISMTLHDRTTKSLLHLHKKKKPPSISAQFQTSLNKLLEALGKAEPFFIRCIRSNAEKKELCFDDELVLQQLRYTGMLETVRIRRSGYSAKYTFQDFTEQFQVLLPKDAQPCREVISTLLEKMKIDKRNYQIGKTKVFLKETERQALQETLHREVVRKILLLQSWFRMVLERRHFLQMKRAAVTIQACWRSYRVRRALERTQAAVYLQASWRGYWQRKLYRHQKQSIIRLQSLCRGHLQRKSFSQMISEKQKAEEKEREALEAARAGAEEGGQGQAAGGQQVAEQGPEPAEDGGHLASEPEVQPSDRSPLEHSSPEKEAPSPEKTLPPQKTVAAESHEKVPSSREKRESRRQRGLEHVKFQNKHIQSCKEESALREPSRRVTQEQGVSLLEDKKESREDETLLVVETEAENTSQKQPTEQPQAMAVGKVSEETEKTLPSGSPRPGQLERPTSLALDSRVSPPAPGSAPETPEDKSKPCGSPRVQEKPDSPGGSTQIQRYLDAERLASAVELWRGKKLVAAASPSAMLSQSLDLSDRHRATGAALTPTEERRTSFSTSDVSKLLPSLAKAQPAAETTDGERSAKKPAVQKKKPGDASSLPDAGLSPGSQVDSKSTFKRLFLHKTKDKKYSLEGAEELENAVSGHVVLEATTMKKGLEAPSGQQHRHAAGEKRTKEPGGKGKKNRNVKIGKITVSEKWRESVFRQITNANELKYLDEFLLNKINDLRSQKTPIESLFIEATEKFRSNIKTMYSVPNGKIHVGYKDLMENYQIVVSNLATERGQKDTNLVLNLFQSLLDEFTRGYTKNDFEPVKQSKAQKKKRKQERAVQEHNGHVFASYQVSIPQSCEQCLSYIWLMDKALLCSVCKMTCHKKCVHKIQSHCSYTYGRKGEPGVEPGHFGVCVDSLTSDKASVPIVLEKLLEHVEMHGLYTEGLYRKSGAANRTRELRQALQTDPAAVKLENFPIHAITGVLKQWLRELPEPLMTFAQYGDFLRAVELPEKQEQLAAIYAVLEHLPEANHNSLERLIFHLVKVALLEDVNRMSPGALAIIFAPCLLRCPDNSDPLTSMKDVLKITTCVEMLIKEQMRKYKVKMEEISQLEAAESIAFRRLSLLRQNAPWPLKLGFSSPYEGVLNKSPKTRDIQEEELEVLLEEEAAGGDEDREKEILIERIQSIKEEKEDITYRLPELDPRGSDEENLDSETSASTESLLEERAGRGASEGQY

SEQ ID NO: 12023 - protein, 398 aa, Homo sapiens
MEGAALLRVSVLCIWMSALFLGVGVRAEEAGARVQQNVPSGTDTGDPQSKPLGDWAAGTMDPESSIFIEDAIKYFKEKVSTQNLLLLLTDNEAWNGFVAAAELPRNEADELRKALDNLARQMIMKDKNWHDKGQQYRNWFLKEFPRLKSELEDNIRRLRALADGVQKVHKGTTIANVVSGSLSISSGILTLVGMGLAPFTEGGSLVLLEPGMELGITAALTGITSSTMDYGKKWWTQAQAHDLVIKSLDKLKEVREFLGENISNFLSLAGNTYQLTRGIGKDIRALRRARANLQSVPHASASRPRVTEPISAESGEQVERVNEPSILEMSRGVKLTDVAPVSFFLVLDVVYLVYESKHLHEGAKSETAEELKKVAQELEEKLNILNNNYKILQADQEL

SEQ ID NO: 12024 - protein, 330 aa, Homo sapiens
MERFMEQVVFKYLRAEPEDHYFLMTEPPLNTPENREYLAEIMFESFNVPGLYIAVQAVLALAASWTSRQVGERTLTGIVIDSGDGVTHVIPVAEGYVIGSCIKHIPIAGRDITYFIQQLLREREVGIPPEQSLETAKAIKEKYCYICPDIVKEFAKYDVDPRKWIKQYTGINAINQKKFVIDVGYERFLGPEIFFHPEFANPDFMESISDVVDEVIQNCPIDVRRPLYKNVVLSGGSTMFRDFGRRLQRDLKRVVDARLRLSEELSGGRIKPKPVEVQVVTHHMQRYAVWFGGSMLASTPEFFQVCHTKKDYEEYGPSICRHNPVFGVMS

SEQ ID NO: 12025 - protein, 297 aa, Homo sapiens
MKTLSPDRIQPHIMTDVPATFTQAECNGDKPPENGQQTITKISEELTDVDSPLPHYRVEPSLEGALTKGSQEERRKLQGNMLLNSSMEDKMLKENPEEKLFIVHKAITDLSLQETSADEMTFREGHQWEKIPLSGSNQEIRRQKERITEQPLKEEEDEDRKNKGHQAAEIEWLGFRKPSQADMLHSKHDEEQKVWDEEIDDDDDDNCNNDEDEVRVIEFKKKHEEVSQFKEEGDASEDSPLSSASSQAVTPDEQPTLGKKSDISRNAYSRYNTISYRKIRKGNTKQRIDEFESMMHL

SEQ ID NO: 12026 - protein, 1074 aa, Homo sapiens
MVYFGSSQDEEEVEEEDDETEDVKTATNNASSSCQSTPRKGKTHKHVHNGHVFNGSSRSTREKEPVQKHKSKEATPAKEKHSDHRADSRREQASANHPAAAPSTGSSAKGLAATHHHPPLHRSAQDLRKQVSKVNGVTRMSSLGAGVTSAKKMREVRPSPSKTVKYTATVTKGAVTYTKAKRELVKDTKPNHHKPSSAVNHTISGKTESSNAKTRKQVLSLGGASKSTGPAVNGLKVSGRLNPKSCTKEVGGRQLREGLQLREGLRNSKRRLEEAHQAEKPQSPPKKMKGAAGPAEGPGKKAPAERGLLNGHVKKEVPERSLERNRPKRATAGKSTPGRQAHGKADSASCENRSTSQPESVHKPQDSGKAEKGGGKAGWAAMDEIPVLRPSAKEFHDPLIYIESVRAQVEKFGMCRVIPPPDWRPECKLNDEMRFVTQIQHIHKLGRRWGPNVQRLACIKKHLKSQGITMDELPLIGGCELDLACFFRLINEMGGMQQVTDLKKWNKLADMLRIPRTAQDRLAKLQEAYCQYLLSYDSLSPEEHRRLEKEVLMEKEILEKRKGPLEGHTENDHHKFHPLPRFEPKNGLIHGVAPRNGFRSKLKEVGQAQLKTGRRRLFAQEKEVVKEEEEDKGVLNDFHKCIYKGRSVSLTTFYRTARNIMSMCFSKEPAPAEIEQEYWRLVEEKDCHVAVHCGKVDTNTHGSGFPVGKSEPFSRHGWNLTVLPNNTGSILRHLGAVPGVTIPWLNIGMVFSTSCWSRDQNHLPYIDYLHTGADCIWYCIPAEEENKLEDVVHTLLQANGTPGLQMLESNVMISPEVLCKEGIKVHRTVQQSGQFVVCFPGSFVSKVCCGYSVSETVHFATTQWTSMGFETAKEMKRRHIAKPFSMEKLLYQIAQAEAKKENGPTLSTISALLDELRDTELRQRRQLFEAGLHSSARYGSHDGSSTVADGKKKPRKWLQLETSERRCQICQHLCYLSMVVQENENVVFCLECALRHVEKQKSCRGLKLMYRYDEEQIISLVNQICGKVSGKNGSIENCLSKPTPKRGPRKRATVDVPPSRLSASSSSKSASSSS

SEQ ID NO: 12027 - protein, 666 aa, Homo sapiens
MALFYVARYPGPDAAAAAGPEGAEAGAHGRARALLERLQSRARERQQQREPAQTEAAASTEPATRRRRRPRRRRRVNDAEPGSPEAPQGKRRKADGEDAGAESNEEAPGEPSAGSSEEAPGEPSAGSSEEAPGERSTSASAEAAPDGPALEEAAGPLVPGLVLGGFGKRKAPKVQPFLPRWLAEPNCVRRNVTEDLVPIEDIPDVHPDLQKQLRAHGISSYFPVQAAVIPALLESAACGFLVGRGGYRPSDLCVSAPTGSGKTLAFVIPVVQALLSRVVCHIRALVVLPTKELAQQVSKVFNIYTDATPLRVSLVTGQKSLAKEQESLVQKTADGYRCLADIVVATPGRLVDHIDQTPGFSLQQLRFLIIDEADRMIDSMHQSWLPRVVAAAFQSEDPADPCALLQRRQAQAVTAASTCCPQMPLQKLLFSATLTQNPEKLQQLGLHQPRLFSTGLAHRGLEDTDGDGDSGKYAFPVGLTHHYVPCSLSSKPLVVLHLVLEMGFSRVLCFTNSRENSHRLFLLVQAFGGVDVAEFSSRYGPGQRRMILKQFEQGKIQLLISTDATARGIDVQGVELVVNYDAPQYLRTYVHRVGRTARAGKTGQAFTLLLKVQERRFLRMLTEAGAPELQRHELSSKLLQPLVPRYEEALSQLEESVKEERKQRAA

SEQ ID NO: 12028 - protein, 658 aa, Homo sapiens
QRVRENQKNFSLLQYQCDLKNSKGKITVVQDTPEILRVKENQKNFSSVLYKEDVSPGTAIGKTPEMMRVKQTQDHISSVKYKEAIGQGTPIPDLPEVKRVKETQKHISSVMYKENLGTGIPTTVTPEIERVKRNQENFSSVLYKENLGKGIPTPITPEMERVKRNQENFSSVLYKENLGTGIPIPITPEMQRVKHNQENLSSVLYKENMGKGTPLPVTPEMERVKHNQENISSVLYKENMGKGTPLPVTPEMERVKHNQENISSVLYKENMGKGTPLAVTPEMERVKHNQENISSVLYKENVGKATATPVTPEMQRVKRNQENISSVLYKENLGKATPTPFTPEMERVKRNQENFSSVLYKENMRKATPTPVTPEMERAKRNQENISSVLYSDSFRKQIQGKAAYVLDTPEMRRVRETQRHISTVKYHEDFEKHKGCFTPVVTDPITERVKKNMQDFSDINYRGIQRKVVEMEQKRNDQDQETITGLRVWRTNPGSVFDYDPAEDNIQSRSLHMINVQAQRRSREQSRSASALSISGGEEKSEHSEAPDHHLSTYSDGGVFAVSTAYKHAKTTELPQQRSSSVATQQTTVSSIPSHPSTAGKIFRAMYDYMAADADEVSFKDGDAIINVQAIDEGWMYGTVQRTGRTGMLPANYVEAI

SEQ ID NO: 12029 - protein, 442 aa, Homo sapiens
MANSFAARIFTTLSDLQTNMANLKVIGIVIGKTDVKGFPDRKNIGSERYTFSFTIRDSPAHFVNAASWGNEDYIKSLSDSFRVGDCVIIENPLIQRKEIEREEKFSPATPSNCKLLLSENHSTVKVCSSYEVDTKLLSLIHLPVKESHDYYSLGDIVANGHSLNGRIINVLAAVKSVGEPKYFTTSDRRKGQRCEVRLYDETESSFAMTCWDNESILLAQSWMPRETVIFASDVRINFDKFRNCMTATVISKTIITTNPDIPEANILLNFIRENKETNVLDDEIDSYFKESINLSTIVDVYTVEQLKGKALKNEGKADPSYGILYAYISTLNIDDETTKVVRNRCSSCGYIVNEASNMCTTCNKNSLDFKSVFLSFHVLIDLTDHTGTLHSCSLTGSVAEETLGCTFVLSHRARSGLKISVLSCKLADPTEASRNLSGQKHV

SEQ ID NO: 12030 - protein, 8525 aa, Homo sapiens
MADDEDYEEVVEYYTEEVVYEEVPGETITKIYETTTTRTSDYEQSETSKPALAQPALAQPASAKPVERRKVIRKKVDPSKFMTPYIAHSQKMQDLFSPNKYKEKFEKTKGQPYASTTDTPELRRIKKVQDQLSEVKYRMDGDVAKTICHVDEKAKDIEHAKKVSQQVSKVLYKQNWEDTKDKYLLPPDAPELVQAVKNTAMFSKKLYTEDWEADKSLFYPYNDSPELRRVAQAQKALSDVAYKKGLAEQQAQFTPLADPPDIEFAKKVTNQVSKQKYKEDYENKIKGKWSETPCFEVANARMNADNISTRKYQEDFENMKDQIYFMQTETPEYKMNKKAGVAASKVKYKEDYEKNKGKADYNVLPASENPQLRQLKAAGDALSDKLYKENYEKTKAKSINYCETPKFKLDTVLQNFSSDKKYKDSYLKDILGHYVGSFEDPYHSHCMKVTAQNSDKNYKAEYEEDRGKGFFPQTITQEYEAIKKLDQCKDHTYKVHPDKTKFTQVTDSPVLLQAQVNSKQLSDLNYKAKHESEKFKCHIPPDTPAFIQHKVNAYNLSDNLYKQDWEKSKAKKFDIKVDAIPLLAAKANTKNTSDVMYKKDYEKNKGKMIGVLSINDDPKMLHSLKVAKNQSDRLYKENYEKTKAKSMNYCETPKYQLDTQLKNFSEARYKDLYVKDVLGHYVGSMEDPYHTHCMKVAAQNSDKSYKAEYEEDKGKCYFPQTITQEYEAIKKLDQCKDHTYKVHPDKTKFTAVTDSPVLLQAQLNTKQLSDLNYKAKHEGEKFKCHIPADAPQFIQHRVNAYNLSDNVYKQDWEKSKAKKFDIKVDAIPLLAAKANTKNTSDVMYKKDYEKSKGKMIGALSINDDPKMLHSLKTAKNQSDREYRKDYEKSKTIYTAPLDMLQVTQAKKSQAIASDVDYKHILHSYSYPPDSINVDLAKKAYALQSDVEYKADYNSWMKGCGWVPFGSLEMEKAKRASDILNEKKYRQHPDTLKFTSIEDAPITVQSKINQAQRSDIAYKAKGEEIIHKYNLPPDLPQFIQAKVNAYNISENMYKADLKDLSKKGYDLRTDAIPIRAAKAARQAASDVQYKKDYEKAKGKMVGFQSLQDDPKLVHYMNVAKIQSDREYKKDYEKTKSKYNTPHDMFNVVAAKKAQDVVSNVNYKHSLHHYTYLPDAMDLELSKNMMQIQSDNVYKEDYNNWMKGIGWIPIGSLDVEKVKKAGDALNEKKYRQHPDTLKFTSIVDSPVMVQAKQNTKQVSDILYKAKGEDVKHKYTMSPDLPQFLQAKCNAYNISDVCYKRDWYDLIAKGNNVLGDAIPITAAKASRNIASDYKYKEAYEKSKGKHVGFRSLQDDPKLVHYMNVAKLQSDREYKKNYENTKTSYHTPGDMVSITAAKMAQDVATNVNYKQPLHHYTYLPDAMSLEHTRNVNQIQSDNVYKDEYNSFLKGIGWIPIGSLEVEKVKKAGDALNERKYRQHPDTVKFTSVPDSMGMVLAQHNTKQLSDLNYKVEGEKLKHKYTIDPELPQFIQAKVNALNMSDAHYKADWKKTIAKGYDLRPDAIPIVAAKSSRNIASDCKYKEAYEKAKGKQVGFLSLQDDPKLVHYMNVAKIQSDREYKKGYEASKTKYHTPLDMVSVTAAKKSQEVATNANYRQSYHHYTLLPDALNVEHSRNAMQIQSDNLYKSDFTNWMKGIGWVPIESLEVEKAKKAGEILSEKKYRQHPEKLKFTYAMDTMEQALNKSNKLNMDKRLYTEKWNKDKTTIHVMPDTPDILLSRVNQITMSDKLYKAGWEEEKKKGYDLRPDAIAIKAARASRDIASDYKYKKAYEQAKGKHIGFRSLEDDPKLVHFMQVAKMQSDREYKKGYEKSKTSFHTPVDMLSVVAAKKSQEVATNANYRNVIHTYNMLPDAMSFELAKNMMQIQSDNQYKADYADFMKGIGWLPLGSLEAEKNKKAMEIISEKKYRQHPDTLKYSTLMDSMNMVLAQNNAKIMNEHLYKQAWEADKTKVHIMPDIPQIILAKANAINMSDKLYKLSLEESKKKGYDLRPDAIPIKAAKASRDIASDYKYKYNYEKGKGKMVGFRSLEDDPKLVHSMQVAKMQSDREYKKNYENTKTSYHTPADMLSVTAAKDAQANITNTNYKHLIHKYILLPDAMNIELTRNMNRIQSDNEYKQDYNEWYKGLGWSPAGSLEVEKAKKATEYASDQKYRQHPSNFQFKKLTDSMDMVLAKQNAHTMNKHLYTIDWNKDKTKIHVMPDTPDILQAKQNQTLYSQKLYKLGWEEALKKGYDLPVDAISVQLAKASRDIASDYKYKQGYRKQLGHHVGFRSLQDDPKLVLSMNVAKMQSEREYKKDFEKWKTKFSSPVDMLGVVLAKKCQELVSDVDYKNYLHQWTCLPDQNDVVQAKKVYELQSENLYKSDLEWLRGIGWSPLGSLEAEKNKRASEIISEKKYRQPPDRNKFTSIPDAMDIVLAKTNAKNRSDRLYREAWDKDKTQIHIMPDTPDIVLAKANLINTSDKLYRMGYEELKRKGYDLPVDAIPIKAAKASREIASEYKYKEGFRKQLGHHIGARNIEDDPKMMWSMHVAKIQSDREYKKDFEKWKTKFSSPVDMLGVVLAKKCQTLVSDVDYKNYLHQWTCLPDQSDVIHARQAYDLQSDNLYKSDLQWLKGIGWMTSGSLEDEKNKRATQILSDHVYRQHPDQFKFSSLMDSIPMVLAKNNAITMNHRLYTEAWDKDKTTVHIMPDTPEVLLAKQNKVNYSEKLYKLGLEEAKRKGYDMRVDAIPIKAAKASRDIASEFKYKEGYRKQLGHHIGARAIRDDPKMMWSMHVAKIQSDREYKKDFEKWKTKFSSPVDMLGVVLAKKCQTLVSDVDYKNYLHQWTCLPDQSDVIHARQAYDLQSDNMYKSDLQWMRGIGWVSIGSLDVEKCKRATEILSDKIYRQPPDRFKFTSVTDSLEQVLAKNNAITMNKRLYTEAWDKDKTQIHIMPDTPEIMLARMNKINYSESLYKLANEEAKKKGYDLRSDAIPIVAAKASRDIISDYKYKDGYCKQLGHHIGARNIEDDPKMMWSMHVAKIQSDREYKKDFEKWKTKFSSPVDMLGVVLAKKCQTLVSDVDYKNYLHEWTCLPDQSDVIHARQAYDLQSDNIYKSDLQWLRGIGWVPIGSMDVVKCKRATEILSDNIYRQPPDKLKFTSVTDSLEQVLAKNNALNMNKRLYTEAWDKDKTQIHIMPDTPEIMLARQNKINYSETLYKLANEEAKKKGYDLRSDAIPIVAAKASRDVISDYKYKDGYRKQLGHHIGARNIEDDPKMMWSMHVAKIQSDREYKKDFEKWKTKFSSPVDMLGVVLAKKCQTLVSDVDYKNYLHEWTCLPDQNDVIHARQAYDLQSDNIYKSDLQWLRGIGWVPIGSMDVVKCKRAAEILSDNIYRQPPDKLKFTSVTDSLEQVLAKNNALNMNKRLYTEAWDKDKTQVHIMPDTPEIMLARQNKINYSESLYRQAMEEAKKEGYDLRSDAIPIVAAKASRDIASDYKYKEAYRKQLGHHIGARAVHDDPKIMWSLHIAKVQSDREYKKDFEKYKTRYSSPVDMLGIVLAKKCQTLVSDVDYKHPLHEWICLPDQNDIIHARKAYDLQSDNLYKSDLEWMKGIGWVPIDSLEVVRAKRAGELLSDTIYRQRPETLKFTSITDTPEQVLAKNNALNMNKRLYTEAWDNDKKTIHVMPDTPEIMLAKLNRINYSDKLYKLALEESKKEGYDLRLDAIPIQAAKASRDIASDYKYKEGYRKQLGHHIGARNIKDDPKMMWSIHVAKIQSDREYKKEFEKWKTKFSSPVDMLGVVLAKKCQILVSDIDYKHPLHEWTCLPDQNDVIQARKAYDLQSDAIYKSDLEWLRGIGWVPIGSVEVEKVKRAGEILSDRKYRQPADQLKFTCITDTPEIVLAKNNALTMSKHLYTEAWDADKTSIHVMPDTPDILLAKSNSANISQKLYTKGWDESKMKDYDLRADAISIKSAKASRDIASDYKYKEAYEKQKGHHIGAQSIEDDPKIMCAIHAGKIQSEREYKKEFQKWKTKFSSPVDMLSILLAKKCQTLVTDIDYRNYLHEWTCMPDQNDIIQAKKAYDLQSDSVYKADLEWLRGIGWMPEGSVEMNRVKVAQDLVNERLYRTRPEALSFTSIVDTPEVVLAKANSLQISEKLYQEAWNKDKSNITIPSDTPEMLQAHINALQISNKLYQKDWNDAKQKGYDIRADAIEIKHAKASREIASEYKYKEGYRKQLGHHMGFRTLQDDPKSVWAIHAAKIQSDREYKKAYEKSKGIHNTPLDMMSIVQAKKCQVLVSDIDYRNYLHQWTCLPDQNDVIQAKKAYDLQSDNLYKSDLEWLKGIGWLPEGSVEVMRVKNAQNLLNERLYRIKPEALKFTSIVDTPEVIQAKINAVQISEPLYRDAWEKEKANVNVPADTPLMLQSKINALQISNKRYQQAWEDVKMTGYDLRADAIGIQHAKASRDIASDYLYKTAYEKQKGHYIGCRSAKEDPKLVWAANVLKMQNDRLYKKAYNDHKAKISIPVDMVSISAAKEGQALASDVDYRHYLHHWSCFPDQNDVIQARKAYDLQSDSVYKADLEWLRGIGWMPEGSVEMNRVKVAQDLVNERLYRTRPEALSFTSIVDTPEVVLAKANSLQISEKLYQEAWNKDKSNITIPSDTPEMLQAHINALQISNKLYQKDWNDTKQKGYDIRADAIEIKHAKASREIASEYKYKEGYRKQLGHHMGFRTLQDDPKSVWAIHAAKIQSDREYKKAYEKSKGIHNTPLDMMSIVQAKKCQVLVSDIDYRNYLHQWTCLPDQNDVIQAKKAYDLQSDNLYKSDLEWLKGIGWLPEGSVEVMRVKNAQNLLNERLYRIKPEALKFTSIVDTPEVIQAKINAVQISEPLYRNAWEKEKANVNVPADTPLMLQSKINALQISNKRYQQAWEDVKMTGYDLRADAIGIQHAKASRDIASDYLYKTAYEKQKGHYIGCRSAKEDPKLVWAANVLKMQNDRLYKKAYNDHKAKISIPVDMVSISAAKEGQALASDVDYRHYLHHWSCFPDQNDVIQARKAYDLQSDSVYKADLEWLRGIGWMPEGSVEMNRVKVAQDLVNERLYRTRPEALSFTSIVDTPEVVLAKANSLQISEKLYQEAWNKDKSNITIPSDTPEMLQAHINALQISNKLYQKDWNDTKQKGYDIRADAIEIKHAKASREIASEYKYKEGYRKQLGHHMGFRTLQDDPKSVWAIHAAKIQSDREYKKAYEKSKGIHNTPLDMMSIVQAKKCQVLVSDIDYRNYLHQWTCLPDQNDVIQAKKAYDLQSDNLYKSDLEWLKGIGWLPEGSVEVMRVKNAQNLLNERLYRIKPEALKFTSIVDTPEVIQAKINAVQISEPLYRDAWEKEKANVNVPADTPLMLQSKINALQISNKRYQQAWEDVKMTGYDLRADAIGIQHAKASRDIASDYLYKTAYEKQKGHYIGCRSAKEDPKLVWAANVLKMQNDRLYKKAYNDHKAKISIPVDMVSISAAKEGQALASDVDYRHYLHRWSCFPDQNDVIQARKAYDLQSDALYKADLEWLRGIGWMPQGSPEVLRVKNAQNIFCDSVYRTPVVNLKYTSIVDTPEVVLAKSNAENISIPKYREVWDKDKTSIHIMPDTPEINLARANALNVSNKLYREGWDEMKAGCDVRLDAIPIQAAKASREIASDYKYKLDHEKQKGHYVGTLTARDDNKIRWALIADKLQNEREYRLDWAKWKAKIQSPVDMLSILHSKNSQALVSDMDYRNYLHQWTCMPDQNDVIQAKKAYELQSDNVYKADLEWLRGIGWMPNDSVSVNHAKHAADIFSEKKYRTKIETLNFTPVDDRVDYVTAKQSGEILDDIKYRKDWNATKSKYTLTETPLLHTAQEAARILDQYLYKEGWERQKATGYILPPDAVPFVHAHHCNDVQSELKYKAEHVKQKGHYVGVPTMRDDPKLVWFEHAGQIQNERLYKEDYHKTKAKINIPADMVSVLAAKQGQTLVSDIDYRNYLHQWMCHPDQNDVIQARKAYDLQSDNVYRADLEWLRGIGWIPLDSVDHVRVTKNQEMMSQIKYKKNALENYPNFRSVVDPPEIVLAKINSVNQSDVKYKETFNKAKGKYTFSPDTPHISHSKDMGKLYSTILYKGAWEGTKAYGYTLDERYIPIVGAKHADLVNSELKYKETYEKQKGHYLAGKVIGEFPGVVHCLDFQKMRSALNYRKHYEDTKANVHIPNDMMNHVLAKRCQYILSDLEYRHYFHQWTSLLEEPNVIRVRNAQEILSDNVYKDDLNWLKGIGCYVWDTPQILHAKKSYDLQSQLQYTAAGKENLQNYNLVTDTPLYVTAVQSGINASEVKYKENYHQIKDKYTTVLETVDYDRTRNLKNLYSSNLYKEAWDRVKATSYILPSSTLSLTHAKNQKHLASHIKYREEYEKFKALYTLPRSVDDDPNTARCLRVGKLNIDRLYRSVYEKNKMKIHIVPDMVEMVTAKDSQKKVSEIDYRLRLHEWICHPDLQVNDHVRKVTDQISDIVYKDDLNWLKGIGCYVWDTPEILHAKHAYDLRDDIKYKAHMLKTRNDYKLVTDTPVYVQAVKSGKQLSDAVYHYDYVHSVRGKVAPTTKTVDLDRALHAYKLQSSNLYKTSLRTLPTGYRLPGDTPHFKHIKDTRYMSSYFKYKEAYEHTKAYGYTLGPKDVPFVHVRRVNNVTSERLYRELYHKLKDKIHTTPDTPEIRQVKKTQEAVSELIYKSDFFKMQGHMISLPYTPQVIHCRYVGDITSDIKYKEDLQVLKGFGCFLYDTPDMVRSRHLRKLWSNYLYTDKARKMRDKYKVVLDTPEYRKVQELKTHLSELVYRAAGKKQKSIFTSVPDTPDLLRAKRGQKLQSQYLYVELATKERPHHHAGNQTTALKHAKDVKDMVSEKKYKIQYEKMKDKYTPVPDTPILIRAKRAYWNASDLRYKETFQKTKGKYHTVKDALDIVYHRKVTDDISKIKYKENYMSQLGIWRSIPDRPEHFHHRAVTDTVSDVKYKEDLTWLKGIGCYAYDTPDFTLAEKNKTLYSKYKYKEVFERTKSDFKYVADSPINRHFKYATQLMNERKYKSSAKMFLQHGCNEILRPDMLTALYNSHMWSQIKYRKNYEKSKDKFTSIVDTPEHLRTTKVNKQISDILYKLEYNKAKPRGYTTIHDTPMLLHVRKVKDEVSDLKYKEVYQRNKSNCTIEPDAVHIKAAKDAYKVNTNLDYKKQYEANKAHWKWTPDRPDFLQAAKSSLQQSDFEYKLDREFLKGCKLSVTDDKNTVLALRNTLIESDLKYKEKHVKERGTCHAVPDTPQILLAKTVSNLVSENKYKDHVKKHLAQGSYTTLPETRDTVHVKEVTKHVSDTNYKKKFVKEKGKSNYSIMLEPPEVKHAMEVAKKQSDVAYRKDAKENLHYTTVADRPDIKKATQAAKQASEVEYRAKHRKEGSHGLSMLGRPDIEMAKKAAKLSSQVKYRENFDKEKGKTPKYNPKDSQLYKVMKDANNLASEVKYKADLKKLHKPVTDMKESLIMNHVLNTSQLASSYQYKKKYEKSKGHYHTIPDNLEQLHLKEATELQSIVKYKEKYEKERGKPMLDFETPTYITAKESQQMQSGKEYRKDYEESIKGRNLTGLEVTPALLHVKYATKIASEKEYRKDLEESIRGKGLTEMEDTPDMLRAKNATQILNEKEYKRDLELEVKGRGLNAMANETPDFMRARNATDIASQIKYKQSAEMEKANFTSVVDTPEIIHAQQVKNLSSQKKYKEDAEKSMSYYETVLDTPEIQRVRENQKNFSLLQYQCDLKNSKGKITVVQDTPEILRVKENQKNFSSVLYKEDVSPGTAIGKTPEMMRVKQTQDHISSVKYKEAIGQGTPIPDLPEVKRVKETQKHISSVMYKENLGTGIPTTVTPEIERVKRNQENFSSVLYKENLGKGIPTPITPEMERVKRNQENFSSILYKENLSKGTPLPVTPEMERVKLNQENFSSVLYKENVGKGIPIPITPEMERVKHNQENFSSVLYKENLGTGIPIPITPEMQRVKHNQENLSSVLYKENMGKGTPLPVTPEMERVKHNQENISSVLYKENMGKGTPLPVTPEMERVKHNQENISSVLYKENMGKGTPLAVTPEMERVKHNQENISSVLYKENVGKATATPVTPEMQRVKRNQENISSVLYKENLGKATPTPFTPEMERVKRNQENFSSVLYKENMRKATPTPVTPEMERAKRNQENISSVLYSDSFRKQIQGKAAYVLDTPEMRRVRETQRHISTVKYHEDFEKHKGCFTPVVTDPITERVKKNMQDFSDINYRGIQRKVVEMEQKRNDQDQETITGLRVWRTNPGSVFDYDPAEDNIQSRSLHMINVQAQRRSREQSRSASALSISGGEEKSEHSEAPDHHLSTYSDGGVFAVSTAYKHAKTTELPQQRSSSVATQQTTVSSIPSHPSTAGKIFRAMYDYMAADADEVSFKDGDAIINVQAIDEGWMYGTVQRTGRTGMLPANYVEAI

SEQ ID NO: 12031 - protein, 208 aa, Homo sapiens
MAGTARHDREMAIQAKKKLTTATDPIERLRLQCLARGSAGIKGLGRVFRIMDDDNNRTLDFKEFMKGLNDYAVVMEKEEVEELFRRFDKDGNGTIDFNEFLLTLRPPMSRARKEVIMQAFRKLDKTGDGVITIEDLREVYNAKHHPKYQNGEWSEEQVFRKFLDNFDSPYDKDGLVTPEEFMNYYAGVSASIDTDVYFIIMMRTAWKL

SEQ ID NO: 12032 - protein, 253 aa, Homo sapiens
MFGMQGDVFGLRATFMEGLQYMELIPKEKQPVTGTEGAFYRRRQLMHQLPIYDQDPSRCRGLLENELKLMEEFVKQYKSEALGVGEVALPGQGGLPKEEGKQQEKPEGAETTAATTNGSLSDPSKEVEYVCELCKGAAPPDSPVVYSDRAGYNKQWHPTCFVCAKCSEPLVDLIYFWKDGAPWCGRHYCESLRPRCSGCDEIIFAEDYQRVEDLAWHRKHFVCEGCEQLLSGRAYIVTKGQLLCPTCSKSKRS

SEQ ID NO: 12033 - protein, 646 aa, Homo sapiens
MSYTGFVQGSETTLQSTYSDTSAQPTCDYGYGTWNSGTNRGYEGYGYGYGYGQDNTTNYGYGMATSHSWEMPSSDTNANTSASGSASADSVLSRINQRLDMVPHLETDMMQGGVYGSGGERYDSYESCDSRAVLSERDLYRSGYDYSELDPEMEMAYEGQYDAYRDQFRMRGNDTFGPRAQGWARDARSGRPMASGYGRMWEDPMGARGQCMSGASRLPSLFSQNIIPEYGMFQGMRGGGAFPGGSRFGFGFGNGMKQMRRTWKTWTTADFRTKKKKRKQGGSPDEPDSKATRTDCSDNSDSDNDEGTEGEATEGLEGTEAVEKGSRVDGEDEEGKEDGREEGKEDPEKGALTTQDENGQTKRKLQAGKKSQDKQKKRQRDRMVERIQFVCSLCKYRTFYEDEMASHLDSKFHKEHFKYVGTKLPKQTADFLQEYVTNKTKKTEELRKTVEDLDGLIQQIYRDQDLTQEIAMEHFVKKVEAAHCAACDLFIPMQFGIIQKHLKTMDHNRNRRLMMEQSKKSSLMVARSILNNKLISKKLERYLKGENPFTDSPEEEKEQEEAEGGALDEGAQGEAAGISEGAEGVPAQPPVPPEPAPGAVSPPPPPPPEEEEEGAVPLLGGALQRQIRGIPGLDVEDDEEGGGGAP

SEQ ID NO: 12034 - protein, 239 aa, Homo sapiens
MKQTNIQKNTNTRDTSKKTKDQLIIDAGQKHFGATVCKSCGMIYTASNPEDEMQHVQHHHRFLEGIKYVGWKKERVVAEFWDGKIVLVLPHDPSFAIKKVEDVQELVDNELGFQQVVPKCPNKIKTFLFISDEKRVVGCLIAEPIKQAFRVLSEPIGPESPSSTECPRAWQCSDVPEPAVCGISRIWVFRLKRRKRIARRLVDTLRNCFMFGCFLSTDEIAFSDPTPDDCRRLNRYQET

SEQ ID NO: 12035 - protein, 160 aa, Homo sapiens
MVIPVPEAESNVNYYNRLYKGEFKQPKQFIHIQPFNLDNEQPDYDMDSEDETLLNRLNRKMEIKPLQFEIMIDRLEKASSNQLVTLQEAKLLLNEDDYLIKAVYDYWVRKRKNCRGPSLIPQIKQEKRDGSTNNDPYVAFRRRTEKMQTRKNRKNDEASY

SEQ ID NO: 12036 - protein, 941 aa, Homo sapiens
MSDAAEAPREATGENGETEMKEEEEPNPNYKEVEDPQQESKDDTIAWRESQEEERKTGEEEGEEEGKEDKKIVMEETEEKAGEVQEKEASGIQEETTVEPQEVTASMIRLETQITDSQSITSGIFPKTQRGSKSKLSLQLEDAETDELLRDLSTQIEFLDLDQISPEEQQISSPERQPSGELEEKTDRMPQDELGQERRDLEPENREEGQERRVSDIQSKAGISRESLVSSTTEDILFQKDKSTPVYPLTMTWSFGWNSSLPVYYIREERQRVLLYVCAHTAIIYNVFRNNQYHLQGHANIISCLCVSEDRRWIATADKGPDCLVIIWDSFTGIPVHTIFDSCPEGNGIMAMAMTHDAKYLATISDAEVQKVCIWKWTLAVETPACTLELPTEYGVQNYVTFNPTNNKELVSNSKTRAIYYAWYEERDTLAHSAPLLTEKTFNKLVGKFSQSIFHLNLTQILSATMEGKLVVWDIHRPPSSASTFLGFPYIKPCKLVHLQKEGITVLTTIDSYIVTGDIKGNIKFYDHTLSIVNWYSHLKLGAIRTLSFSKTPATPPTEKSNYPPDCTLKGDLFVLRNFIIGTSDAAVYHLTTDGTKLEKLFVEPKDAICAISCHPYQPLIAIGSICGMIKVWNYENKQYLFSRVFEKGLGVQSLTYNPEGALLGAGFTEGTVYILDAMSLENESPEPFKYSRTSVTHISFSHDSQYMATADRSFTVAVYMLVVRNGQRVWEYLARLRSHRKSIRSLLFGVYLDSNEPRLLSLGTDRLLIEYDLLRSYKDHLEVLDIHHTDQGCYPTCMVWYPPLTRELFLLICNSGYKVKLFNATTKMCRKTLLGPAYGSPIEQTQVLPVRSMAELQKRYLVFINRDKVGLQILPVDGNPHKTSAIVCHPNGVAGMAVSYDGCYAFTAGGHDRSVVQWKITLSHPGSQAPILSPSDTSRS

SEQ ID NO: 12037 - protein, 698 aa, Homo sapiens
MEENVFWECKANGRPKPTYKWLKNGEPLLTRDRIQIEQGTLNITIVNLSDAGMYQCLAENKHGVIFSNAELSVIAVGPDFSRTLLKRVTLVKVGGEVVIECKPKASPKPVYTWKKGRDILKENERITISEDGNLRIINVTKSDAGSYTCIATNHFGTASSTGNLVVKDPTRVMVPPSSMDVTVGESIVLPCQVTHDHSLDIVFTWSFNGHLIDFDRDGDHFERVGGQDSAGDLMIRNIQLKHAGKYVCMVQTSVDRLSAAADLIVRGPPGPPEAVTIDEITDTTAQLSWRPGPDNHSPITMYVIQARTPFSVGWQAVSTVPELIDGKTFTATVVGLNPWVEYEFRTVAANVIGIGEPSRPSEKRRTEEALPEVTPANVSGGGGSKSELVITWETVPEELQNGRGFGYVVAFRPYGKMIWMLTVLASADASRYVFRNESVHPFSPFEVKVGVFNNKGEGPFSPTTVVYSAEEEPTKPPASIFARSLSATDIEVFWASPLEKNRGRIQGYEVKYWRHEDKEENARKIRTVGNQTSTKITNLKGSVLYHLAVKAYNSAGTGPSSATVNVTTRKPPPSQPPGNIIWNSSDSKIILNWDQVKALDNESEVKGYKVLYRWNRQSSTSVIETNKTSVELSLPFDEDYIIEIKPFSDGGDGSSSEQIRIPKISNAYARGSGASTSNACTLSAISTIMISLTARSSL

SEQ ID NO: 12038 - protein, 1026 aa, Homo sapiens
MRLPWELLVLQSFILCLADDSTLHGPIFIQEPSPVMFPLDSEEKKVKLNCEVKGNPKPHIRWKLNGTDVDTGMDFRYSVVEGSLLINNPNKTQDAGTYQCTATNSFGTIVSREAKLQFAYLDNFKTRTRSTVSVRRGQGMVLLCGPPPHSGELSYAWIFNEYPSYQDNRRFVSQETGNLYIAKVEKSDVGNYTCVVTNTVTNHKVLGPPTPLILRNDGVMGEYEPKIEVQFPETVPTAKGATVKLECFALGNPVPTIIWRRADGKPIARKARRHKSNGILEIPNFQQEDAGLYECVAENSRGKNVARGQLTFYAQPNWIQKINDIHVAMEENVFWECKANGRPKPTYKWLKNGEPLLTRDRIQIEQGTLNITIVNLSDAGMYQCLAENKHGVIFSNAELSVIAVGPDFSRTLLKRVTLVKVGGEVVIECKPKASPKPVYTWKKGRDILKENERITISEDGNLRIINVTKSDAGSYTCIATNHFGTASSTGNLVVKDPTRVMVPPSSMDVTVGESIVLPCQVTHDHSLDIVFTWSFNGHLIDFDRDGDHFERVGGQDSAGDLMIRNIQLKHAGKYVCMVQTSVDRLSAAADLIVRGPPGPPEAVTIDEITDTTAQLSWRPGPDNHSPITMYVIQARTPFSVGWQAVSTVPELIDGKTFTATVVGLNPWVEYEFRTVAANVIGIGEPSRPSEKRRTEEALPEVTPANVSGGGGSKSELVITWETVPEELQNGRGFGYVVAFRPYGKMIWMLTVLASADASRYVFRNESVHPFSPFEVKVGVFNNKGEGPFSPTTVVYSAEEEPTKPPASIFARSLSATDIEVFWASPLEKNRGRIQGYEVKYWRHEDKEENARKIRTVGNQTSTKITNLKGSVLYHLAVKAYNSAGTGPSSATVNVTTRKPPPSQPPGNIIWNSSDSKIILNWDQVKALDNESEVKGYKVLYRWNRQSSTSVIETNKTSVELSLPFDEDYIIEIKPFSDGGDGSSSEQIRIPKISNAYARGSGASTSNACTLSAISTIMISLTARSSL

SEQ ID NO: 12039 - protein, 1909 aa, Homo sapiens [sequence omitted]

SEQ ID NO: 12040 - protein, 63 aa, Homo sapiens
MALEWQLLSALSDSVKVDEDRAGFQCRKNFPFEYSKRELCTCASRTDCLAPTGMQQERSVFHA

SEQ ID NO: 12041 - protein, 1169 aa, Homo sapiens
MSTLLDIKSSVLRQVQVCPSFRRRTEQDPGSASADPQEPATGAWKPGDGVEFFAHMRLMLKKGEGRQGLPCLEAWGSPCRQSPHPGPHTQVPLRSGSPAPPEPVDPSLGLRALAPEEVEMLYEEALYTVLYRAGTMGPDQVDDEEALLSYLQQVFGTSLEEHTEAIERVRKAKAPTYALKVSVMRAKNLLAKDPNGFSDPYCMLGILPASDATREPRAQKEQRFGFRKGSKRGGPLPAKCIQVTEVKSSTLNPVWKEHFLFEIEDVSTDQLHLDIWDHDDDVSLVEACRKLNEVIGLKGMGRYFKQIVKSARANGTAGPTEDHTDDFLGCLNIPVREVPVAGVDRWFKLEPRSSASRVQGHCHLVLKLITTQRDTAMSQRGRSGFLSHLLLLSHLLRLEHSAEEPNSSSWRGELSTPAATILCLHGAQSNLSPLQLAVLHWQVSSRHHQTCTLDYSYLLGLLEDMQAHWEEAPSLPQEQEESLADSLSAFSEFGLQLLRQLRDYFPATNSTAVHRLELLLKCLGKLQLFQPSFEICPFESELNMDIAAALKRGNREWYDRILNDKSPREQPGPQRLPGLVVLADAVYDDLQFCYSVYASLFHSILNVDVFTLTFRQLERLVAEEAWVLTEELSPKMTLEVASGLFELYLTLADLQRFWDSIPGRDSRSLALAGIHAPFLPAVKLWFQVLRDQAKWRLQGAVDMDTLEPVDASSRHSSSAATAGLCLSHIQELWVRLAWPDPAQAQGLGTQLGQDVCEATLFYTELLRKKVDTQPGAAGEAVSEALCVVLNNVELVRKAAGQALKGLAWPEGATGPEGVLPRPLLSCTQALDDDLQREAHTVTAHLTSKMVGDIRKYVQHISLSPDSIQNDEAVAPLMKYLDEKLALLNASLVKGNLSRVLEALWELLLQAILQALGANRDVSADFYSRFHFTLEALVSFFHAEGQGLPLESLRDGSYKRLKEELRLHKCSTRECIEQFYLDKLKQRTLEQNRFGRLSVRCHYEAAEQRLAVEVLHAADLLPLDANGLSDPFVIVELGPPHLFPLVRSQRTQVKTRTLHPVYDELFYFSVPAEACRRRAACVLFTVMDHDWLSTNDFAGEAALGLGGVTGVARPQVGGGARAGQPVTLHLCRPRAQVRSALRRLEGRTSKEAQEFVKKLKELEKCMEADP

SEQ ID NO: 12042 - protein, 1208 aa, Homo sapiens
MEPLLLGRGLIVYLMFLLLKFSKAIEIPSSVQQVPTIIKQSKVQVAFPFDEYFQIECEAKGNPEPTFSWTKDGNPFYFTDHRIIPSNNSGTFRIPNEGHISHFQGKYRCFASNKLGIAMSEEIEFIVPSVPKFPKEKIDPLEVEEGDPIVLPCNPPKGLPPLHIYWMNIELEHIEQDERVYMSQKGDLYFANVEEKDSRNDYCCFAAFPRLRTIVQKMPMKLTVNSSNSIKQRKPKLLLPPTESGSESSITILKGEILLLECFAEGLPTPQVDWNKIGGDLPKGRETKENYGKTLKIENVSYQDKGNYRCTASNFLGTATHDFHVIVEEPPRWTKKPQSAVYSTGSNGILLCEAEGEPQPTIKWRVNGSPVDNHPFAGDVVFPREISFTNLQPNHTAVYQCEASNVHGTILANANIDVVDVRPLIQTKDGENYATVVGYSAFLHCEFFASPEAVVSWQKVEEVKPLEGRRYHIYENGTLQINRTTEEDAGSYSCWVENAIGKTAVTANLDIRNATKLRVSPKNPRIPKLHMLELHCESKCDSHLKHSLKLSWSKDGEAFEINGTEDGRIIIDGANLTISNVTLEDQGIYCCSAHTALDSAADITQVTVLDVPDPPENLHLSERQNRSVRLTWEAGADHNSNISEYIVEFEGNKEEPGRWEELTRVQGKKTTVILPLAPFVRYQFRVIAVNEVGRSQPSQPSDHHETPPAAPDRNPQNIRVQASQPKEMIIKWEPLKSMEQNGPGLEYRVTWKPQGAPVEWEEETVTNHTLRVMTPAVYAPYDVKVQAINQLGSGPDPQSVTLYSGEDYPDTAPVIHGVDVINSTLVKVTWSTVPKDRVHGRLKGYQINWWKTKSLLDGRTHPKEVNILRFSGQRNSGMVPSLDAFSEFHLTVLAYNSKGAGPESEPYIFQTPEGVPEQPTFLKVIKVDKDTATLSWGLPKKLNGNLTGYLLQYQIINDTYEIGELNDINITTPSKPSWHLSNLNATTKYKFYLRACTSQGCGKPITEESSTLGEGSKGIGKISGVNLTQKTHPIEVFEPGAEHIVRLMTKNWGDNDSIFQDVIETRGREYAGLYDDISTQGWFIGLMCAIALLTLLLLTVCFVKRNRGGKYSVKEKEDLHPDPEIQSVKDETFGEYSDSDEKPLKGSLRSLNRDMQPTESADSLVEYGEGDHGLFSEDGSFIGAYAGSKEKGSVESNGSSTATFPLRA

SEQ ID NO: 12043 - protein, 361 aa, Homo sapiens
MSSGAPQKSSPMASGAEETPGFLDTLLQDFPALLNPEDPLPWKAPGTVLSQEEVEGELAELAMGFLGSRKAPPPLAAALAHEAVSQLLQTDLSEFRKLPREEEEEEEDDDEEEKAPVTLLDAQSLAQSFFNRLWEVAGQWQKQVPLAARASQRQWLVSIHAIRNTRRKMEDRHVSLPSFNQLFGLSDPVNRAYFAVFDGHGGVDAARYAAVHVHTNAARQPELPTDPEGALREAFRRTDQMFLRKAKRERLQSGTTGVCALIAGATLHVAWLGDSQVILVQQGQVVKLMEPHRPERQDEKARIEALGGFVSHMDCWRVNGTLAVSRAIGESQRGRPKWEKVSRKPRPRVWPAAHQGFREAV

SEQ ID NO: 12044 - protein, 262 aa, Homo sapiens
MMCQSEARQGPELRAAKWLHFPQLALRRRLGQLSCMSRPALKLRSWPLTVLYYLLPFGALRPLSRVGWRPVSRVALYKSVPTRLLSRAWGRLNQVELPHWLRRPVYSLYIWTFGVNMKEAAVEDLHHYRNLSEFFRRKLKPQARPVCGLHSVISPSDGRILNFGQVKNCEVEQVKGVTYSLESFLGPRMCTEDLPFPPAASCDSFKNQLVTREGNELYHCVIYLAPGDYHCFHSPTDWTVSHRRHFPGPAHKQPKAQQGLLQ

SEQ ID NO: 12045 - protein, 412 aa, Homo sapiens
MAHSPVQSGLPGMQNLKADPEELFTKLEKIGKGSFGEVFKGIDNRTQKVVAIKIIDLEEAEDEIEDIQQEITVLSQCDSPYVTKYYGSYLKLEPGPLDETQIATILREILKGLDYLHSEKKIHRDIKAANVLLSEHGEVKLADFGVAGQLTDTQIKRNTFVGTPFWMAPEVIKQSAYDSKADIWSLGITAIELARGEPPHSELHPMKVLFLIPKNNPPTLEGNYSKPLKEFVEACLNKEPSFRPTAKELLKHKFILRNAKKTSYLTELIDRYKRWKAEQSHDDSSSEDSDAETDGQASGGSDSGDWIFTIREKDPKNLENGALQPSDLDRNKMKDIPKRPFSQCLSTIISPLFAELKEKSQACGGNLGSIEELRGAIYLAEEACPGISDTMVAQLVQRLQRYSLSGGGTSSH

SEQ ID NO: 12046 - protein, 961 aa, Homo sapiens
MDRRSMGETESGDAFLDLKKPPASKCPHRYTKEELLDIKELPHSKQRPSCLSEKYDSDGVWDPEKWHASLYPASGRSSPVESLKKELDTDRPSLVRRIVDPRERVKEDDLDVVLSPQRRSFGGGCHVTAAVSSRRSGSPLEKDSDGLRLLGGRRIGSGRIISARTFEKDHRLSDKDLRDLRDRDRERDFKDKRFRREFGDSKRVFGERRRNDSYTEEEPEWFSAGPTSQSETIELTGFDDKILEEDHKGRKRTRRRTASVKEGIVECNGGVAEEDEVEVILAQEPAADQEVPRDAVLPEQSPGDFDFNEFFNLDKVPCLASMIEDVLGEGSVSASRFSRWFSNPSRSGSRSSSLGSTPHEELERLAGLEQAILSPGQNSGNYFAPIPLEDHAENKVDILEMLQKAKVDLKPLLSSLSANKEKLKESSHSGVVLSVEEVEAGLKGLKVDQQVKNSTPFMAEHLEETLSAVTNNRQLKKDGDMTAFNKLVSTMKASGTLPSQPKVSELLGQPVQRPASSNLLSGLMGSLEPTTSLLGQRAPSPPLSQVFQTRAASADYLRPRIPSPIGFTPGPQQLLGDPFQGMRKPMSPITAQMSQLELQQAALEGLALPHDLAVQAANFYQPGFGKPQVDRTRDGFRNRQQRVTKSPAPVHRGNSSSPAPAASITSMLSPSFTPTSVIRKMYESKEKSKEEPASGKAALGDSKEDTQKASEENLLSSSSVPSADRDSSPTTNSKLSALQRSSCSTPLSQANRYTKEQDYRPKATGRKTPTLASPVPTTPFLRPVHQVPLVPHVPMVRPAHQLHPGLVQRMLAQGVHPQHLPSLLQTGVLPPGMDLSHLQGISGPILGQPFYPLPAASHPLLNPRPGTPLHLAMVQQQLQRSVLHPPGSGSHAAAVSVQTTPQNVPSRSGLPHMHSQLEHRPSQRSSSPVGLAKWFGSDVLQQPLPSMPAKVISVDELEYRQ

SEQ ID NO: 12047 - protein, 2442 aa, Homo sapiens
METRSPGLNNMKPQSLQLVLEEQVLALQQQMAENQAASWRKLKNSQEAQQRQATLVRKLQAKVLQYRSWCQELEKRLEATGGPIPQRWENVEEPNLDELLVRLEEEQQRCESLAEVNTQLRLHMEKADVVNKALREDVEKLTVDWSRARDELMRKESQWQMEQEFFKGYLKGEHGRLLSLWREVVTFRRHFLEMKSATDRDLMELKAEHVRLSGSLLTCCLRLTVGAQSREPNGSGRMDGREPAQLLLLLAKTQELEKEAHERSQELIQLKSQGDLEKAELQDRVTELSALLTQSQKQNEDYEKMIKALRETVEILETNHTELMEHEASLSRNAQEEKLSLQQVIKDITQVMVEEGDNIAQGSGHENSLELDSSIFSQFDYQDADKALTLVRSVLTRRRQAVQDLRQQLAGCQEAVNLLQQQHDQWEEEGKALRQRLQKLTGERDTLAGQTVDLQGEVDSLSKERELLQKAREELRQQLEVLEQEAWRLRRVNVELQLQGDSAQGQKEEQQEELHLAVRERERLQEMLMGLEAKQSESLSELITLREALESSHLEGELLRQEQTEVTAALARAEQSIAELSSSENTLKTEVADLRAAAVKLSALNEALALDKVGLNQQLLQLEEENQSVCSRMEAAEQARNALQVDLAEAEKRREALWEKNTHLEAQLQKAEEAGAELQADLRDIQEEKEEIQKKLSESRHQQEAATTQLEQLHQEAKRQEEVLARAVQEKEALVREKAALEVRLQAVERDRQDLAEQLQGLSSAKELLESSLFEAQQQNSVIEVTKGQLEVQIQTVTQAKEVIQGEVRCLKLELDTERSQAEQERDAAARQLAQAEQEGKTALEQQKAAHEKEVNQLREKWEKERSWHQQELAKALESLEREKMELEMRLKEQQTEMEAIQAQREEERTQAESALCQMQLETEKERVSLLETLLQTQKELADASQQLERLRQDMKVQKLKEQETTGILQTQLQEAQRELKEAARQHRDDLAALQEESSSLLQDKMDLQKQVEDLKSQLVAQDDSQRLVEQEVQEKLRETQEYNRIQKELEREKASLTLSLMEKEQRLLVLQEADSIRQQELSALRQDMQEAQGEQKELSAQMELLRQEVKEKEADFLAQEAQLLEELEASHITEQQLRASLWAQEAKAAQLQLRLRSTESQLEALAAEQQPGNQAQAQAQLASLYSALQQALGSVCESRPELSGGGDSAPSVWGLEPDQNGARSLFKRGPLLTALSAEAVASALHKLHQDLWKTQQTRDVLRDQVQKLEERLTDTEAEKSQVHTELQDLQRQLSQNQEEKSKWEGKQNSLESELMELHETMASLQSRLRRAELQRMEAQGERELLQAAKENLTAQVEHLQAAVVEARAQASAAGILEEDLRTARSALKLKNEEVESERERAQALQEQGELKVAQGKALQENLALLTQTLAEREEEVETLRGQIQELEKQREMQKAALELLSLDLKKRNQEVDLQQEQIQELEKCRSVLEHLPMAVQEREQKLTVQREQIRELEKDRETQRNVLEHQLLELEKKDQMIESQRGQVQDLKKQLVTLECLALELEENHHKMECQQKLIKELEGQRETQRVALTHLTLDLEERSQELQAQSSQIHDLESHSTVLARELQERDQEVKSQREQIEELQRQKEHLTQDLERRDQELMLQKERIQVLEDQRTRQTKILEEDLEQIKLSLRERGRELTTQRQLMQERAEEGKGPSKAQRGSLEHMKLILRDKEKEVECQQEHIHELQELKDQLEQQLQGLHRKVGETSLLLSQREQEIVVLQQQLQEAREQGELKEQSLQSQLDEAQRALAQRDQELEALQQEQQQAQGQEERVKEKADALQGALEQAHMTLKERHGELQDHKEQARRLEEELAVEGRRVQALEEVLGDLRAESREQEKALLALQQQCAEQAQEHEVETRALQDSWLQAQAVLKERDQELEALRAESQSSRHQEEAARARAEALQEALGKAHAALQGKEQHLLEQAELSRSLEASTATLQASLDACQAHSRQLEEALRIQEGEIQDQDLRYQEDVQQLQQALAQRDEELRHQQEREQLLEKSLAQRVQENMIQEKQNLGQEREEEEIRGLHQSVRELQLTLAQKEQEILELRETQQRNNLEALPHSHKTSPMEEQSLKLDSLEPRLQRELERLQAALRQTEAREIEWREKAQDLALSLAQTKASVSSLQEVAMFLQASVLERDSEQQRLQDELELTRRALEKERLHSPGATSTAELGSRGEQGVQLGEVSGVEAEPSPDGMEKQSWRQRLEHLQQAVARLEIDRSRLQRHNVQLRSTLEQVERERRKLKREAMRAAQAGSLEISKATASSPTQQDGRGQKNSDAKCVAELQKEVVLLQAQLTLERKQKQDYITRSAQTSRELAGLHHSLSHSLLAVAQAPEATVLEAETRRLDESLTQSLTSPGPVLLHPSPSTTQAASR

SEQ ID NO: 12048 - protein, 567 aa, Homo sapiens
MDDKDIDKELRQKLNFSYCEETEIEGQKKVEESREASSQTPEKGEVQDSEAKGTPPWTPLSNVHELDTSSEKDKESPDQILRTPVSHPLKCPETPAQPDSRSKLLPSDSPSTPKTMLSRLVISPTGKLPSRGPKHLKLTPAPLKDEMTSLALVNINPFTPESYKKLFLQSGGKRKIRGDLEEAGPEEGKGGLPAKRCVLRETNMASRYEKEFLEVEKIGVGEFGTVYKCIKRLDGCVYAIKRSMKTFTELSNENSALHEVYAHAVLGHHPHVVRYYSSWAEDDHMIIQNEYCNGGSLQAAISENTKSGNHFEEPKLKDILLQISLGLNYIHNSSMVHLDIKPSNIFICHKMQSESSGVIEEVENEADWFLSANVMYKIGDLGHATSINKPKVEEGDSRFLANEILQEDYRHLPKADIFALGLTIAVAAGAESLPTNGAAWHHIRKGNFPDVPQELSESFSSLLKNMIQPDAEQRPSAAALARNTVLRPSLGKTEELQQQLNLEKFKTATLERELREAQQAQSPQGYTHHGDTGVSGTHTGSRSTKRLVGGKSARSSSFTSGEREPLH

SEQ ID NO: 12049 - protein, 845 aa, Homo sapiens
MGSWALLWPPLLFTGLLVRPPGTMAQAQYCSVNKDIFEVEENTNVTEPLVDIHVPEGQEVTLGALSTPFAFRIQGNQLFLNVTPDYEEKSLLEAQLLCQSGGTLVTQLRVFVSVLDVNDNAPEFPFKTKEIRVEEDTKVNSTVIPETQLQAEDRDKDDILFYTLQEMTAGASDYFSLVSVNRPALRLDRPLDFYERPNMTFWLLVRDTPGENVEPSHTATATLVLNVVPADLRPPWFLPCTFSDGYVCIQAQYHGAVPTGHILPSPLVLRPGPIYAEDGDRGINQPIIYSIFRGNVNGTFIIHPDSGNLTVARSVPSPMTFLLLVKGQQADLARYSVTQVTVEAVAAAGSPPRFPQRLYRGTVARGAGAGVVVKDAAAPSQPLRIQAQDPEFSDLNSAITYRITNHSHFRMEGEVVLTTTTLAQAGAFYAEVEAHNTVTSGTATTVIEIQVSEQEPPSTDVPPSPEAGGTTGPWTSTTSEVPRPPEPSQGPSTTSSGGGTGPHPPSGTTLRPPTSSTPGGPPGAENSTSHQPATPGGDTAQTPKPGTSQPMPPGVGTSTSHQPATPSGGTAQTPEPGTSQPMPPSMGTSTSHQPATPGGGTAQTPEAGTSQPMPPGMGTSTSHQPTTPGGGTAQTPEPGTSQPMPLSKSTPSSGGGPSEDKRFSVVDMAALGGVLGALLLLALLGLAVLVHKHYGPRLKCCCGKAPEPQPQGFDNQAFLPDHKANWAPVPSPTHDPKPAEAPMPAEPAPPGPASPGGAPEPPAAARAGGSPTAVRSILTKERRPEGGYKAVWFGEDIGTEADVVVLNAPTLDVDGASDSGSGDEGEGAGRGGGPYDAPGGDDSYI

SEQ ID NO: 12050 - protein, 1142 aa, Homo sapiens
MAEPGGAAGRSHPEDGSASEGEKEGNNESHMVSPPEKDDGQKGEEAVGSTEHPEEVTTQAEAAIEEGEVETEGEAAVEGEEEAVSYGDAESEEEYYYTETSSPEGQISAADTTYPYFSPPQELPGEEAYDSVSGEAGLQGFQQEATGPPESRERRVTSPEPSHGVLGPSEQMGQVTSGPAVGRLTGSTEEPQGQVLPMGVQHRFRLSHGSDIESSDLEEFVSQEPVIPPGVPDAHPREGDLPVFQDQIQQPSTEEGAMAERVESEGSDEEAEDEGSQLVVLDPDHPLMVRFQAALKNYLNRQIEKLKLDLQELVVATKQSRAQRQELGVNLYEVQQHLVHLQKLLEKSHDRHAMASSERRQKEEELQAARALYTKTCAAANEERKKLAALQTEMENLALHLFYMQNIDQDMRDDIRVMTQVVKKAETERIRAEIEKKKQDLYVDQLTTRAQQLEEDIALFEAQYLAQAEDTRILRKAVSEACTEIDAISVEKRRIMQQWASSLVGMKHRDEAHRAVLEALRGCQHQAKSTDGEIEAYKKSIMKEEEKNEKLASILNRTETEATLLQKLTTQCLTKQVALQSQFNTYRLTLQDTEDALSQDQLEQMILTEELQAIRQAIQGELELRRKTDAAIREKLQEHMTSNKTTKYFNQLILRLQKEKTNMMTHLSKINGDIAQTTLDITHTSSRLDAHQKTLVELDQDVKKVNELITNSQSEISRRTILIERKQGLINFLNKQLERMVSELGGEEVGPLELEIKRLSKLIDEHDGKAVQAQVTWLRLQQEMVKVTQEQEEQLASLDASKKELHIMEQKKLRVESKIEQEKKEQKEIEHHMKDLDNDLKKLNMLMNKNRCSSEELEQNNRVTENEFVRSLKASERETIKMQDKLNQLSEEKATLLNQLVEAEHQIMLWEKKIQLAKEMRSSVDSEIGQTEIRAMKGEIHRMKVRLGQLLKQQEKMIRAMELAVARRETVTTQAEGQRKMDRKALTRTDFHHKQLELRRKIRDVRKATDECTKTVLELEETQRNVSSSLLEKQEKLSVIQADFDTLEADLTRLGALKRQNLSEIVALQTRLKHLQAVKEGRYVFLFRSKQSLVLERQRLDKRLALIATILDRVRDEYPQFQEALHKVSQMIANKLESPGPS

SEQ ID NO: 12051 - protein, 573 aa, Homo sapiens
MSAFCLGLVGRASAPAEPDSACCMELPAAAGDAVRSPAAAAALIFPGGSGELELALEEELALLAAGERPSDPGEHPQAEPGSLAEGAGPQPPPSQDPELLSVIRQKEKDLVLAARLGKALLERNQDMSRQYEQMHKELTDKLEHLEQEKHELRRRFENREGEWEGRVSELESDVKQLQDELERQQIHLREADREKSRAVQELSEQNQRLLDQLSRASEVERQLSMQVHALREDFREKNSSTNQHIIRLESLQAEIKMLSDRKRELEHRLSATLEENDLLQGTVEELQDRVLILERQGHDKDLQLHQSQLELQEVRLSCRQLQVKVEELTEERSLQSSAATSTSLLSEIEQSMEAEELEQEREQLRLQLWEAYCQVRYLCSHLRGNDSADSAVSTDSSMDESSETSSAKDVPAGSLRTALNELKRLIQSIVDGMEPTVTLLSVEMTALKEERDRLRVTSEDKEPKEQLQKAIRDRDEAIAKKNAVELELAKCRMDMMSLNSQLLDAIQQKLNLSQQLEAWQDDMHRVIDRQLMDTHLKERSQPAAALCRGHSAGRGDEPSIAEGKRLFSFFRKI

SEQ ID NO: 12052 - protein, 941 aa, Homo sapiens
MAGAAAAVAAGAAAGAAAAAVSVAAPGRASAPPPPPPVYCVCRQPYDVNRFMIECDICKDWFHGSCVGVEEHHAVDIDLYHCPNCAVLHGSSLMKKRRNWHRHDYTEIDDGSKPVQAGTRTFIKELRSRVFPSADEIIIKMHGSQLTQRYLEKHGFDVPIMVPKLDDLGLRLPSPTFSVMDVERYVGGDKVIDVIDVARQADSKMTLHNYVKYFMNPNRPKVLNVISLEFSDTKMSELVEVPDIAKKLSWVENYWPDDSVFPKPFVQKYCLMGVQDSYTDFHIDFGGTSVWYHVLWGEKIFYLIKPTDENLARYESWSSSVTQSEVFFGDKVDKCYKCVVKQGHTLFVPTGWIHAVLTSQDCMAFGGNFLHNLNIGMQLRCYEMEKRLKTPDLFKFPFFEAICWFVAKNLLETLKELREDGFQPQTYLVQGVKALHTALKLWMKKELVSEHAFEIPDNVRPGHLIKELSKVIRAIEEENGKPVKSQGIPIVCPVSRSSNEATSPYHSRRKMRKLRDHNVRTPSNLDILELHTREVLKRLEMCPWEEDILSSKLNGKFNKHLQPSSTVPEWRAKDNDLRLLLTNGRIIKDERQPFADQSLYTADSENEEDKRRTKKAKMKIEESSGVEGVEHEESQKPLNGFFTRVKSELRSRSSGYSDISESEDSGPECTALKSIFTTEESESSGDEKKQEITSNFKEESNVMRNFLQKSQKPSRSEIPIKRECPTSTSTEEEAIQGMLSMAGLHYSTCLQRQIQSTDCSGERNSLQDPSSCHGSNHEVRQLYRYDKPVECGYHVKTEDPDLRTSSWIKQFDTSRFHPQDLSRSQKCIRKEGSSEISQRVQSRNYVDSSGSSLQNGKYMQNSNLTSGACQISNGSLSPERPVGETSFSVPLHPTKRPASNPPPISNQATKGKRPKKGMATAKQRLGKILKLNRNGHARFFV

SEQ ID NO: 12053 - protein, 487 aa, Homo sapiens
MPVPERPAAGPDSPRPGTRRAAPRVLFGEWLLGEISSGCYEGLQWLDEARTCFRVPWKHFARKDLSEADARIFKAWAVARGRWPPSSRGGGPPPEAETAERAGWKTNFRCALRSTRRFVMLRDNSGDPADPHKVYALSRELCWREGPGTDQTEAEAPAAVPPPQGGPPGPFLAHTHAGLQAPGPLPAPAGDKGDLLLQAVQQSCLADHLLTASWGADPVPTKAPGEGQEGLPLTGACAGGEAAAPESPHQAEPYLSPSPSACTAVQEPSPGALDVTIMYKGRTVLQKVVGHPSCTFLYGPPDPAVRATDPQQVAFPSPAELPDQKQLRYTEELLRHVAPGLHLELRGPQLWARRMGKCKVYWEVGGPPGSASPSTPACLLPRNCDTPIFDFRVFFQELVEFRARQRRGSPRYTIYLGFGQDLSAGRPKEKSLVLVKLEPWLCRVHLEGTQREGVSSLDSSSLSLCLSSANSLYDDIECFLMELEQPA

SEQ ID NO: 12054 - protein, 561 aa, Homo sapiens
MMYSPICLTQDEFHPFIEALLPHVRAIAYTWFNLQARKRKYFKKHEKRMSKDEERAVKDELLSEKPEIKQKWASRLLAKLRKDIRQEYREDFVLTVTGKKHPCCVLSNPDQKGKIRRIDCLRQADKVWRLDLVMVILFKGIPLESTDGERLMKSPHCTNPALCVQPHHITVSVKELDLFLAYYVQEQDSGQSGSPSHNDPAKNPPGYLEDSFVKSGVFNVSELVRVSRTPITQGTGVNFPIGEIPSQPYYHDMNSGVNLQRSLSSPPSSKRPKTISIDENMEPSPTGDFYPSPSSPAAGSRTWHERDQDMSSPTTMKKPEKPLFSSASPQDSSPRLSTFPQHHHPGIPGVAHSVISTRTPPPPSPLPFPTQAILPPAPSSYFSHPTIRYPPHLNPQDTLKNYVPSYDPSSPQTSQPNGSGQVVGKVPGHFTPVLAPSPHPSAVRPVTLSMTDTKPITTSTEAYTASGTSQANRYVGLSPRDPSFLHQQQLRICDWTMNQNGRHLYPSTSEDTLGITWQSPGTWASLVPFQVSNRTPILPANVQNYGLNIIGEPFLQAETSN

SEQ ID NO: 12055 - protein, 487 aa, Homo sapiens
MMYSPICLTQDEFHPFIEALLPHVRAIAYTWFNLQARKRKYFKKHEKRMSKDEERAVKDELLSEKPEIKQKWASRLLAKLRKDIRQEYREDFVLTVTGKKHPCCVLSNPDQKGKIRRIDCLRQADKVWRLDLVMVILFKGIPLESTDGERLMKSPHCTNPALCVQPHHITVSVKELDLFLAYYVQEQDSGQSGSPSHNDPAKNPPGYLEDSFVKSGVFNVSELVRVSRTPITQGTGVNFPIGEIPSQPYYHDMNSGVNLQRSLSSPPSSKRPKTISIDENMEPSPTGDFYPSPSSPAAGSRTWHERDQDMSSPTTMKKPEKPLFSSASPQDSSPRLSTFPQHHHPGIPGVAHSVISTRTPPPPSPLPFPTQAILPPAPSSYFSHPTIRYPPHLNPQDTLKNYVPSYDPSSPQTSQLRICDWTMNQNGRHLYPSTSEDTLGITWQSPGTWASLVPFQVSNRTPILPANVQNYGLNIIGEPFLQAETSN

SEQ ID NO: 12056 - protein, 570 aa, Homo sapiens
MMYSPICLTQDEFHPFIEALLPHVRAIAYTWFNLQARKRKYFKKHEKRMSKDEERAVKDELLSEKPEIKQKWASRLLAKLRKDIRQEYREDFVLTVTGKKHPCCVLSNPDQKGKIRRIDCLRQADKVWRLDLVMVILFKGIPLESTDGERLMKSPHCTNPALCVQPHHITVSVKELDLFLAYYVQEQDSGQSGSPSHNDPAKNPPGYLEDSFVKSGVFNVSELVRVSRTPITQGTGVNFPIGEIPSQPYYHDMNSGVNLQRSLSSPPSSKRPKTISIDENMEPSPTGDFYPSPSSPAAGSRTWHERDQDMSSPTTMKKPEKPLFSSASPQDSSPRLSTFPQHHHPGIPGVAHSVISTRTPPPPSPLPFPTQAILPPAPSSYFSHPTIRYPPHLNPQDTLKNYVPSYDPSSPQTSQPNGSGQVVGKVPGHFTPVLAPSPHPSAVRPVTLSMTDTKPITTSTEGEAASPTATTYTASGTSQANRYVGLSPRDPSFLHQQQLRICDWTMNQNGRHLYPSTSEDTLGITWQSPGTWASLVPFQVSNRTPILPANVQNYGLNIIGEPFLQAETSN

SEQ ID NO: 12057 - protein, 1479 aa, Homo sapiens
MEPRMESCLAQVLQKDVGKRLQVGQELIDYFSDKQKSADLEHDQTMLDKLVDGLATSWVNSSNYKVVLLGMDILSALVTRLQDRFKAQIGTVLPSLIDRLGDAKDSVREQDQTLLLKIMDQAANPQYVWDRMLGGFKHKNFRTREGICLCLIATLNASGAQTLTLSKIVPHICNLLGDPNSQVRDAAINSLVEIYRHVGERVRADLSKKGLPQSRLNVIFTKFDEVQKSGNMIQSANDKNFDDEDSVDGNRPSSASSTSSKAPPSSRRNVGMGTTRRLGSSTLGSKSSAAKEGAGAVDEEDFIKAFDDVPVVQIYSSRDLEESINKIREILSDDKHDWEQRVNALKKIRSLLLAGAAEYDNFFQHLRLLDGAFKLSAKDLRSQVVREACITLGHLSSVLGNKFDHGAEAIMPTIFNLIPNSAKIMATSGVVAVRLIIRHTHIPRLIPVITSNCTSKSVAVRRRCFEFLDLLLQEWQTHSLERHISVLAETIKKGIHDADSEARIEARKCYWGFHSHFSREAEHLYHTLESSYQKALQSHLKNSDSIVSLPQSDRSSSSSQESLNRPLSAKRSPTGSTTSRASTVSTKSVSTTGSLQRSRSDIDVNAAASAKSKVSSSSGTTPFSSAAALPPGSYASLDGTTTKAEGRIRTRRQSSGSATNVASTPDNRGRSRAKVVSQSQRSRSANPAGAGSRSSSPGKLLGSGYGGLTGGSSRGPPVTPSSEKRSKIPRSQGCSRETSPNRIGLDRFGLGQPGRIPGSVNAMRVLSTSTDLEAAVADALLLGDSRSKKKPVRRRYEPYGMYSDDDANSDASSVCSERSYGSRNGGIPHYLRQTEDVAEVLNHCASSNWSERKEGLLGLQNLLKSQRTLSRVELKRLCEIFTRMFADPHSKRVFSMFLETLVDFIIIHKDDLQDWLFVLLTQLLKKMGADLLGSVQAKVQKALDVTRDSFPFDQQFNILMRFIVDQTQTPNLKVKVAILKYIESLARQMDPTDFVNSSETRLAVSRIITWTTEPKSSDVRKAAQIVLISLFELNTPEFTMLLGALPKTFQDGATKLLHNHLKNSSNTSVGSPSNTIGRTPSRHTSSRTSPLTSPTNCSHGGLSPSMLDYDTENLNSEEIYSSLRGVTEAIEKFSFRSQEDLNEPIKRDGKKECDIVSRDGGAASPATEGRGGSEVEGGRTALDNKTSLLNTQPPRAFPGPRARDYNPYPYSDAINTYDKTALKEAVFDDDMEQLRDVPIDHSDLVADLLKELSNHNERVEERKGALLELLKITREDSLGVWEEHFKTILLLLLETLGDKDHSIRALALRVLREILRNQPARFKNYAELTIMKTLEAHKDSHKEVVRAAEEAASTLASSIHPEQCIKVLCPIIQTADYPINLAAIKMQTKVVERIAKESLLQLLVDIIPGLLQGYDNTESSVRKASVFCLVAIYSVIGEDLKPHLAQLTGSKMKLLNLYIKRAQTTNSNSSSSSDVSTHS

SEQ ID NO: 12058 - protein, 544 aa, Homo sapiens
MASEELYEVERIVDKRKNKKGKTEYLVRWKGYDSEDDTWEPEQHLVNCEEYIHDFNRRHTEKQKESTLTRTNRTSPNNARKQISRSTNSNFSKTSPKALVIGKDHESKNSQLFAASQKFRKNTAPSLSSRKNMDLAKSGIKILVPKSPVKSRTAVDGFQSESPEKLDPVEQGQEDTVAPEVAAEKPVGALLGPGAERARMGSRPRIHPLVPQVPGPVTAAMATGLAVNGKGTSPFMDALTANGTTNIQTSVTGVTASKRKFIDDRRDQPFDKRLRFSVRQTESAYRYRDIVVRKQDGFTHILLSTKSSENNSLNPEVMREVQSALSTAAADDSKLVLLSAVGSVFCCGLDFIYFIRRLTDDRKRESTKMAEAIRNFVNTFIQFKKPIIVAVNGPAIGLGASILPLCDVVWANEKAWFQTPYTTFGQSPDGCSTVMFPKIMGGASANEMLLSGRKLTAQEACGKGLVSQVFWPGTFTQEVMVRIKELASCNPVVLEESKALVRCNMKMELEQANERECEVLKKIWGSAQGMDSMLKYLQRKIDEF

SEQ ID NO: 12059 - protein, 170 aa, Homo sapiens
MTEYKLVVVGAGGVGKSALTIQLIQNHFVDEYDPTIEDSYRKQVVIDGETCLLDILDTAGQEEYSAMRDQYMRTGEGFLCVFAINNTKSFEDIHQYREQIKRVKDSDDVPMVLVGNKCDLAARTVESRQAQDLARSYGIPYIETSAKTRQGSRSGSSSSSGTLWDPPGPM

SEQ ID NO: 12060 - protein, 1505 aa, Homo sapiens
MVHVARLLLLLLTFFLRTDAETPPRFTRTPVDQTGVSGGVASFICQATGDPRPKIVWNKKGKKVSNQRFEVIEFDDGSGSVLRIQPLRTPRDEAIYECVASNNVGEISVSTRLTVLREDQIPRGFPTIDMGPQLKVVERTRTATMLCAASGNPDPEITWFKDFLPVDTSNNNGRIKQLRSESIGALQIEQSEESDQGKYECVATNSAGTRYSAPANLYVRVRRVPPRFSIPPTNHEIMPGGSVNITCVAVGSPMPYVKWMLGAEDLTPEDDMPIGRNVLELNDVRQSANYTCVAMSTLGVIEAIAQITVKALPKPPGTPVVTESTATSITLTWDSGNPEPVSYYIIQHKPKNSEELYKEIDGVATTRYSVAGLSPYSDYEFRVVAVNNIGRGPPSEPVLTQTSEQAPSSAPRDVQARMLSSTTILVQWKEPEEPNGQIQGYRVYYTMDPTQHVNNWMKHNVADSQITTIGNLVPQKTYSVKVLAFTSIGDGPLSSDIQVITQTGVPGQPLNFKAEPESETSILLSWTPPRSDTIANYELVYKDGEHGEEQRITIEPGTSYRLQGLKPNSLYYFRLAARSPQGLGASTAEISARTMQSMFAKNFHVKAVMKTSVLLSWEIPENYNSAMPFKILYDDGKMVEEVDGRATQKLIVNLKPEKSYSFVLTNRGNSAGGLQHRVTAKTAPDVLRTKPAFIGKTNLDGMITVQLPEVPANENIKGYYIIIVPLKKSRGKFIKPWESPDEMELDELLKEISRKRRSIRYGREVELKPYIAAHFDVLPTEFTLGDDKHYGGFTNKQLQSGQEYVFFVLAVMEHAESKMYATSPYSDPVVSMDLDPQPITDEEEGLIWVVGPVLAVVFIICIVIAILLYKRKRAESDSRKSSIPNNKEIPSHHPTDPVELRRLNFQTPGSDDSGYPGNLHSSSMASHPPIPILELADHIERLKANDNLKFSQEYESIDPGQQFTWEHSNLEVNKPKNRYANVIAYDHSRVLLSAIEGIPGSDYVNANYIDGYRKQNAYIATQGSLPETFGDFWRMIWEQRSATVVMMTKLEERSRVKCDQYWPSRGTETHGLVQVTLLDTVELATYCVRTFALYKNGSSEKREVRQFQFTAWPDHGVPEHPTPFLAFLRRVKTCNPPDAGPMVVHCSAGVGRTGCFIVIDAMLERIKHEKTVDIYGHVTLMRAQRNYMVQTEDQYIFIHDALLEAVTCGNTEVPARNLYAYIQKLTQIETGENVTGMELEFKRLASSKAHTSRFISANLPCNKFKNRLVNIMPYESTRVCLQPIRGVEGSDYINASFIDGYRQQKAYIATQGPLAETTEDFWRMLWEHNSTIVVMLTKLREMGREKCHQYWPAERSARYQYFVVDPMAEYNMPQYILREFKVTDARDGQSRTVRQFQFTDWPEQGVPKSGEGFIDFIGQVHKTKEQFGQDGPISVHCSAGVGRTGVFITLSIVLERMRYEGVVDIFQTVKMLRTQRPAMVQTEDQYQFSYRAALEYLGSFDHYAT

SEQ ID NO: 12061 - protein, 1502 aa, Homo sapiens
MVHVARLLLLLLTFFLRTDAETPPRFTRTPVDQTGVSGGVASFICQATGDPRPKIVWNKKGKKVSNQRFEVIEFDDGSGSVLRIQPLRTPRDEAIYECVASNNVGEISVSTRLTVLREDQIPRGFPTIDMGPQLKVVERTRTATMLCAASGNPDPEITWFKDFLPVDTSNNNGRIKQLRSGGTPIRGALQIEQSEESDQGKYECVATNSAGTRYSAPANLYVRELREVRRVPPRFSIPPTNHEIMPGGSVNITCVAVGSPMPYVKWMLGAEDLTPEDDMPIGRNVLELNDVRQSANYTCVAMSTLGVIEAIAQITVKALPKPPGTPVVTESTATSITLTWDSGNPEPVSYYIIQHKPKNSEELYKEIDGVATTRYSVAGLSPYSDYEFRVVAVNNIGRGPPSEPVLTQTSEQAPSSAPRDVQARMLSSTTILVQWKEPEEPNGQIQGYRVYYTMDPTQHVNNWMKHNVADSQITTIGNLVPQKTYSVKVLAFTSIGDGPLSSDIQVITQTGVPGQPLNFKAEPESETSILLSWTPPRSDTIANYELVYKDGEHGEEQRITIEPGTSYRLQGLKPNSLYYFRLAARSPQGLGASTAEISARTMQSMFAKNFHVKAVMKTSVLLSWEIPENYNSAMPFKILYDDGKMVEEVDGRATQKLIVNLKPEKSYSFVLTNRGNSAGGLQHRVTAKTAPDVLRTKPAFIGKTNLDGMITVQLPEVPANENIKGYYIIIVPLKKSRGKFIKPWESPDEMELDELLKEISRKRRSIRYGREVELKPYIAAHFDVLPTEFTLGDDKHYGGFTNKQLQSGQEYVFFVLAVMEHAESKMYATSPYSDPVVSMDLDPQPITDEEEGLIWVVGPVLAVVFIICIVIAILLYKSKPDRKRAESDSRKSSIPNNKEIPSHHPTDPVELRRLNFQTPGMASHPPIPILELADHIERLKANDNLKFSQEYESIDPGQQFTWEHSNLEVNKPKNRYANVIAYDHSRVLLSAIEGIPGSDYVNANYIDGYRKQNAYIATQGSLPETFGDFWRMIWEQRSATVVMMTKLEERSRVKCDQYWPSRGTETHGLVQVTLLDTVELATYCVRTFALYKNGSSEKREVRQFQFTAWPDHGVPEHPTPFLAFLRRVKTCNPPDAGPMVVHCSAGVGRTGCFIVIDAMLERIKHEKTVDIYGHVTLMRAQRNYMVQTEDQYIFIHDALLEAVTCGNTEVPARNLYAYIQKLTQIETGENVTGMELEFKRLASSKAHTSRFISANLPCNKFKNRLVNIMPYESTRVCLQPIRGVEGSDYINASFIDGYRQQKAYIATQGPLAETTEDFWRMLWEHNSTIVVMLTKLREMGREKCHQYWPAERSARYQYFVVDPMAEYNMPQYILREFKVTDARDGQSRTVRQFQFTDWPEQGVPKSGEGFIDFIGQVHKTKEQFGQDGPISVHCSAGVGRTGVFITLSIVLERMRYEGVVDIFQTVKMLRTQRPAMVQTEDQYQFSYRAALEYLGSFDHYAT

SEQ ID NO: 12062 - protein, 1505 aa, Homo sapiens [sequence omitted]

SEQ ID NO: 12063 - protein, 372 aa, Homo sapiens
MAPAKATNVVRLLLGSTALWLSQLGSGTVAASKSVTAHLAAKWPETPLLLEASEFMAEESNEKFWQFLETVQELAIYKQTESDYSYYNLILKKAGQFLDNLHINLLKFAFSIRAYSPAIQMFQQIAADEPPPDGCNAFVVIHKKHTCKINEIKKLLKKAASRTRPYLFKGDHKFPTNKENLPVVILYAEMGTRTFSAFHKVLSEKAQNEEILYVLRHYIQKPSSRKMYLSGYGVELAIKSTEYKALDDTQVKTVTNTTVEDETETNEVQGFLFGKLKEIYSDLRDNLTAFQKYLIESNKQMMPLKVWELQDLSFQAASQIMSAPVYDSIKLMKDISQNFPIKARLRMNILICLFQSTLNVKNLRSRHLYNKT

SEQ ID NO: 12064 - protein, 306 aa, Homo sapiens
MALVFEKCELATCTPREPGVAGGDVCSSDSFNEDIAVFAKQVRAEKPLFSSNPELDNLMIQAIQVLRFHLLELEKVHELCDNFCHRYISCLKGKMPIDLVIDERDGSSKSDHEELSGSSTNLADHNPSSWRDHDDATSTHSAGTPGPSSGGHASQSGDNSSEQGDGLDNSVASPGTGDDDDPDKDKKRQKKRGIFPKVATNIMRAWLFQHLTHPYPSEEQKKQLAQDTGLTILQVNNWFINARRRIVQPMIDQSNRAVSQGAAYSPEGQPMGSFVLDGQQHMGIRPAGPMSGMGMNMGMDGQWHYM

SEQ ID NO: 12065 - protein, 561 aa, Homo sapiens
MMQGEAHPSASLIDRTIKMRKETEARKVVLAWGLLNVSMAGMIYTEMTGKLISSYYNVTYWPLWYIELALASLFSLNALFDFWRYFKYTVAPTSLVVSPGQQTLLGLKTAVVQTTPPHDLAATQIPPAPPSPSIQGQSVLSYSPSRSPSTSPKFTTSCMTGYSPQLQGLSSGGSGSYSPGVTYSPVSGYNKLASFSPSPPSPYPTTVGPVESSGLRSRYRSSPTVYNSPTDKEDYMTDLRTLDTFLRSEEEKQHRVKLGSPDSTSPSSSPTFWNYSRSMGDYAQTLKKFQYQLACRSQAPCANKDEADLSSKQAAEEVWARVAMNRQLLDHMDSWTAKFRNWINETILVPLVQEIESVSTQMRRMGCPELQIGEASITSLKQAALVKAPLIPTLNTIVQYLDLTPNQEYLFERIKELSQGGCMSSFRWNRGGDFKGRKWDTDLPTDSAIIMHVFCTYLDSRLPPHPKYPDGKTFTSQHFVQTPNKPDVTNENVFCIYQSAINPPHYELIYQRHVYNLPKGRNNMFHTLLMFLYIIKTKESGMLGRVNLGLSGVNILWIFGE

SEQ ID NO: 12066 - protein, 1032 aa, Homo sapiens
MAFTNYSSLNRAQLTFEYLHTNSTTHEFLFGALAELVDNARDADATRIDIYAERREDLRGGFMLCFLDDGAGMDPSDAASVIQFGKSAKRTPESTQIGQYGNGLKSGSMRIGKDFILFTKKEDTMTCLFLSRTFHEEEGIDEVIVPLPTWNARTREPVTDNVEKFAIETELIYKYSPFRTEEEVMTQFMKIPGDSGTLVIIFNLKLMDNGEPELDIISNPRDIQMAETSPEGTKPERRSFRAYAAVLYIDPRMRIFIHGHKVQTKRLSCCLYKPRMYKYTSSRFKTRAEQEVKKAEHVARIAEEKAREAESKARTLEVRLGGDLTRDSRVMLRQVQNRAITLRREADVKKRIKEAKQRALKEPKELNFVFGVNIEHRDLDGMFIYNCSRLIKMYEKVGPQLEGGMACGGVVGVVDVPYLVLEPTHNKQDFADAKEYRHLLRAMGEHLAQYWKDIAIAQRGIIKFWDEFGYLSANWNQPPSSELRYKRRRAMEIPTTIQCDLCLKWRTLPFQLSSVEKDYPDTWVCSMNPDPEQDRCEASEQKQKVPLGTFRKDMKTQEEKQKQLTEKIRQQQEKLEALQKTTPIRSQADLKKLPLEVTTRPSTEEPVRRPQRPRSPPLPAVIRNAPSRPPSLPTPRPASQPRKAPVISSTPKLPALAAREEASTSRLLQPPEAPRKPANTLVKTASRPAPLVQQLSPSLLPNSKSPREVPSPKVIKTPVVKKTESPIKLSPATPSRKRSVAVSDEEEVEEEAERRKERCKRGRFVVKEEKKDSNELSDSAGEEDSADLKRAQKDKGLHVEVRVNREWYTGRVTAVEVGKHVVRWKVKFDYVPTDTTPRDRWVEKGSEDVRLMKPPSPEHQSLDTQQEGGEEEVGPVAQQAIAVAEPSTSECLRIEPDTTALSTNHETIDLLVQILRNCLRYFLPPSFPISKKQLSAMNSDELISFPLKEYFKQYEVGLQNLCNSYQSRADSRAKASEESLRTSERKLRETEEKLQKLRTNIVALLQKVQEDIDINTDDELDAYIEDLITKGD

SEQ ID NO: 12067 - protein, 251 aa, Homo sapiens
MCSPHMGEQDWTCRDPGWEQNLRQLRVLWEGNGFIAAFRFYFCTFAFYLPVVLLTGPRSGAVSGHFWEPWTALERRQELPRKELNSVASELSARQEESEHSHKHLIELRREFKKNVPEEIREMVAPVLKSFQAEVVALSKRSQEAEAAFLSVYKQLIEAPDPVPVFEAARSLDDRLQPPSFDPSGQPRRDLHTSWKRNPELLSPKEQREGTSPAGPTLTEGSRLPGIPGKALLTETLLQRNEAEKQKGLQE

SEQ ID NO: 12068 - protein, 573 aa, Homo sapiens
MRPRGLPPLLVVLLGCWASVSAQTDATPAVTTEGLNSTEAALATFGTFPSTRPPGTPRAPGPSSGPRPTPVTDVAVLCVCDLSPAQCDINCCCDPDCSSVDFSVFSACSVPVVTGDSQFCSQKAVIYSLNFTANPPQRVFELVDQINPSIFCIHITNYKPALSFINPEVPDENNFDTLMKTSDGFTLNAESYVSFTTKLDIPTAAKYEYGVPLQTSDSFLRFPSSLTSSLCTDNNPAGQAYWFTPVIPALWEAEARGSLEVPDSRKKVPITVQSIVIQSLNKTLTRREDTDVLQPTLVNAGHFSLCVNVVLEVKYSLTYTDAGEVTKADLSFVLGTVSSVVVPLQQKFEIHFLQENTQPVPLSGNPGYVVGLPLAAGFQPHKGSGIIQTTNRYGQLTILHSTTEQDCLALEGVRTPVLFGYTMQSGCKLRLTGALPCQLVAQKVKSLLWGQGFPDYVAPFGNSQAQDMLDWVPIHFITQSFNRKDSCQLPGALVIEVKWTKYGSLLNPQAKIVNVTANLISSSFPEANSGNERTILISTAVTFVDVSAPAEAGFRAPPAINARLPFNFFFPFV

SEQ ID NO: 12069 - protein, 592 aa, Homo sapiens
MRPRGLPPLLVVLLGCWASVSAQTDATPAVTTEGLNSTEAALATFGTFPSTRPPGTPRAPGPSSGPRPTPVTDVAVLCVCDLSPAQCDINCCCDPDCSSVDFSVFSACSVPVVTGDSQFCSQKAVIYSLNFTANPPQRVFELVDQINPSIFCIHITNYKPALSFINPEVPDENNFDTLMKTSDGFTLNAESYVSFTTKLDIPTAAKYEYGVPLQTSDSFLRFPSSLTSSLCTDNNPAAFLVNQAVKCTRKINLEQCEEIEALSMAFYSSPEILRVPDSRKKVPITVQSIVIQSLNKTLTRREDTDVLQPTLVNAGHFSLCVNVVLEVKYSLTYTDAGEVTKADLSFVLGTVSSVVVPLQQKFEIHFLQENTQPVPLSGNPGYVVGLPLAAGFQPHKGSGIIQTTNRYGQLTILHSTTEQDCLALEGVRTPVLFGYTMQSGCKLRLTGALPCQLVAQKVKSLLWGQGFPDYVAPFGNSQAQDMLDWVPIHFITQSFNRKHFVLQDSCQLPGALVIEVKWTKYGSLLNPQAKIVNVTANLISSSFPEANSGNERTILISTAVTFVDVSAPAEAGFRAPPAINARLPFNFFFPFV

SEQ ID NO: 12070 - protein, 1091 aa, Homo sapiens
MSEMSGATTSLATVALDPPSDRTSHPQDVIEDLSQNSITGEHSQLLDDGHKKARNAYLNNSNYEEGDEYFDKNLALFEEEMDTRPKVSSLLNRMANYTNLTQGAKEHEEAENITEGKKKPTKTPQMGTFMGVYLPCLQNIFGVILFLRLTWVVGTAGVLQAFAIVLICCCCTMLTAISMSAIATNGVVPAGGSYFMISRALGPEFGGAVGLCFYLGTTFAAAMYILGAIEIFLVYIVPRAAIFHSDDALKESAAMLNNMRVYGTAFLVLMVLVVFIGVRYVNKFASLFLACVIVSILAIYAGAIKSSFAPPHFPVCMLGNRTLSSRHIDVCSKTKEINNMTVPSKLWGFFCNSSQFFNATCDEYFVHNNVTSIQGIPGLASGIITENLWSNYLPKGEIIEKPSAKSSDVLGSLNHEYVLVDITTSFTLLVGIFFPSVTGIMAGSNRSGDLKDAQKSIPIGTILAILTTSFVYLSNVVLFGACIEGVVLRDKFGDAVKGNLVVGTLSWPSPWVIVIGSFFSTCGAGLQSLTGAPRLLQAIAKDNIIPFLRVFGHSKANGEPTWALLLTAAIAELGILIASLDLVAPILSMFFLMCYLFVNLACALQTLLRTPNWRPRFRYYHWALSFMGMSICLALMFISSWYYAIVAMVIAGMIYKYIEYQGAEKEWGDGIRGLSLSAARFALLRLEEGPPHTKNWRPQLLVLLKLDEDLHVKHPRLLTFASQLKAGKGLTIVGSVIVGNFLENYGEALAAEQTIKHLMEAEKVKGFCQLVVAAKLREGISHLIQSCGLGGMKHNTVVMGWPNGWRQSEDARAWKTFIGTVRVTTAAHLALLVAKNISFFPSNVEQFSEGNIDVWWIVHDGGMLMLLPFLLKQHKVWRKCSIRIFTVAQLEDNSIQMKKDLATFLYHLRIEAEVEVVEMHDSDISAYTYERTLMMEQRSQMLRHMRLSKTERDREAQLVKDRNSMLRLTSIGSDEDEETETYQEKVHMTWTKDKYMASRGQKAKSMEGFQDLLNMRPDQSNVRRMHTAVKLNEVIVNKSHEAKLVLLNMPGPPRNPEGDENYMEFLEVLTEGLERVLLVRGGGSEVITIYS

SEQ ID NO: 12071 - protein, 1135 aa, Homo sapiens
MHPPETTTKMASVRFMVTPTKIDDIPGLSDTSPDLSSRSSSRVRFSSRESVPETSRSEPMSEMSGATTSLATVALDPPSDRTSHPQDVIEDDGHKKARNAYLNNSNYEEGDEYFDKNLALFEEEMDTRPKVSSLLNRMANYTNLTQGAKEHEEAENITEGKKKPTKTPQMGTFMGVYLPCLQNIFGVILFLRLTWVVGTAGVLQAFAIVLICCCCTMLTAISMSAIATNGVVPAGGSYFMISRALGPEFGGAVGLCFYLGTTFAAAMYILGAIEIFLVYIVPRAAIFHSDDALKESAAMLNNMRVYGTAFLVLMVLVVFIGVRYVNKFASLFLACVIVSILAIYAGAIKSSFAPPHFPVCMLGNRTLSSRHIDVCSKTKEINNMTVPSKLWGFFCNSSQFFNATCDEYFVHNNVTSIQGIPGLASGIITENLWSNYLPKGEIIEKPSAKSSDVLGSLNHEYVLVDITTSFTLLVGIFFPSVTGIMAGSNRSGDLKDAQKSIPIGTILAILTTSFVYLSNVVLFGACIEGVVLRDKFGDAVKGNLVVGTLSWPSPWVIVIGSFFSTCGAGLQSLTGAPRLLQAIAKDNIIPFLRVFGHSKANGEPTWALLLTAAIAELGILIASLDLVAPILSMFFLMCYLFVNLACALQTLLRTPNWRPRFRYYHWALSFMGMSICLALMFISSWYYAIVAMVIAGMIYKYIEYQGAEKEWGDGIRGLSLSAARFALLRLEEGPPHTKNWRPQLLVLLKLDEDLHVKHPRLLTFASQLKAGKGLTIVGSVIVGNFLENYGEALAAEQTIKHLMEAEKVKGFCQLVVAAKLREGISHLIQSCGLGGMKHNTVVMGWPNGWRQSEDARAWKTFIGTVRVTTAAHLALLVAKNISFFPSNVEQFSEGNIDVWWIVHDGGMLMLLPFLLKQHKVWRKCSIRIFTVAQLEDNSIQMKKDLATFLYHLRIEAEVEVVEMHDSDISAYTYERTLMMEQRSQMLRHMRLSKTERDREAQLVKDRNSMLRLTSIGSDEDEETETYQEKVHMTWTKDKYMASRGQKAKSMEGFQDLLNMRPDQSNVRRMHTAVKLNEVIVNKSHEAKLVLLNMPGPPRNPEGDENYMEFLEVLTEGLERVLLVRGGGSEVITIYS

SEQ ID NO: 12072 - protein, 898 aa, Homo sapiens
EIQLSKSDVVLSFTLEIVIMEVQGLKSVAPNRIVYCTMEVEGEKLQTDQAEASRPQWGTQGDFTTTHPRPVVKVKLFTESTGVLALEDKELGRVILYPTSNSSKSAELHRMVVPKNSQDSDLKIKLAVRMDKPAHMKHSGYLYALGQKVWKRWKKRYFVLVQVSQYTFAMCSYREKKSEPQELMQLEGYTVDYTDPHPGLQGGCMFFNAVKEGDTVIFASDDEQDRILWVQAMYRATGQSYKPVPAIQTQKLNPKGGTLHADAQLYADRFQKHGMDEFISANPCKLDHAFLFRILQRQTLDHRLNDSYSCLGWFSPGQVFVLDEYCARYGVRGCHRHLCYLAELMEHSENGAVIDPTLLHYSFAFCASHVHGNRPDGIGTVSVEEKERFEEIKERLSSLLENQISHFRYCFPFGRPEGALKATLSLLERVLMKDIATPIPAEEVKKVVRKCLEKAALINYTRLTEYAKIEETMNQASPARKLEEILHLAELCIEVLQQNEEHHAEAFAWWPDLLAEHAEKFWALFTVDMDTALEAQPQDSWDSFPLFQLLNNFLRNDTLLCNGKFHKHLQEIFVPLVVRYVDLMESSIAQSIHRGFEQETWQPVNNGSATSEDLFWKLDALQMFVFDLHWPEQEFAHHLEQRLKLMASDMLEACVKRTRTAFELKLQKASKTTDLRIPASVCTMFNVLVDAKKQSTKLCALDGGQEQQYHSKIDDLIDNSVKEIISLLVSKFVSVLEGVLSKLSRYDEGTFFSSILSFTVKAAAKYVDVPKPGMDLADTYIMFVRQNQDILREKVNEEMYIEKLFDQWYSSSMKVICVWLTDRLDLQLHIYQLKTLIKIVKKTYRDFRLQGVLEGTLNSKTYDTVHRRLTVEEATASVSEGGGLQGITMKDSDEEEEG

SEQ ID NO: 12073 - protein, 641 aa, Homo sapiens
MDSVVFEDVAVNFTQEEWALLGPSQKKLYRDVMQETFVNLASIGENWEEKNIEDHKNQGRKLRSHMVERLCERKEGSQFGETISQTPNPKPNKKTFTRVKPYECSVCGKDYMCHSSLNRHMRSHTEHRSYEYHKYGEKSYECKECGKRFSFRSSFRIHERTHTGEKPYKCKQCGKAFSWPSSFQIHERTHTGEKPYECKECGKAFIYHTTFRGHMRMHTGEKPYKCKECGKTFSHPSSFRNHERTHSGEKPYECKQCGKAFRYYQTFQIHERTHTGEKPYQCKQCGKALSCPTSFRSHERIHTGEKPYKCKKCGKAFSFPSSFRKHERIHTGEKPYDCKECGKAFISLPSYRRHMIMHTGNGPYKCKECGKAFDCPSSFQIHERTHTGEKPYECKQCGKAFSCSSSFRMHERTHTGEKPHECKQCGKAFSCSSSVRIHERTHTGEKPYECKQCGKAFSCSSSFRMHERIHTGEKPYECKQCGKAFSFSSSFRMHERTHTGEKPYECKQCGKAFSCSSSFRMHERTHTGEKPYECKQCGKAFSCSSSIRIHERTHTGEKPYECKQCGKAFSCSSSVRMHERTHTGVKPYECKQCDKAFSCSRSFRIHERTHTGEKPYACQQCGKAFKCSRSFRIHERVHSGE

SEQ ID NO: 12074 - protein, 460 aa, Homo sapiens
MVLDFVTPTPLGTRWGLGGTCVNVGCIPKKLMHQAALLGQALQDSRNYGWKVEETVKHDWDRMIEAVQNHIGSLNWGYRVALREKKVVYENAYGQFIGPHRIKATNNKGKEKIYSAERFLIATGERPRYLGIPGDKEYCISSDDLFSLPYCPGKTLVVGASYVALECAGFLAGIGLDVTVMVRSILLRGFDQDMANKIGEHMEEHGIKFIRQFVPIKVEQIEAGTPGRLRVVAQSTNSEEIIEGEYNTVMLAIGRDACTRKIGLETVGVKINEKTGKIPVTDEEQTNVPYIYAIGDILEDKVELTPVAIQAGRLLAQRLYAGSTVKCDYENVPTTVFTPLEYGACGLSEEKAVEKFGEENIEVYHSYFWPLEWTIPSRDNNKCYAKIICNTKDNERVVGFHVLGPNAGEVTQGFAAALKCGLTKKQLDSTIGIHPVCAEVFTTLSVTKRSGASILQAGCG

SEQ ID NO: 12075 - protein, 589 aa, Homo sapiens
MDSVAFEDVAVNFTHEEWALLGPSQKNLYRDVMRETIRNLNCIGMKWENQNIDDQHQNLRRNPRCDVVERFGKSKDGSQCGETLSQIRNSIVNKNTPARVDACGSSVNGEVIMGHSSLNCYIRVDTGHKHRECHEYAEKSYTHKQCGKGLSYRHSFQTCERPHTGKKPYDCKECGKTFSSPGNLRRHMVVKGGDGPYKCELCGKAFFWPSLLRMHERTHTGEKPYECKQCSKAFPVYSSYLRHEKIHTGEKPYECKQCSKAFPDYSSYLRHERTHTGEKPYKCKQCGKAFSVSGSLRVHERIHTGEKPYTCKQCGKAFCHLGSFQRHMIMHSGDGPHKCKICGKGFDFPGSARIHEGTHTLEKPYECKQCGKLLSHRSSFRRHMMAHTGDGPHKCTVCGKAFDSPSVFQRHERTHTGEKPYECKQCGKAFRTSSSLRKHETTHTGEQPYKCKCGKAFSDLFSFQSHETTHSEEEPYECKECGKAFSSFKYFCRHERTHSEEKSYECQICGKAFSRFSYLKTHERTHTAEKPYECKQCRKAFFWPSFLLRHERTHTGERPYECKHCGKAFSRSSFCREHERTHTGEKPYE

SEQ ID NO: 12076 - protein, 495 aa, Homo sapiens
MSQLVECVPNFSEGKNQEVIDAISGAITQTPGCVLLDVDAGPSTNRTVYTFVGPPECVVEGALNAARVASRLIDMSRHQGEHPRMGALDVCPFIPVRGVSVDECVLCAQAFGQRLAEELDVPVYLYGEAARMDSRRTLPAIRAGEYEALPKKLQQADWAPDFGPSSFVPSWGATATGARKFLIAFNINLLGTKEQAHRIALNLREQGRGKDQPGRLKKVQGIGWYLDEKNLAQVSTNLLDFEVTALHTVYEETCREAQELSLPVVGSQLVGLVPLKALLDAAAFYCEKENLFILEEEQRIRLVVSRLGLDSLCPFSPKERIIEYLVPERGPERGLGSKSLRAFVGEVGARSAAPGGGSVAAAAAAMGAALGSMVGLMTYGRRQFQSLDTTMRRLIPPFREASAKLTTLVDADAEAFTAYLAHGGPTGGSEAGSLCAADAGGDGGLAVAGPAGTGPVWEPGLPVRPPGGGQSPGDGRVWRIFQRAHQPEGHHRRGI

SEQ ID NO: 12077 - protein, 572 aa, Homo sapiens
MSQLVECVPNFSEGKNQEVIDAISGAITQTPGCVLLDVDAGPSTNRTVYTFVGPPECVVEGALNAARVASRLIDMSRHQGEHPRMGALDVCPFIPVRGVSVDECVLCAQAFGQRLAEELDVPVYLYGEAARMDSRRTLPAIRAGEYEALPKKLQQADWAPDFGPSSFVPSWGATATGARKFLIAFNINLLGTKEQAHRIALNLREQGRGKDQPGRLKKVQGIGWYLDEKNLAQVSTNLLDFEVTALHTVYEETCREAQELSLPVVGSQLVGLVPLKALLDAAAFYCEKENLFILEEEQRIRLVVSRLGLDSLCPFSPKERIIEYLVPERGPERGLGSKSLRAFVGEVGARSAAPGGGSVAAAAAAMGAALGSMVGLMTYGRRQFQSLDTTMRRLIPPFREASAKLTTLVDADAEAFTAYLEAMRLPKNTPEEKDRRTAALQEGLRRAVSVPLTLAETVASLWPALQELARCGNLACRSDLQVAAKALEMGVFGAYFNVLINLRDITDEAFKDQPPAGSQDPGCTGAGLLGDPAGVTVREASPGSVAPPSPIPRGQSCDLETPGTAGPSTLEG

SEQ ID NO: 12078 - protein, 1390 aa, Homo sapiens
MKAPAVLAPGILVLLFTLVQRSNGECKEALAKSEMNVNMKYQLPNFTAETPIQNVILHEHHIFLGATNYIYVLNEEDLQKVAEYKTGPVLEHPDCFPCQDCSSKANLSGGVWKDNINMALVVDTYYDDQLISCGSVNRGTCQRHVFPHNHTADIQSEVHCIFSPQIEEPSQCPDCVVSALGAKVLSSVKDRFINFFVGNTINSSYFPDHPLHSISVRRLKETKDGFMFLTDQSYIDVLPEFRDSYPIKYVHAFESNNFIYFLTVQRETLDAQTFHTRIIRFCSINSGLHSYMEMPLECILTEKRKKRSTKKEVFNILQAAYVSKPGAQLARQIGASLNDDILFGVFAQSKPDSAEPMDRSAMCAFPIKYVNDFFNKIVNKNNVRCLQHFYGPNHEHCFNRTLLRNSSGCEARRDEYRTEFTTALQRVDLFMGQFSEVLLTSISTFIKGDLTIANLGTSEGRFMQVVVSRSGPSTPHVNFLLDSHPVSPEVIVEHTLNQNGYTLVITGKKITKIPLNGLGCRHFQSCSQCLSAPPFVQCGWCHDKCVRSEECLSGTWTQQICLPAIYKVFPNSAPLEGGTRLTICGWDFGFRRNNKFDLKKTRVLLGNESCTLTLSESTMNTLKCTVGPAMNKHFNMSIIISNGHGTTQYSTFSYVDPVITSISPKYGPMAGGTLLTLTGNYLNSGNSRHISIGGKTCTLKSVSNSILECYTPAQTISTEFAVKLKIDLANRETSIFSYREDPIVYEIHPTKSFISGGSTITGVGKNLNSVSVPRMVINVHEAGRNFTVACQHRSNSEIICCTTPSLQQLNLQLPLKTKAFFMLDGILSKYFDLIYVHNPVFKPFEKPVMISMGNENVLEIKGNDIDPEAVKGEVLKVGNKSCENIHLHSEAVLCTVPNDLLKLNSELNIEWKQAISSTVLGKVIVQPDQNFTGLIAGVVSISTALLLLLGFFLWLKKRKQIKDLGSELVRYDARVHTPHLDRLVSARSVSPTTEMVSNESVDYRATFPEDQFPNSSQNGSCRQVQYPLTDMSPILTSGDSDISSPLLQNTVHIDLSALNPELVQAVQHVVIGPSSLIVHFNEVIGRGHFGCVYHGTLLDNDGKKIHCAVKSLNRITDIGEVSQFLTEGIIMKDFSHPNVLSLLGICLRSEGSPLVVLPYMKHGDLRNFIRNETHNPTVKDLIGFGLQVAKGMKYLASKKFVHRDLAARNCMLDEKFTVKVADFGLARDMYDKEYYSVHNKTGAKLPVKWMALESLQTQKFTTKSDVWSFGVLLWELMTRGAPPYPDVNTFDITVYLLQGRRLLQPEYCPDPLYEVMLKCWHPKAEMRPSFSELVSRISAIFSTFIGEHYVHVNATYVNVKCVAPYPSLLSSEDNADDEVDTRPASFWETS

SEQ ID NO: 12079 - protein, 918 aa, Homo sapiens
MLQGTCSVLLLWGILGAIQAQQQEVISPDTTERNNNCPEKTDCPIHVYFVLDTSESVTMQSPTDILLFHMKQFVPQFISQLQNEFYLDQVALSWRYGGLHFSDQVEVFSPPGSDRASFIKNLQGISSFRRGTFTDCALANMTEQIRQDRSKGTVHFAVVITDGHVTGSPCGGIKLQAERAREEGIRLFAVAPNQNLKEQGLRDIASTPHELYRNDYATMLPDSTEIDQDTINRIIKVMKHEAYGECYKVSCLEIPGPSGPKGYRGQKGAKGNMGEPGEPGQKGRQGDPGIEGPIGFPGPKGVPGFKGEKGEFGADGRKGAPGLAGKNGTDGQKGKLGRIGPPGCKGDPGNRGPDGYPGEAGSPGERGDQGGKGDPGRPGRRGPPGEIGAKGSKGYQGNSGAPGSPGVKGAKGGPGPRGPKGEPGRRGDPGTKGSPGSDGPKGEKGDPGPEGPRGLAGEVGNKGAKGDRGLPGPRGPQGALGEPGKQGSRGDPGDAGPRGDSGQPGPKGDPGRPGFSYPGPRGAPGEKGEPGPRGPEGGRGDFGLKGEPGRKGEKGEPADPGPPGEPGPRGPRGVPGPEGEPGPPGDPGLTECDVMTYVRETCGCCDCEKRCGALDVVFVIDSSESIGYTNFTLEKNFVINVVNRLGAIAKDPKSETGTRVGVVQYSHEGTFEAIQLDDERIDSLSSFKEAVKNLEWIAGGTWTPSALKFAYDRLIKESRRQKTRVFAVVITDGRHDPRDDDLNLRALCDRDVTVTAIGIGDMFHEKHESENLYSIACDKPQQVRNMTLFSDLVAEKFIDDMEDVLCPDPQIVCPDLPCQTDAPWPGGEPPVTFLRTEEGPDATFPRTIPLIQQLLNATELTQDPAAYSQLVAVLVYTAERAKFATGVERQDWMELFIDTFKLVHRDIVGDPETALALC

SEQ ID NO: 12080 - protein, 585 aa, Homo sapiens
MSNPRKRSIPMRDSNTGLEQLLAEDSFDESDFSEIDDSDNFSDSALEADKIRPLSHLESDGKSSTSSDSGRSMKWSARAMIPRQRYDFTGTPGRKVDVSDITDPLQYFELFFTEELVSKITRETNAQAALLASKPPGPKGFSRMDKWKDTDNDELKVFFAVMLLQGIVQKPELEMFWSTRPLLDTPYLRQIMTGERFLLLFRCLHFVNNSSISAGQSKAQISLQKIKPVFDFLVNKFSTVYTPNRNIAVDESLMLFKGPLAMKQYLPTKRVRFGLKLYVLCESQSGYVWNALVHTGPGMNLKDSADGLKSSRIVLTLVNDLLGQGYCVFLDNFNISPMLFRELHQNRTDAVGTARLNRKQIPNDLKKRIAKGTTVARFCGELMALKWCDGKEVTMLSTFHNDTVIEVNNRNGKKTKRPRVIVDYNENMGAVDSADQMLTSYPSERKRHKVWYKKFFHHLLHITVLNSYILFKKDNPEHTMSHINFRLALIERMLEKHHKPGQQHLRGRPCSDDVTPLRLSGRHFPKSIPATSGKQNPTGRCKICCSQYDKDGKKIRKETRYFCAECDVPLCVVPCFEIYHTKKNY

SEQ ID NO: 12081 - protein, 271 aa, Homo sapiens
MEAEGLDWLLVPLHQLVSWGAAAAMVFGGVVPYVPQYRDIRRTQNADGFSTYVCLVLLVANILRILFWFGRRFESPLLWQSAIMILTMLLMLKLCTEVRVANELNARRRSFTAADSKDEEVKVAPRRSFLDFDPHHFWQWSSFSDYVQCVLAFTGVAGYITYLSIDSALFVETLGFLAVLTEAMLGVPQLYRNHRHQSTEGMSIKMVLMWTSGDAFKTAYFLLKGAPLQFSVCGLLQVLVDLAILGQAYAFARHPQKPAPHAVHPTGTKAL

SEQ ID NO: 12082 - protein, 2174 aa, Homo sapiens
MSASFVPNGASLEDCHCNLFCLADLTGIKWKKYVWQGPTSAPILFPVTEEDPILSSFSRCLKADVLGVWRRDQRPGRRELWIFWWGEDPSFADLIHHDLSEEEDGVWENGLSYECRTLLFKAVHNLLERCLMNRNFVRIGKWFVKPYEKDEKPINKSEHLSCSFTFFLHGDSNVCTSVEINQHQPVYLLSEEHITLAQQSNSPFQVILCPFGLNGTLTGQAFKMSDSATKKLIGEWKQFYPISCCLKEMSEEKQEDMDWEDDSLAAVEVLVAGVRMIYPACFVLVPQSDIPTPSPVGSTHCSSSCLGVHQVPASTRDPAMSSVTLTPPTSPEEVQTVDPQSVQKWVKFSSVSDGFNSDSTSHHGGKIPRKLANHVVDRVWQECNMNRAQNKRKYSASSGGLCEEATAAKVASWDFVEATQRTNCSCLRHKNLKSRNAGQQGQAPSLGQQQQILPKHKTNEKQEKSEKPQKRPLTPFHHRVSVSDDVGMDADSASQRLVISAPDSQVRFSNIRTNDVAKTPQMHGTEMANSPQPPPLSPHPCDVVDEGVTKTPSTPQSQHFYQMPTPDPLVPSKPMEDRIDSLSQSFPPQYQEAVEPTVYVGTAVNLEEDEANIAWKYYKFPKKKDVEFLPPQLPSDKFKDDPVGPFGQESVTSVTELMVQCKKPLKVSDELVQQYQIKNQCLSAIASDAEQEPKIDPYAFVEGDEEFLFPDKKDRQNSEREAGKKHKVEDGTSSVTVLSHEEDAMSLFSPSIKQDAPRPTSHARPPSTSLIYDSDLAVSYTDLDNLFNSDEDELTPGSKKSANGSDDKASCKESKTGNLDPLSCISTADLHKMYPTPPSLEQHIMGFSPMNMNNKEYGSMDTTPGGTVLEGNSSSIGAQFKIEVDEGFCSPKPSEIKDFSYVYKPENCQILVGCSMFAPLKTLPSQYLPPIKLPEECIYRQSWTVGKLELLSSGPSMPFIKEGDGSNMDQEYGTAYTPQTHTSFGMPPSSAPPSNSGAGILPSPSTPRFPTPRTPRTPRTPRGAGGPASAQGSVKYENSDLYSPASTPSTCRPLNSVEPATVPSIPEAHSLYVNLILSESVMNLFKDCNFDSCCICVCNMNIKGADVGVYIPDPTQEAQYRCTCGFSAVMNRKFGNNSGLFLEDELDIIGRNTDCGKEAEKRFEALRATSAEHVNGGLKESEKLSDDLILLLQDQCTNLFSPFGAADQDPFPKSGVISNWVRVEERDCCNDCYLALEHGRQFMDNMSGGKVDEALVKSSCLHPWSKRNDVSMQCSQDILRMLLSLQPVLQDAIQKKRTVRPWGVQGPLTWQQFHKMAGRGSYGTDESPEPLPIPTFLLGYDYDYLVLSPFALPYWERLMLEPYGSQRDIAYVVLCPENEALLNGAKSFFRDLTAIYESCRLGQHRPVSRLLTDGIMRVGSTASKKLSEKLVAEWFSQAADGNNEAFSKLKLYAQVCRYDLGPYLASLPLDSSLLSQPNLVAPTSQSLITPPQMTNTGNANTPSATLASAASSTMTVTSGVAISTSVATANSTLTTASTSSSSSSNLNSGVSSNKLPSFPPFGSMNSNAAGSMSTQANTVQSGQLGGQQTSALQTAGISGESSSLPTQPHPDVSESTMDRDKVGIPTDGDSHAVTYPPAIVVYIIDPFTYENTDESTNSSSVWTLGLLRCFLEMVQTLPPHIKSTVSVQIIPCQYLLQPVKHEDREIYPQHLKSLAFSAFTQCRRPLPTSTNVKTLTGFGPGLAMETALRSPDRPECIRLYAPPFILAPVKDKQTELGETFGEAGQKYNVLFVGYCLSHDQRWILASCTDLYGELLETCIINIDVPNRARRKKSSARKFGLQKLWEWCLGLVQMSSLPWRVVIGRLGRIGHGELKDWSCLLSRRNLQSLSKRLKDMCRMCGISAADSPSILSACLVAMEPQGSFVIMPDSVSTGSVFGRSTTLNMQTSQLNTPQDTSCTHILVFPTSASVQVASATYTTENLDLAFNPNNDGADGMGIFDLLDTGDDLDPDIINILPASPTGSPVHSPGSHYPHGGDAGKGQSTDRLLSTEPHEEVPNILQQPLALGYFVSTAKAGPLPDWFWSACPQAQYQCPLFLKASLHLHVPSVQSDELLHSKHSHPLDSNQTSDVLRFVLEQYNALSWLTCDPATQDRRSCLPIHFVVLNQLYNFIMNML

SEQ ID NO: 12083 - protein, 590 aa, Homo sapiens
MAGAIASRMSFSSLKRKQPKTFTVRIVTMDAEMEFNCEMKWKGKDLFDLVCRTLGLRETWFFGLQYTIKDTVAWLKMDKKVLDHDVSKEEPVTFHFLAKFYPENAEEELVQEITQHLFFLQVKKQILDEKIYCPPEASVLLASYAVQAKYGDYDPSVHKRGFLAQEELLPKRVINLYQMTPEMWEERITAWYAEHRGRARDEAEMEYLKIAQDLEMYGVNYFAIRNKKGTELLLGVDALGLHIYDPENRLTPKISFPWNEIRNISYSDKEFTIKPLDKKIDVFKFNSSKLRVNKLILQLCIGNHDLFMRRRKADSLEVQQMKAQAREEKARKQMERQRLAREKQMREEAERTRDELERRLLQMKEEATMANEALMRSEETADLLAEKAQITEEEAKLLAQKAAEAEQEMQRIKATAIRTEEEKRLMEQKVLEAEVLALKMAEESERRAKEADQLKQDLQEAREAERRAKQKLLEIATKPTYPPMNPIPAPLPPDIPSFNLIGDSLSFDFKDTDMKRLSMEIEKEKVEYMEKSKHLQEQLNELKTEIEALKLKERETALDILHNENSDRGGSSKHNTIKKPQAQGRRPICI

SEQ ID NO: 12084 - protein, 723 aa, Homo sapiens
MLKEWAIKQGILLKVAETIKSWIFFSQCNKKDDLLHKLDIGFRLDSLHTILQQEVLLQEDVELIELLDPSILSAGQSQQQENGHLPTLCSLATPNIWDLSMLFAFISLLVMLPTWWIVSSWLVWGVILFVYLVIRALRLWRTAKLQVTLKKYSVHLEDMATNSRAFTNLVRKALRLIQETEVISRGFTLLLDRVSAACPFNKAGQHPSQHLIGLRKAVYRTLRANFQAARLATLYMLKNYPLNSESDNVTNYICVVPFKELGLGLSEEQISEEEAHNFTDGFSLPALKVLFQLWVAQSSEFFRRLALLLSTANSPPGPLLTPALLPHRILSDVTQGLPHAHSACLEELKRSYEFYRYFETQHQSVPQCLSKTQQKSRELNNVHTAVRSLQLHLKALLNEVIILEDELEKLVCTKETQELVSEAYPILEQKLKLIQPHVQASNNCWEEAISQVDKLLRRNTDKKGKPEIACENPHCTVVPLKQPTLHIADKDPIPEEQELEAYVDDIDIDSDFRKDDFYYLSQEDKERQKREHEESKRVLQELKSVLGFKASEAERQKWKQLLFSDHAVLKSLSPVDPVEPISNSEPSMNSDMGKVSKNDTEEESNKSATTDNEISRTEYLCENSLEGKNKDNSSNEVFPQGAEERMCYQCESEDEPQADGSGLTTAPPTPRDSLQPSIKQRLARLQLSPDFTFTAGLAAEVAARSLSFTTMQEQTFGGEEEEQ

SEQ ID NO: 12085 - protein, 1603 aa, Homo sapiens
MKDSNRCCCGQFTNQHIPPLPSATPSKNEEESKQVETQPEKWSVAKHTQSYPTDSYGVLEFQGGGYSNKAMYIRVSYDTKPDSLLHLMVKDWQLELPKLLISVHGGLQNFEMQPKLKQVFGKGLIKAAMTTGAWIFTGGVSTGVISHVGDALKDHSSKSRGRVCAIGIAPWGIVENKEDLVGKDVTRVYQTMSNPLSKLSVLNNSHTHFILADNGTLGKYGAEVKLRRLLEKHISLQKINTRLGQGVPLVGLVVEGGPNVVSIVLEYLQEEPPIPVVICDGSGRASDILSFAHKYCEEGGIINESLREQLLVTIQKTFNYNKAQSHQLFAIIMECMKKKELVTVFRMGSEGQQDIEMAILTALLKGTNVSAPDQLSLALAWNRVDIARSQIFVFGPHWPPLGSLAPPTDSKATEKEKKPPMATTKGGRGKGKGKKKGKVKEEVEEETDPRKIELLNWVNALEQAMLDALVLDRVDFVKLLIENGVNMQHFLTIPRLEELYNTRLGPPNTLHLLVRDVKKSNLPPDYHISLIDIGLVLEYLMGGAYRCNYTRKNFRTLYNNLFGPKRPKALKLLGMEDDEPPAKGKKKKKKKKEEEIDIDVDDPAVSRFQYPFHELMVWAVLMKRQKMAVFLWQRGEESMAKALVACKLYKAMAHESSESDLVDDISQDLDNNSKDFGQLALELLDQSYKHDEQIAMKLLTYELKNWSNSTCLKLAVAAKHRDFIAHTCSQMLLTDMWMGRLRMRKNPGLKVIMGILLPPTILFLEFRTYDDFSYQTSKENEDGKEKEEENTDANADAGSRKGDEENEHKKQRSIPIGTKICEFYNAPIVKFWFYTISYLGYLLLFNYVILVRMDGWPSLQEWIVISYIVSLALEKIREILMSEPGKLSQKIKVWLQEYWNITDLVAISTFMIGAILRLQNQPYMGYGRVIYCVDIIFWYIRVLDIFGVNKYLGPYVMMIGKMMIDMLYFVVIMLVVLMSFGVARQAILHPEEKPSWKLARNIFYMPYWMIYGEVFADQIDLYAMEINPPCGENLYDEEGKRLPPCIPGAWLTPALMACYLLVANILLVNLLIAVFNNTFFEVKSISNQVWKFQRYQLIMTFHDRPVLPPPMIILSHIYIIIMRLSGRCRKKREGDQEERDRGLKLFLSDEELKRLHEFEEQCVQEHFREKEDEQQSSSDERIRVTSERVENMSMRLEEINERETFMKTSLQTVDLRLAQLEELSNRMVNALENLAGIDRSDLIQARSRASSECEATYLLRQSSINSADGYSLYRYHFNGEELLFEDTSLSTSPGTGVRKKTCSFRIKEEKDVKTHLVPECQNSLHLSLGTSTSATPDGSHLAVDDLKNAEESKLGPDIGISKEDDERQTDSKKEETISPSLNKTDVIHGQDKSDVQNTQLTVETTNIEGTISYPLEETKITRYFPDETINACKTMKSRSFVYSRGRKLVGGVNQDVEYSSITDQQLTTEWQCQVQKITRSHSTDIPYIVSEAAVQAEHKEQFADMQDEHHVAEAIPRIPRLSLTITDRNGMENLLSVKPDQTLGFPSLRSKSLHGHPRNVKSIQGKLDRSGHASSVSSLVIVSGMTAEEKKVKKEKASTETEC

SEQ ID NO: 12086 - protein, 575 aa, Homo sapiens
MPGSPVEVKIQSRSSPPTMPPLPPINPGGPRPVSFTPTALSNGINHSPPTLNGAPSPPQRFSNGPASSTSSALTNQQLPATCGARQLSKLKRFLTTLQQFGNDISPEIGEKVRTLVLALVNSTVTIEEFHCKLQEATNFPLRPFVIPFLKANLPLLQRELLHCARAAKQTPSQYLAQHEHLLLNTSIASPADSSELLMEVHGNGKRPSPERREENSFDRDTIAPEPPAKRVCTISPAPRHSPALTVPLMNPGGQFHPTPPPLQHYTLEDIATSHLYREPNKMLEHREVRDRHHSLGLNGGYQDELVDHRLTEREWADEWKHLDHALNCIMEMVEKTRRSMAVLRRCQESDREELNYWKRRYNENTELRKTGTELVSRQHSPGSADSLSNDSQREFNSRPGTGYVPVEFWKKTEEAVNKVKIQAMSEVQKAVAEAEQKAFEVIATERARMEQTIADVKRQAAEDAFLVINEQEESTENCWNCGRKASETCSGCNIARYCGSFCQHKDWERHHRLCGQNLHGQSPHGQGRPLLPVGRGSSARSADCSVPSPALDKTSATTSRSSTPASVTAIDTNGL

SEQ ID NO: 12087 - protein, 1386 aa, Homo sapiens
MLRYLLKTLLQMNLFADSLAGDISNSSELLLGFNSSLAALNHTLLPPGDPSLNGSRVGPEDAMPRIVEQPPDLLVSRGEPATLPCRAEGRPRPNIEWYKNGARVATVREDPRAHRLLLPSGALFFPRIVHGRRARPDEGVYTCVARNYLGAAASRNASLEVAVLRDDFRQSPGNVVVAVGEPAVLECVPPRGHPEPSVSWRKDGARLKEEEGRITIRGGKLMMSHTLKSDAGMYVCVASNMAGERESAAAEVMVLERPSFLRRPVNQVVLADAPVTFLCEVKGDPPPRLRWRKEDGELPTGRYEIRSDHSLWIGHVSAEDEGTYTCVAENSVGRAEASGSLSVHVPPQLVTQPQDQMAAPGESVAFQCETKGNPPPAIFWQKEGSQVLLFPSQSLQPTGRFSVSPRGQLNITAVQRGDAGYYVCQAVSVAGSILAKALLEIKGASLDGLPPVILQGPANQTLVLGSSVWLPCRVTGNPQPSVRWKKDGQWLQGDDLQFKTMANGTLYIANVQEMDMGFYSCVAKSSTGEATWSGWLKMREDWGVSPDPPTEPSSPPGAPSQPVVTEITKNSITLTWKPNPQTGAAVTSYVIEAFSPAAGNTWRTVADGVQLETHTVSGLQPNTIYLFLVRAVGAWGLSEPSPVSEPVRTQDSSPSRPVEDPWRGQQGLAEVAVRLQEPIVLGPRTLQVSWTVDGPVQLVQGFRVSWRVAGPEGGSWTMLDLQSPSQQSTVLRGLPPGTQIQIKVQAQGQEGLGAESLSVTRSIPEEAPSGPPQGVAVALGGDGNSSITVSWEPPLPSQQNGVITEYQIWCLGNESRFHLNRSAAGWARSAMLRGLVPGLLYRTLVAAATSAGVGVPSAPVLVQLPSPPDLEPGLEVGAGLAVRLARVLREPAFLAGSGAACGALLLGLCAALYWRRKQRKELSHYTASFAYTPAVSFPHSEGLSGASSRPPMGLGPAPYSWLADSWPHPSRSPSAQEPRGSCCPSNPDPDDRYYNEAGISLYLAQTARGTAAPGEGPVYSTIDPAGEELQTFHGGFPQHPSGDLGPWSQYAPPEWSQGDSGAKGGKVKLLGKPVQMPSLNWPEALPPPPPSCELSCLEGPEEELEGSSEPEEWCPPMPERSHLTEPSSSGGCLVTPSRRETPSPTPSYGQQSTATLTPSPPDPPQPPTDMPHLHQMPRRVPLGPSSPLSVSQPMLGIREARPAGLGAGPAASPHLSPSPAPSTASSAPGRTWQGNGEMTPPLQGPRARFRKKPKALPYRRENSPGDLPPPPLPPPEEEASWALELRAAGSMSSLERERSGERKAVQAVPLAAQRVLHPDEEAWLPYSRPSFLSRGQGTSTCSTAGSNSSRGSSSSRGSRGPGRSRSRSQSRSQSQRPGQKRREEPR

SEQ ID NO: 12088 - protein, 230 aa, Homo sapiens
MPWTILLFAAGSLAIPAPSIRLVPPYPSSQEDPIHIACMAPGNFPGANFTLYRGGQVVQLLQAPTDQRGVTFNLSGGSSKAPGGPFHCQYGVLGELNQSQLSDLSEPVNVSFPVPTWILVLSLSLAGALFLLAGLVAVALVVRKVKLRNLQKKRDRESCWAQINFDSTDMSFDNSLFTVSAKTMPEEDPATLDDHSGTTATPSNSRTRKRPTSTSSSPETPEFSTFRACQ

SEQ ID NO: 12089 - protein, 806 aa, Homo sapiens
MPPNINWKEIMKVDPDDLPRQEELADNLLISLSKVEVNELKSEKQENVIHLFRITQSLMKMKAQEVELALEEVEKAGEEQAKFENQLKTKVMKLENELEMAQQSAGGRDTRFLRNEICQLEKQLEQKDRELEDMEKELEKEKKVNEQLALRNEEAENENSKLRRENKRLKKKNEQLCQDIIDYQKQIDSQKETLLSRRGEDSDYRSQLSKKNYELIQYLDEIQTLTEANEKIEVQNQEMRKNLEESVQEMEKMTDEYNRMKAIVHQTDNVIDQLKKENDHYQLQVQELTDLLKSKNEEDDPIMVAVNAKVEEWKLILSSKDDEIIEYQQMLHNLREKLKNAQLDADKSNVMALQQGIQERDSQIKMLTEQVEQYTKEMEKNTCIIEDLKNELQRNKGASTLSQQTHMKIQSTLDILKEKTKEAERTAELAEADAREKDKELVEALKRLKDYESGVYGLEDAVVEIKNCKNQIKIRDREIEILTKEINKLELKISDFLDENEALRERVGLEPKTMIDLTEFRNSKHLKQQQYRAENQILLKEASIESLEEERLDLKKKIRQMAQERGKRSATSGLTTEDLNLTENISQGDRISERKLDLLSLKNMSEAQSKNEFLSRELIEKERDLERSRTVIAKFQNKLKELVEENKQLEEGMKEILQAIKEMQKDPDVKGGETSLIIPSLERLVNAIESKNAEGIFDASLHLKAQVDQLTGRNEELRQELRESRKEAINYSQQLAKANLKIDHLEKETSLLRQSEGSNVVFKGIDLPDGIAPSSASIINSQNEYLIHLLQELENKEKVKEFRRFS

SEQ ID NO: 12090 - protein, 1544 aa, Homo sapiens
MSGTQSTITDRFPLKKPIRHGSILNRESPTDKKQKVERIASHDFDPTDSSSKKTKSSSEESRSEIYGLVQRCVIIQKDDNGFGLTVSGDNPVFVQSVKEDGAAMRAGVQTGDRIIKVNGTLVTHSNHLEVVKLIKSGSYVALTVQGRPPGSPQIPLADSEVEPSVIGHMSPIMTSPHSPGASGNMERITSPVLMGEENNVVHNQKVEILRKMLQKEQERLQLLQEDYNRTPAQRLLKEIQEAKKHIPQLQEQLSKATGSAQDGAVVTPSRPLGDTLTVSEAETDPGDVLGRTDCSSGDASRPSSDNADSPKSGPKERIYLEENPEKSETIQDTDTQSLVGSPSTRIAPHIIGAEDDDFGTEHEQINGQCSCFQSIELLKSRPAHLAVFLHHVVSQFDPATLLCYLYSDLYKHTNSKETRRIFLEFHQFFLDRSAHLKVSVPDEMSADLEKRRPELIPEDLHRHYIQTMQERVHPEVQRHLEDFRQKRSMGLTLAESELTKLDAERDKDRLTLEKERTCAEQIVAKIEEVLMTAQAVEEDKSSTMQYVILMYMKHLGVKVKEPRNLEHKRGRIGFLPKIKQSMKKDKEGEEKGKRRGFPSILGPPRRPSRHDNSAIGRAMELQKARHPKHLSTPSSVSPEPQDSAKLRQSGLANEGTDAGYLPANSMSSVASGASFSQEGGKENDTGSKQVGETSAPGDTLDGTPRTLNTVFDFPPPPLDQVQEEECEVERVTEHGTPKPFRKFDSVAFGESQSEDEQFENDLETDPPNWQQLVSREVLLGLKPCEIKRQEVINELFYTERAHVRTLKVLDQVFYQRVSREGILSPSELRKIFSNLEDILQLHIGLNEQMKAVRKRNETSVIDQIGEDLLTWFSGPGEEKLKHAAATFCSNQPFALEMIKSRQKKDSRFQTFVQDAESNPLCRRLQLKDIIPTQMQRLTKYPLLLDNIAKYTEWPTEREKVKKAADHCRQILNYVNQAVKEAENKQRLEDYQRRLDTSSLKLSEYPNVEELRNLDLTKRKMIHEGPLVWKVNRDKTIDLYTLLLEDILVLLQKQDDRLVLRCHSKILASTADSKHTFSPVIKLSTVLVRQVATDNKALFVISMSDNGAQIYELVAQTVSEKTVWQDLICRMAASVKEQSTKPIPLPQSTPGEGDNDEEDPSKLKEEQHGISVTGLQSPDRDLGLESTLISSKPQSHSLSTSGKSEVRDLFVAERQFAKEQHTDGTLKEVGEDYQIAIPDSHLPVSEERWALDALRNLGLLKQLLVQQLGLTEKSVQEDWQHFPRYRTASQGPQTDSVIQNSENIKAYHSGEGHMPFRTGTGDIATCYSPRTSTESFAPRDSVGLAPQDSQASNILVMDHMIMTPEMPTMEPEGGLDDSGEHFFDAREAHSDENPSEGDGAVNKEEKDVNLRISGNYLILDGYDPVQESSTDEEVASSLTLQPMTGIPAVESTHQQQHSPQNTHSDGAISPFTPEFLVQQRWGAMEYSCFEIQSPSSCADSQSQIMEYIHKIEADLEHLKKVEESYTILCQRLAGSALTDKHSDKS

SEQ ID NO: 12091 - protein, 360 aa, Homo sapiens
MAELQEVQITEEKPLLPGQTPEAAKEAELAARILLDQGQTHSVETPYGSVTFTVYGTPKPKRPAILTYHDVGLNYKSCFQPLFQFEDMQEIIQNFVRVHVDAPGMEEGAPVFPLGYQYPSLDQLADMIPCVLQYLNFSTIIGVGVGAGAYILARYALNHPDTVEGLVLINIDPNAKGWMDWAAHKLTGLTSSIPEMILGHLFSQEELSGNSELIQKYRNIITHAPNLDNIELYWNSYNNRRDLNFERGGDITLRCPVMLVVECNSKLDPTQTSFLKMADSGGQPQLTQPGKLTEAFKYFLQGMGYMASSCMTRLSRSRTASLTSAASVDGNRSRSRTLSQSSESGTLSSGPPGHTMEVSC

SEQ ID NO: 12092 - protein, 712 aa, Homo sapiens
MLGLRPPLLALVGLLSLGCVLSQECTKFKVSSCRECIESGPGCTWCQKLNFTGPGDPDSIRCDTRPQLLMRGCAADDIMDPTSLAETQEDHNGGQKQLSPQKVTLYLRPGFGSFVDKTVLPFVNTHPDKLRNPCPNKEKECQPPFAFRHVLKLTNNSNQFQTEVGKQLISGNLDAPEGGLDAMMQVAACPEEIGWRNVTRLLVFATDDGFHFAGDGKLGAILTPNDGRCHLEDNLYKRSNEFDYPSVGQLAHKLAENNIQPIFAVTSRMVKTYEKLTEIIPKSAVGELSEDSSNVVHLIKNAYNKLSSRVFLDHNALPDTLKVTYDSFCSNGVTHRNQPRGDCDGVQINVPITFQVKVTATECIQEQSFVIRALGFTDIVTVQVLPQCECRCRDQSRDRSLCHGKGFLECGICRCDTGYIGKNCECQTQGRSSQELEGSCRKDNNSIICSGLGDCVCGQCLCHTSDVPGKLIYGQYCECDTINCERYNGQVCGGPGRGLCFCGKCRCHPGFEGSACQCERTTEGCLNPRRVECSGRGRCRCNVCECHSGYQLPLCQECPGCPSPCGKYISCAECLKFEKGPFGKNCSAACPGLQLSNNPVKGRTCKERDSEGCWVAYTLEQQDGMDRYLIYVDESRECVAGPNIAAIVGGTVAGIVLIGILLLVIWKALIHLSDLREYRRFEKEKLKSQWNNDNPLFKSATTTVMNPKFAES

SEQ ID NO: 12093 - protein, 683 aa, Homo sapiens
MSSESSKKRKPKVIRSDGAPAEGKRNRSDTEQEGKYYSEEAEVDLRDPGRDYELYKYTCQELQRLMAEIQDLKSRGGKDVAIEIEERRIQSCVHFMTLKKLNRLAHIRLKKGRDQTHEAKQKVDAYHLQLQNLLYEVMHLQKEITKCLEFKSKHEEIDLVSLEEFYKEAPPDISKAEVTMGDPHQQTLARLDWELEQRKRLAEKYRECLSNKEKILKEIEVKKEYLSSLQPRLNSIMQASLPVQEYLFMPFDQAHKQYETARHLPPPLYVLFVQATAYGQACDKTLSVAIEGSVDEAKALFKPPEDSQDDESDSDAEEEQTTKRRRPTLGVQLDDKRKEMLKRHPLSVMLDLKCKDDSVLHLTFYYLMNLNIMTVKAKVTTAMELITPISAGDLLSPDSVLSCLYPGDHGKKTPNPANQYQFDKVGILTLSDYVLELGHPYLWVQKLGGLHFPKEQPQQTVIADHSLSASHMETTMKLLKTRVQSRLALHKQFASLEHGIVPVTSDCQYLFPAKVVSRLVKWVTVAHEDYMELHFTKDIVDAGLAGDTNLYYMALIERGTAKLQAAVVLNPGYSSIPPVFQLCLNWKGEKTNSNDDNIRAMEGEVNVCYKELCGPWPSHQLLTNQLQRLCVLLDVYLETESHDDSVEGPKEFPQEKMCLRLFRGPSRMKPFKYNHPQGFFSHR

SEQ ID NO: 12094 - protein, 648 aa, Homo sapiens
MEVKGKKQFTGKSTKTAQEKNRFHKNSDSGSSKTFPTRKVAKEGGPKVTSRNFEKSITKLGKKGVKQFKNKQQGDKSPKNKFQPANKFNKKRKFQPDGRSDESAAKKPKWDDFKKKKKELKQSRQLSDKTNYDIVVRAKQMWEILRRKDCDKEKRVKLMSDLQKLIQGKIKTIAFAHDSTRVIQCYIQYGNEEQRKQAFEELRDDLVELSKAKYSRNIVKKFLMYGSKPQIAEIIRSFKGHVRKMLRHAEASAIVEYAYNDKAILEQRNMLTEELYGNTFQLYKSADHRTLDKVLEVQPEKLELIMDEMKQILTPMAQKEAVIKHSLVHKVFLDFFTYAPPKLRSEMIEAIREAVVYLAHTHDGARVAMHCLWHGTPKDRKVIVKTMKTYVEKVANGQYSHLVLLAAFDCIDDTKLVKQIIISEIISSLPSIVNDKYGRKVLLYLLSPRDPAHTVREIIEVLQKGDGNAHSKKDTEVRRRELLESISPALLSYLQEHAQEVVLDKSACVLVSDILGSATGDVQPTMNAIASLAATGLHPGGKDGELHIAEHPAGHLVLKWLIEQDKKMKENGREGCFAKTLVEHVGMKNLKSWASVNRGAIILSSLLQSCDLEVANKVKAALKSLIPTLEKTKSTSKGIEILLEKLST

SEQ ID NO: 12095 - protein, 572 aa, Homo sapiens
MSYQGKKSIPHITSDRLLIKGGRIINDDQSLYADVYLEDGLIKQIGENLIVPGGVKTIEANGRMVIPGGIDVNTYLQKPSQGMTAADDFFQGTRAALVGGTTMIIDHVVPEPGSSLLTSFEKWHEAADTKSCCDYSLHVDITSWYDGVREELEVLVQDKGVNSFQVYMAYKDVYQMSDSQLYEAFTFLKGLGAVILVHAENGDLIAQEQKRILEMGITGPEGHALSRPEELEAEAVFRAITIAGRINCPVYITKVMSKSAADIIALARKKGPLVFGEPIAASLGTDGTHYWSKNWAKAAAFVTSPPLSPDPTTPDYLTSLLACGDLQVTGSGHCPYSTAQKAVGKDNFTLIPEGVNGIEERMTVVWDKAVATGKMDENQFVAVTSTNAAKIFNLYPRKGRIAVGSDADVVIWDPDKLKTITAKSHKSAVEYNIFEGMECHGSPLVVISQGKIVFEDGNINVNKGMGRFIPRKAFPEHLYQRVKIRNKVFGLQGVSRGMYDGPVYEVPATPKYATPAPSAKSSPSKHQPPPIRNLHQSNFSLSGAQIDDNNPRRTGHRIVAPPGGRSNITSLG

SEQ ID NO: 12096 - protein, 135 aa, Homo sapiens
MSEEKPKEGVKTENDHINLKVAGQDGSVVQFKIKRHTPLSKLMKAYCERQGLSMRQIRFRFDGQPINETDTPAQVRSWLRVVPGRLPICAGWRWRTRTPSTCSSSRREVCRRAAWQGTVSRGPVPSPGRPSSHCC

SEQ ID NO: 12097 - protein, 962 aa, Homo sapiens
MISTRVMDIKLREAAEGLGEDSTGKKKSKFKTFKKFFGKKKRKESPSSTGSSTWKQSQTRNEVIAIESGPVGYDSEDELEESRGTLGSRALSHDSIFIPESGQDATRPVRVFSQENVCDRIKALQLKIQCNVKMGPPPPPGGLPAKRGEDAGMSSEDDGLPRSPPEMSLLHDVGPGTTIKVSVVSPDHVSDSTVSARISDNSLAPVADFSYPAESSSCLDNSAAKHKLQVKPRNQRSSKMRRLSSRAQSESLSDLTCTPEEEENEEKPLLEVSPEERPSSGQQDVAPDRGPEPGPPAPLPPPGGARARRARLQHSSALTASVEEGGVPGEDPSSRPATPELAEPESAPTLRVEPPSPPEGPPNPGPDGGKQDGEAPPAGPCAPATDKAEEVVCAPEDVASPFPTAIPEGDTTPPETDPAATSEAPSARDGPERSVPKEAEPTPPVLPDEEKGPPGPAPEPEREAETEPERGAGTEPERIGTEPSTAPAPSPPAPKSCLKHRPAAASEGPAASPPLAAAESPPVEPGPGSLDAEAAAPERPKAERAEAPPAGAERAAPERKAERGGAELRGAKKFSVSSCRARPRPGVSRPLERASGRLPLARSGPVWRSEAALDDLQGLPEPQHAKPGPRKLAERGPQDSGDRAASPAGPRKSPQEAAAAPGTREPCPAAQEPAPSEDRNPFPVKLRSTSLSLKYRDGASQEVKGVKRYSAEVRLERSLTVLPKEEKCPLGTAPALRGTRAPSDQGKGKARPPEPLSSKPPLPRKPLLQSFTLPHQPAPPDAGPGEREPRKEPRTAEKRPLRRGAEKSLPPAATGPGADGQPAPPWITVTRQKRRGTLDQPPNQEDKPGARTLKSEPGKQAKVPERGQEPVKQADFVRSKSFLITPVKPAVDRKQGAKLNFKEGLQRGISLSHQNLAQSAVMMEKELHQLKRASYASTDQPSWMELARKKSQAWSDMPQIIK

SEQ ID NO: 12098 - protein, 533 aa, Homo sapiens
MDSSQHLVTFEDVAVDFTQEEWTLLDQAQRDLYRDVMLENYKNLIILAGSELFKRSLMSGLEQMEELRTGVTGVLQELDLQLKTKGSPLLQDISAERSPNGVQLERSNTAEKLYDSNHSGKVFNEHPFLMTHMITHIGEKTSEDNQSGKALRKNFPHSFYKKSHAEGKMPKCVKHEKAFNQFPNLTRQNKTHTQEKLCECKDCWRTFLNQSSLKLHIRSHNGDKHYVCKECGKAFSNSSHLIGHGRIHSGEKPYVCKECGKAFTQSTGLKLHIRTHSGEKPYKCKECGKAFTHSSYLTDHTRIHSGKKPYVCMECGKAFTRSTGLILHMRIHTGEKPYECKECGKAFIHSSYLTKHVRIHSGEKLYLCKACGKAFTRSSGLVLHMRTHTGEKPYECKECGKAFNNSSMLSQHVRIHTGEKPYECKECGKAFTQSSGLSTHLRTHTGEKACECKECGKAFARSTNLNMHMRTHTGEKPYACKECGKAFRYSTYLNVHTRTHTGAKPYECKKCGKNFTQSSALAKHLRTKACEKT

SEQ ID NO: 12099 - protein, 2481 aa, Homo sapiens
MEQSPPPAPEPTQGPTPARSRRRREPESPPASAPIPLFGADTIGQRSPDGPVLSKAEFVEKVRQSNQACHDGDFHTAIVLYNEALAVDPQNCILYSNRSAAYMKIQQYDKALDDAIKARLLNPKWPKAYFRQGVALQYLGRHADALAAFASGLAQDPKSLQLLVGMVEAAMKSPMRDSLEPTYQQLQKMKLDKSPFVVVSVVGQELLTAGHHGASVVVLEAALKIGTCSLKLRGSVFSALSSAYWSLGNTEKSTGYMQQDLDVAKTLGDQTGECRAHGNLGSAFFSKGNYREALTNHRHQLVLAMKLKDREAASSALSSLGHVYTAIGDYPNALASHKQCVLLAKQSKDELSEARELGNMGAVYIAMGDFENAVQCHEQHLKIAKDLGNKREEARAYSNLGSAYHYRRNFDKAMSYHNYVLELAQELMEKAIEMRAYAGLGHAARCMQDLERAKQYHEQQLGIAEDLKDRAAEGRASSNLGIIHQMKGDYDTALKLHKTHLCIAQELSDYAAQGRAYGNMGNAYNALGMYDQAVKYHRQELQISMEVNDRASQASTHGNLAVAYQALGAHDRALQHYQNHLNIARELRDIQSEARALSNLGNFHCSRGEYVQAAPYYEQYLRLAPDLQDMEGEGKVCHNLGYAHYCLGNYQEAVKYYEQDLALAKDLHDKLSQAKAYCNLGLAFKALLNFSKAEECQKYLLSLAQSLNNSQAKFRALGNLGDIFICKKDINGAIKFYEQQLGLAHQVKDRRLEASAYAALGTAYRMIQKYDKALGYHTQELEVYQELSDLPGECRAHGHLAAVYMALGKYTMAFKCYEEQLDLGQKLKDPSLEAQVYGNMGITKMNMNVMEEAIGYFEQQLAMLQQLSGNESVLDRGRAYGNLGDCYEALGDYEEAIKYYEQYLSVAQSLNRMQDQAKAYRGLGNGHRAMGSLQQALVCFEKRLVVAHELGEAFNKAQAYGELGSLHSQLGNYEQAISCLERQLNIARDMKDRALESDAACGLGGVYQQMGEYDTALQYHQLDLQIAEETNNPTCQGRAYGNLGLTYESLGTFERAVVYQEQHLSIAAQMNDLAAKTVSYSSLGRTHHALQNYSQAVMYLQEGLRLAEQLGRREDEAKIRHGLGLSLWASGNLEEAQHQLYRASALFETIRHEAQLSTDYKLSLFDLQTSSYQALQRVLVSLGHHDEALAVAERGRTRAFADLLVERQTGQQDSDPYSPVTIDQILEMVNGQRGLVLYYSLAAGYLYSWLLAPGAGIVKFHEHYLGENTVENSSDFQASSSVTLPTATGSALEQHIASVREALGVESHYSRACASSETESEAGDIMDQQFEEMNNKLNSVTDPTGFLRMVRRNNLFNRSCQSMTSLFSNTVSPTQDGTSSLPRRQSSFAKPPLRALYDLLIAPMEGGLMHSSGPVGRHRQLILVLEGELYLIPFALLKGSSSNEYLYERFGLLAVPSIRSLSVQSKSHLRKNPPTYSSSTSMAAVIGNPKLPSAVMDRWLWGPMPSAEEEAYMVSELLGCQPLVGSVATKERVMSALTQAECVHFATHISWKLSALVLTPSMDGNPASSKSSFGHPYTIPESLRVQDDASDGESISDCPPLQELLLTAADVLDLQLPVKLVVLGSSQESNSKVTADGVIALTRAFLAAGAQCVLVSLWPVPVAASKMFIHAFYSSLLNGLKASAALGEAMKVVQSSKAFSHPSNWAGFMLIGSDVKLNSPSSLIGQALTEILQHPERARDALRVLLHLVEKSLQRIQNGQRNAMYTSQQSVENKVGGIPGWQALLTAVGFRLDPPTSGLPAAVFFPTSDPGDRLQQCSSTLQSLLGLPNPALQALCKLITASETGEQLISRAVKNMVGMLHQVLVQLQAGEKEQDLASAPIQVSISVQLWRLPGCHEFLAALGFDLCEVGQEEVILKTGKQANRRTVHFALQSLLSLFDSTELPKRLSLDSSSSLESLASAQSVSNALPLGYQQPPFSPTGADSIASDAISVYSLSSIASSMSFVSKPEGGSEGGGPGGRQDHDRSKNAYLQRSTLPRSQLPPQTRPAGNKDEEEYEGFSIISNEPLATYQENRNTCFSPDHKQPQPGTAGGMRVSVSSKGSISTPNSPVKMTLIPSPNSPFQKVGKLASSDTGESDQSSTETDSTVKSQEESNPKLDPQELAQKILEETQSHLIAVERLQRSGGQVSKSNNPEDGVQAPSSTAVFRASETSAFSRPVLSHQKSQPSPVTVKPKPPARSSSLPKVSSGYSSPTTSEMSIKDSPSQHSGRPSPGCDSQTSQLDQPLFKLKYPSSPYSAHISKSPRNMSPSSGHQSPAGSAPSPALSYSSAGSARSSPADAPDIDKLKMAAIDEKVQAVHNLKMFWQSTPQHSTGPMKIFRGAPGTMTSKRDVLSLLNLSPRHNKKEEGVDKLELKELSLQQHDGAPPKAPPNGHWRTETTSLGSLPLPAGPPATAPARPLRLPSGNGYKFLSPGRFFPSSKC

SEQ ID NO: 12100 - protein, 2385 aa, Homo sapiens
MPVLGVASKLRQPAVGSKPVHTALPIPNLGTTGSQHCSSRPLELTETESSMLSCQLALKSTCEFGEKKPLQGKAKEKEDSKIYTDWANHYLAKSGHKRLIKDLQQDIADGVLLAEIIQIIANEKVEDINGCPRSQSQMIENVDVCLSFLAARGVNVQGLSAEEIRNGNLKAILGLFFSLSRYKQQQHHQQQYYQSLVELQQRVTHASPPSEASQAKTQQDMQSSLAARYATQSNHSGIATSQKKPTRLPGPSRVPAAGSSSKVQGASNLNRRSQSFNSIDKNKPPNYANGNEKDSSKGPQSSSGVNGNVQPPSTAGQPPASAIPSPSASKPWRSKSMNVKHSATSTMLTVKQSSTATSPTPSSDRLKPPVSEGVKTAPSGQKSMLEKFKLVNARTALRPPQPPSSGPSDGGKDDDAFSESGEMEGFNSGLNSGGSTNSSPKVSPKLAPPKAGSKNLSNKKSLLQPKEKEEKNRDKNKVCTEKPVKEEKDQVTEMAPKKTSKIASLIPKGSKTTAAKKESLIPSSSGIPKPGSKVPTVKQTISPGSTASKESEKFRTTKGSPSQSLSKPITMEKASASSCPAPLEGREAGQASPSGSCTMTVAQSSGQSTGNGAVQLPQQQQHSHPNTATVAPFIYRAHSENEGTALPSADSCTSPTKMDLSYSKTAKQCLEEISGEDPETRRMRTVKNIADLRQNLEETMSSLRGTQISHSTLETTFDSTVTTEVNGRTIPNLTSRPTPMTWRLGQACPRLQAGDAPSLGAGYPRSGTSRFIHTDPSRFMYTTPLRRAAVSRLGNMSQIDMSEKASSDLDMSSEVDVGGYMSDGDILGKSLRTDDINSGYMTDGGLNLYTRSLNRIPDTATSRDIIQRGVHDVTVDADSWDDSSSVSSGLSDTLDNISTDDLNTTSSVSSYSNITVPSRKNTQLRTDSEKRSTTDETWDSPEELKKPEEDFDSHGDAGGKWKTVSSGLPEDPEKAGQKASLSVSQTGSWRRGMSAQGGAPSRQKAGTSALKTPGKTDDAKASEKGKAPLKGSSLQRSPSDAGKSSGDEGKKPPSGIGRSTATSSFGFKKPSGVGSSAMITSSGATITSGSATLGKIPKSAAIGGKSNAGRKTSLDGSQNQDDVVLHVSSKTTLQYRSLPRPSKSSTSGIPGRGGHRSSTSSIDSNVSSKSAGATTSKLREPTKIGSGRSSPVTVNQTDKEKEKVAVSDSESVSLSGSPKSSPTSASACGAQGLRQPGSKYPDIASPTFRRLFGAKAGGKSASAPNTEGVKSSSVMPSPSTTLARQGSLESPSSGTGSMGSAGGLSGSSSPLFNKPSDLTTDVISLSHSLASSPASVHSFTSGGLVWAANMSSSSAGSKDTPSYQSMTSLHTSSESIDLPLSHHGSLSGLTTGTHEVQSLLMRTGSVRSTLSESMQLDRNTLPKKGLRYTPSSRQANQEEGKEWLRSHSTGGLQDTGNQSPLVSPSAMSSSAAGKYHFSNLVSPTNLSQFNLPGPSMMRSNSIPAQDSSFDLYDDSQLCGSATSLEERPRAISHSGSFRDSMEEVHGSSLSLVSSTSSLYSTAEEKAHSEQIHKLRRELVASQEKVATLTSQLSANAHLVAAFEKSLGNMTGRLQSLTMTAEQKESELIELRETIEMLKAQNSAAQAAIQGALNGPDHPPKDLRIRRQHSSESVSSINSATSHSSIGSGNDADSKKKKKKNWVNSRGSELRSSFKQAFGKKKSTKPPSSHSDIEELTDSSLPASPKLPHNAGDCGSASMKPSQSASASPLVWPPKKRQNGPVIYKHRSRICECTEAEAEIILQLKSELREKELKLTDIRLEALSSAHHLDQIREAMNRMQNEIEILKAENDRLKAETGNTAKPTRPPSESSSSTSSSSSRQSLGLSLNNLNITEAVSSDILLDDAGDATGHKDGRSVKIIVSISKGYGRAKDQKSQAYLIGSIGVSGKTKWDVLDGVIRRLFKEYVFRIDTSTSLGLSSDCIASYCIGDLIRSHNLEVPELLPCGYLVGDNNIITVNLKGVEENSLDSFVFDTLIPKPITQRYFNLLMEHHRIILSGPSGTGKTYLANKLAEYVITKSGRKKTEDAIATFNVDHKSSKELQQYLANLAEQCSADNNGVELPVVIILDNLHHVGSLSDIFNGFLNCKYNKCPYIIGTMNQGVSSSPNLELHHNFRWVLCANHTEPVKGFLGRYLRRKLIEIEIERNIRNNDLVKIIDWIPKTWHHLNSFLETHSSSDVTIGPRLFLPCPMDVEGSRVWFMDLWNYSLVPYILEAVREGLQMYGKRTPWEDPSKWVLDTYPWSSATLPQESPALLQLRPEDVGYESCTSTKEATTSKHIPQTDTEGDPLMNMLMKLQEAANYSSTQSCDSESTSHHEDILDSSLESTL

SEQ ID NO: 12101 - protein, 14507 aa, Homo sapiens
MLKPSGLPGSSSPTRSLMTGSRSTKATPEMDSGLTGATLSPKTSTGAIVVTEHTLPFTSPDKTLASPTSSVVGRTTQSLGVMSSALPESTSRGMTHSEQRTSPSLSPQVNGTPSRNYPATSMVSGLSSPRTRTSSTEGNFTKEASTYTLTVETTSGPVTEKYTVPTETSTTEGDSTETPWDTRYIPVKITSPMKTFADSTASKENAPVSMTPAETTVTDSHTPGRTNPSFGTLYSSFLDLSPKGTPNSRGETSLELILSTTGYPFSSPEPGSAGHSRISTSAPLSSSASVLDNKISETSIFSGQSLTSPLSPGVPEARASTMPNSAIPFSMTLSNAETSAERVRSTISSLGTPSISTKQTAETILTFHAFAETMDIPSTHIAKTLASEWLGSPGTLGGTSTSALTTTSPSTTLVSEETNTHHSTSGKETEGTLNTSMTPLETSAPGEESEMTATLVPTLGFTTLDSKIRSPSQVSSSHPTRELRTTGSTSGRQSSSTAAHGSSDILRATTSSTSKASSWTSESTAQQFSEPQHTQWVETSPSMKTERPPASTSVAAPITTSVPSVVSGFTTLKTSSTKGIWLEETSADTLIGESTAGPTTHQFAVPTGISMTGGSSTRGSQGTTHLLTRATASSETSADLTLATNGVPVSVSPAVSKTAAGSSPPGGTKPSYTMVSSVIPETSSLQSSAFREGTSLGLTPLNTRHPFSSPEPDSAGHTKISTSIPLLSSASVLEDKVSATSTFSHHKATSSITTGTPEISTKTKPSSAVLSSMTLSNAATSPERVRNATSPLTHPSPSGEETAGSVLTLSTSAETTDSPNIHPTGTLTSESSESPSTLSLPSVSGVKTTFSSSTPSTHLFTSGEETEETSNPSVSQPETSVSRVRTTLASTSVPTPVFPTMDTWPTRSAQFSSSHLVSELRATSSTSVTNSTGSALPKISHLTGTATMSQTNRDTFNDSAAPQSTTWPETSPRFKTGLPSATTTVSTSATSLSATVMVSKFTSPATSSMEATSIREPSTTILTTETTNGPGSMAVASTNIPIGKGYITEGRLDTSHLPIGTTASSETSMDFTMAKESVSMSVSPSQSMDAAGSSTPGRTSQFVDTFSDDVYHLTSREITIPRDGTSSALTPQMTATHPPSPDPGSARSTWLGILSSSPSSPTPKVTMSSTFSTQRVTTSMIMDTVETSRWNMPNLPSTTSLTPSNIPTSGAIGKSTLVPLDTPSPATSLEASEGGLPTLSTYPESTNTPSIHLGAHASSESPSTIKLTMASVVKPGSYTPLTFPSIETHIHVSTARMAYSSGSSPEMTAPGETNTGSTWDPTTYITTTDPKDTSSAQVSTPHSVRTLRTTENHPKTESATPAAYSGSPKISSSPNLTSPATKAWTITDTTEHSTQLHYTKLAEKSSGFETQSAPGPVSVVIPTSPTIGSSTLELTSDVPGEPLVLAPSEQTTITLPMATWLSTSLTEEMASTDLDISSPSSPMSTFAIFPPMSTPSHELSKSEADTSAIRNTDSTTLDQHLGIRSLGRTGDLTTVPITPLTTTWTSVIEHSTQAQDTLSATMSPTHVTQSLKDQTSIPASASPSHLTEVYPELGTQGRSSSEATTFWKPSTDTLSREIETGPTNIQSTPPMDNTTTGSSSSGVTLGIAHLPIGTSSPAETSTNMALERRSSTATVSMAGTMGLLVTSAPGRSISQSLGRVSSVLSESTTEGVTDSSKGSSPRLNTQGNTALSSSLEPSYAEGSQMSTSIPLTSSPTTPDVEFIGGSTFWTKEVTTVMTSDISKSSARTESSSATLMSTALGSTENTGKEKLRTASMDLPSPTPSMEVTPWISLTLSNAPNTTDSLDLSHGVHTSSAGTLATDRSLNTGVTRASRLENGSDTSSKSLSMGNSTHTSMTYTEKSEVSSSIHPRPETSAPGAETTLTSTPGNRAISLTLPFSSIPVEEVISTGITSGPDINSAPMTHSPITPPTIVWTSTGTIEQSTQPLHAVSSEKVSVQTQSTPYVNSVAVSASPTHENSVSSGSSTSSPYSSASLESLDSTISRRNAITSWLWDLTTSLPTTTWPSTSLSEALSSGHSGVSNPSSTTTEFPLFSAASTSAAKQRNPETETHGPQNTAASTLNTDASSVTGLSETPVGASISSEVPLPMAITSRSDVSGLTSESTANPSLGTASSAGTKLTRTISLPTSESLVSFRMNKDPWTVSIPLGSHPTTNTETSIPVNSAGPPGLSTVASDVIDTPSDGAESIPTVSFSPSPDTEVTTISHFPEKTTHSFRTISSLTHELTSRVTPIPGDWMSSAMSTKPTGASPSITLGERRTITSAAPTTSPIVLTASFTETSTVSLDNETTVKTSDILDARKTNELPSDSSSSSDLINTSIASSTMDVTKTASISPTSISGMTASSSPSLFSSDRPQVPTSTTETNTATSPSVSSNTYSLDGGSNVGGTPSTLPPFTITHPVETSSALLAWSRPVRTFSTMVSTDTASGENPTSSNSVVTSVPAPGTWTSVGSTTDLPAMGFLKTSPAGEAHSLLASTIEPATAFTPHLSAAVVTGSSATSEASLLTTSESKAIHSSPQTPTTPTSGANWETSATPESLLVVTETSDTTLTSKILVTDTILFSTVSTPPSKFPSTGTLSGASFPTLLPDTPAIPLTATEPTSSLATSFDSTPLVTIASDSLGTVPETTLTMSETSNGDALVLKTVSNPDRSIPGITIQGVTESPLHPSSTSPSKIVAPRNTTYEGSITVALSTLPAGTTGSLVFSQSSENSETTALVDSSAGLERASVMPLTTGSQGMASSGGIRSGSTHSTGTKTFSSLPLTMNPGEVTAMSEITTNRLTATQSTAPKGIPVKPTSAESGLLTPVSASSSPSKAFASLTTAPPTWGIPQSTLTFEFSEVPSLDTKSASLPTPGQSLNTIPDSDASTASSSLSKSPEKNPRARMMTSTKAISASSFQSTGFTETPEGSASPSMAGHEPRVPTSGTGDPRYASESMSYPDPSKASSAMTSTSLASKLTTLFSTGQAARSGSSSSPISLSTEKETSFLSPTASTSRKTSLFLGPSMARQPNILVHLQTSALTLSPTSTLNMSQEEPPELTSSQTIAEEEGTTAETQTLTFTPSETPTSLLPVSSPTEPTARRKSSPETWASSISVPAKTSLVETTDGTLVTTIKMSSQAAQGNSTWPAPAEETGSSPAGTSPGSPEMSTTLKIMSSKEPSISPEIRSTVRNSPWKTPETTVPMETTVEPVTLQSTALGSGSTSISHLPTGTTSPTKSPTENMLATERVSLSPSPPEAWTNLYSGTPGGTRQSLATMSSVSLESPTARSITGTGQQSSPELVSKTTGMEFSMWHGSTGGTTGDTHVSLSTSSNILEDPVTSPNSVSSLTDKSKHKTETWVSTTAIPSTVLNNKIMAAEQQTSRSVDEAYSSTSSWSDQTSGSDITLGASPDVTNTLYITSTAQTTSLVSLPSGDQGITSLTNPSGGKTSSASSVTSPSIGLETLRANVSAVKSDIAPTAGHLSQTSSPAEVSILDVTTAPTPGISTTITTMGTNSISTTTPNPEVGMSTMDSTPATERRTTSTEHPSTWSSTAASDSWTVTDMTSNLKVARSPGTISTMHTTSFLASSTELDSMSTPHGRITVIGTSLVTPSSDASAVKTETSTSERTLSPSDTTASTPISTFSRVQRMSISVPDILSTSWTPSSTEAEDVPVSMVSTDHASTKTDPNTPLSTFLFDSLSTLDWDTGRSLSSATATTSAPQGATTPQELTLETMISPATSQLPFSIGHITSAVTPAAMARSSGVTFSRPDPTSKKAEQTSTQLPTTTSAHPGQVPRSAATTLDVIPHTAKTPDATFQRQGQTALTTEARATSDSWNEKEKSTPSAPWITEMMNSVSEDTIKEVTSSSSVLRTLNTLDINLESGTTSSPSWKSSPYERIAPSESTTDKEAIHPSTNTVETTGWVTSSEHASHSTIPAHSASSKLTSPVVTTSTREQAIVSMSTTTWPESTRARTEPNSFLTIELRDVSPYMDTSSTTQTSIISSPGSTAITKGPRTEITSSKRISSSFLAQSMRSSDSPSEAITRLSNFPAMTESGGMILAMQTSPPGATSLSAPTLDTSATASWTGTPLATTQRFTYSEKTTLFSKGPEDTSQPSPPSVEETSSSSSLVPIHATTSPSNILLTSQGHSPSSTPPVTSVFLSETSGLGKTTDMSRISLEPGTSLPPNLSSTAGEALSTYEASRDTKAIHHSADTAVTNMEATSSEYSPIPGHTKPSKATSPLVTSHIMGDITSSTSVFGSSETTEIETVSSVNQGLQERSTSQVASSATETSTVITHVSSGDATTHVTKTQATFSSGTSISSPHQFITSTNTFTDVSTNPSTSLIMTESSGVTITTQTGPTGAATQGPYLLDTSTMPYLTETPLAVTPDFMQSEKTTLISKGPKDVSWTSPPSVAETSYPSSLTPFLVTTIPPATSTLQGQHTSSPVSATSVLTSGLVKTTDMLNTSMEPVTNSPQNLNNPSNEILATLAATTDIETIHPSINKAVTNMGTASSAHVLHSTLPVSSEPSTATSPMVPASSMGDALASISIPGSETTDIEGEPTSSLTAGRKENSTLQEMNSTTESNIILSNVSVGAITEATKMEVPSFDATFIPTPAQSTKFPDIFSVASSRLSNSPPMTISTHMTTTQTGSSGATSKIPLALDTSTLETSAGTPSVVTEGFAHSKITTAMNNDVKDVSQTNPPFQDEASSPSSQAPVLVTTLPSSVAFTPQWHSTSSPVSMSSVLTSSLVKTAGKVDTSLETVTSSPQSMSNTLDDISVTSAATTDIETTHPSINTVVTNVGTTGSAFESHSTVSAYPEPSKVTSPNVTTSTMEDTTISRSIPKSSKTTRTETETTSSLTPKLRETSISQEITSSTETSTVPYKELTGATTEVSRTDVTSSSSTSFPGPDQSTVSLDISTETNTRLSTSPIMTESAEITITTQTGPHGATSQDTFTMDPSNTTPQAGIHSAMTHGFSQLDVTTLMSRIPQDVSWTSPPSVDKTSSPSSFLSSPAMTTPSLISSTLPEDKLSSPMTSLLTSGLVKITDILRTRLEPVTSSLPNFSSTSDKILATSKDSKDTKEIFPSINTEETNVKANNSGHESHSPALADSETPKATTQMVITTTVGDPAPSTSMPVHGSSETTNIKREPTYFLTPRLRETSTSQESSFPTDTSFLLSKVPTGTITEVSSTGVNSSSKISTPDHDKSTVPPDTFTGEIPRVFTSSIKTKSAEMTITTQASPPESASHSTLPLDTSTTLSQGGTHSTVTQGFPYSEVTTLMGMGPGNVSWMTTPPVEETSSVSSLMSSPAMTSPSPVSSTSPQSIPSSPLPVTALPTSVLVTTTDVLGTTSPESVTSSPPNLSSITHERPATYKDTAHTEAAMHHSTNTAVTNVGTSGSGHKSQSSVLADSETSKATPLMSTTSTLGDTSVSTSTPNISQTNQIQTEPTASLSPRLRESSTSEKTSSTTETNTAFSYVPTGAITQASRTEISSSRTSISDLDRPTIAPDISTGMITRLFTSPIMTKSAEMTVTTQTTTPGATSQGILPWDTSTTLFQGGTHSTVSQGFPHSEITTLRSRTPGDVSWMTTPPVEETSSGFSLMSPSMTSPSPVSSTSPESIPSSPLPVTALLTSVLVTTTNVLGTTSPEPVTSSPPNLSSPTQERLTTYKDTAHTEAMHASMHTNTAVANVGTSISGHESQSSVPADSHTSKATSPMGITFAMGDTSVSTSTPAFFETRIQTESTSSLIPGLRDTRTSEEINTVTETSTVLSEVPTTTTTEVSRTEVITSSRTTISGPDHSKMSPYISTETITRLSTFPFVTGSTEMAITNQTGPIGTISQATLTLDTSSTASWEGTHSPVTQRFPHSEETTTMSRSTKGVSWQSPPSVEETSSPSSPVPLPAITSHSSLYSAVSGSSPTSALPVTSLLTSGRRKTIDMLDTHSELVTSSLPSASSFSGEILTSEASTNTETIHFSENTAETNMGTTNSMHKLHSSVSIHSQPSGHTPPKVTGSMMEDAIVSTSTPGSPETKNVDRDSTSPLTPELKEDSTALVMNSTTESNTVFSSVSLDAATEVSRAEVTYYDPTFMPASAQSTKSPDISPEASSSHSNSPPLTISTHKTIATQTGPSGVTSLGQLTLDTSTIATSAGTPSARTQDFVDSETTSVMNNDLNDVLKTSPFSAEEANSLSSQAPLLVTTSPSPVTSTLQEHSTSSLVSVTSVPTPTLAKITDMDTNLEPVTRSPQNLRNTLATSEATTDTHTMHPSINTAVANVGTTSSPNEFYFTVSPDSDPYKATSAVVITSTSGDSIVSTSMPRSSAMKKIESETTFSLIFRLRETSTSQKIGSSSDTSTVFDKAFTAATTEVSRTELTSSSRTSIQGTEKPTMSPDTSTRSVTMLSTFAGLTKSEERTIATQTGPHRATSQGTLTWDTSITTSQAGTHSAMTHGFSQLDLSTLTSRVPEYISGTSPPSVEKTSSSSSLLSLPAITSPSPVPTTLPESRPSSPVHLTSLPTSGLVKTTDMLASVASLPPNLGSTSHKIPTTSEDIKDTEKMYPSTNIAVTNVGTTTSEKESYSSVPAYSEPPKVTSPMVTSFNIRDTIVSTSMPGSSEITRIEMESTFSLAHGLKGTSTSQDPIVSTEKSAVLHKLTTGATETSRTEVASSRRTSIPGPDHSTESPDISTEVIPSLPISLGITESSNMTIITRTGPPLGSTSQGTFTLDTPTTSSRAGTHSMATQEFPHSEMTTVMNKDPEILSWTIPPSIEKTSFSSSLMPSPAMTSPPVSSTLPKTIHTTPSPMTSLLTPSLVMTTDTLGTSPEPTTSSPPNLSSTSHEILTTDEDTTAIEAMHPSTSTAATNVETTSSGHGSQSSVLADSEKTKATAPMDTTSTMGHTTVSTSMSVSSETTKIKRESTYSLTPGLRETSISQNASFSTDTSIVLSEVPTGTTAEVSRTEVTSSGRTSIPGPSQSTVLPEISTRTMTRLFASPTMTESAEMTIPTQTGPSGSTSQDTLTLDTSTTKSQAKTHSTLTQRFPHSEMTTLMSRGPGDMSWQSSPSLENPSSLPSLLSLPATTSPPPISSTLPVTISSSPLPVTSLLTSSPVTTTDMLHTSPELVTSSPPKLSHTSDERLTTGKDTTNTEAVHPSTNTAASNVEIPSSGHESPSSALADSETSKATSPMFITSTQEDTTVAISTPHFLETSRIQKESISSLSPKLRETGSSVETSSAIETSAVLSEVSIGATTEISRTEVTSSSRTSISGSAESTMLPEISTTRKIIKFPTSPILAESSEMTIKTQTSPPGSTSESTFTLDTSTTPSLVITHSTMTQRLPHSEITTLVSRGAGDVPRPSSLPVEETSPPSSQLSLSAMISPSPVSSTLPASSHSSSASVTSLLTPGQVKTTEVLDASAEPETSSPPSLSSTSVEILATSEVTTDTEKIHPFSNTAVTKVGTSSSGHESPSSVLPDSETTKATSAMGTISIMGDTSVSTLTPALSNTRKIQSEPASSLTTRLRETSTSEETSLATEANTVLSKVSTGATTEVSRTEAISFSRTSMSGPEQSTMSQDISIGTIPRISASSVLTESAKMTITTQTGPSESTLESTLNLNTATTPSWVETHSIVIQGFPHPEMTTSMGRGPGGVSWPSPPFVKETSPPSSPLSLPAVTSPHPVSTTFLAHIPPSPLPVTSLLTSGPATTTDILGTSTEPGTSSSSSLSTTSHERLTTYKDTAHTEAVHPSTNTGGTNVATTSSGYKSQSSVLADSSPMCTTSTMGDTSVLTSTPAFLETRRIQTELASSLTPGLRESSGSEGTSSGTKMSTVLSKVPTGATTEISKEDVTSIPGPAQSTISPDISTRTVSWFSTSPVMTESAEITMNTHTSPLGATTQGTSTLDTSSTTSLTMTHSTISQGFSHSQMSTLMRRGPEDVSWMSPPLLEKTRPSFSLMSSPATTSPSPVSSTLPESISSSPLPVTSLLTSGLAKTTDMLHKSSEPVTNSPANLSSTSVEILATSEVTTDTEKTHPSSNRTVTDVGTSSSGHESTSFVLADSQTSKVTSPMVITSTMEDTSVSTSTPGFFETSRIQTEPTSSLTLGLRKTSSSEGTSLATEMSTVLSGVPTGATAEVSRTEVTSSSRTSISGFAQLTVSPETSTETITRLPTSSIMTESAEMMIKTQTDPPGSTPESTHTVDISTTPNWVETHSTVTQRFSHSEMTTLVSRSPGDMLWPSQSSVEETSSASSLLSLPATTSPSPVSSTLVEDFPSASLPVTSLLNPGLVITTDRMGISREPGTSSTSNLSSTSHERLTTLEDTVDTEDMQPSTHTAVTNVRTSISGHESQSSVLSDSETPKATSPMGTTYTMGETSVSISTSDFFETSRIQIEPTSSLTSGLRETSSSERISSATEGSTVLSEVPSGATTEVSRTEVISSRGTSMSGPDQFTISPDISTEAITRLSTSPIMTESAESAITIETGSPGATSEGTLTLDTSTTTFWSGTHSTASPGFSHSEMTTLMSRTPGDVPWPSLPSVEEASSVSSSLSSPAMTSTSFFSTLPESISSSPHPVTALLTLGPVKTTDMLRTSSEPETSSPPNLSSTSAEILATSEVTKDREKIHPSSNTPVVNVGTVIYKHLSPSSVLADLVTTKPTSPMATTSTLGNTSVSTSTPAFPETMMTQPTSSLTSGLREISTSQETSSATERSASLSGMPTGATTKVSRTEALSLGRTSTPGPAQSTISPEISTETITRISTPLTTTGSAEMTITPKTGHSGASSQGTFTLDTSSRASWPGTHSAATHRSPHSGMTTPMSRGPEDVSWPSRPSVEKTSPPSSLVSLSAVTSPSPLYSTPSESSHSSPLRVTSLFTPVMMKTTDMLDTSLEPVTTSPPSMNITSDESLATSKATMETEAIQLSENTAVTQMGTISARQEFYSSYPGLPEPSKVTSPVVTSSTIKDIVSTTIPASSEITRIEMESTSTLTPTPRETSTSQEIHSATKPSTVPYKALTSATIEDSMTQVMSSSRGPSPDQSTMSQDISTEVITRLSTSPIKTESTEMTITTQTGSPGATSRGTLTLDTSTTFMSGTHSTASQGFSHSQMTALMSRTPGDVPWLSHPSVEEASSASFSLSSPVMTSSSPVSSTLPDSIHSSSLPVTSLLTSGLVKTTELLGTSSEPETSSPPNLSSTSAEILAITEVTTDTEKLEMTNVVTSGYTHESPSSVLADSVTTKATSSMGITYPTGDTNVLTSTPAFSDTSRIQTKSKLSLTPGLMETSISEETSSATEKSTVLSSVPTGATTEVSRTEAISSSRTSIPGPAQSTMSSDTSMETITRISTPLTRKESTDMAITPKTGPSGATSQGTFTLDSSSTASWPGTHSATTQRFPQSVVTTPMSRGPEDVSWPSPLSVEKNSPPSSLVSSSSVTSPSPLYSTPSGSSHSSPVPVTSLFTSIMMKATDMLDASLEPETTSAPNMNITSDESLAASKATTETEAIHVFENTAASHVETTSATEELYSSSPGFSEPTKVISPVVTSSSIRDNMVSTTMPGSSGITRIEIESMSSLTPGLRETRTSQDITSSTETSTVLYKMPSGATPEVSRTEVMPSSRTSIPGPAQSTMSLDISDEVVTRLSTSPIMTESAEITITTQTGYSLATSQVTLPLGTSMTFLSGTHSTMSQGLSHSEMTNLMSRGPESLSWTSPRFVETTRSSSSLTSLPLTTSLSPVSSTLLDSSPSSPLPVTSLILPGLVKTTEVLDTSSEPKTSSSPNLSSTSVEIPATSEIMTDTEKIHPSSNTAVAKVRTSSSVHESHSSVLADSETTITIPSMGITSAVDDTTVFTSNPAFSETRRIPTEPTFSLTPGFRETSTSEETTSITETSAVLYGVPTSATTEVSMTEIMSSNRIHIPDSDQSTMSPDIITEVITRLSSSSMMSESTQMTITTQKSSPGATAQSTLTLATTTAPLARTHSTVPPRFLHSEMTTLMSRSPENPSWKSSLFVEKTSSSSSLLSLPVTTSPSVSSTLPQSIPSSSFSVTSLLTPGMVKTTDTSTEPGTSLSPNLSGTSVEILAASEVTTDTEKIHPSSSMAVTNVGTTSSGHELYSSVSIHSEPSKATYPVGTPSSMAETSISTSMPANFETTGFEAEPFSHLTSGFRKTNMSLDTSSVTPTNTPSSPGSTHLLQSSKTDFTSSAKTSSPDWPPASQYTEIPVDIITPFNASPSITESTGITSFPESRFTMSVTESTHHLSTDLLPSAETISTGTVMPSLSEAMTSFATTGVPRAISGSGSPFSRTESGPGDATLSTIAESLPSSTPVPFSSSTFTTTDSSTIPALHEITSSSATPYRVDTSLGTESSTTEGRLVMVSTLDTSSQPGRTSSSPILDTRMTESVELGTVTSAYQVPSLSTRLTRTDGIMEHITKIPNEAAHRGTIRPVKGPQTSTSPASPKGLHTGGTKRMETTTTALKTTTTALKTTSRATLTTSVYTPTLGTLTPLNASMQMASTIPTEMMITTPYVFPDVPETTSSLATSLGAETSTALPRTTPSVFNRESETTASLVSRSGAERSPVIQTLDVSSSEPDTTASWVIHPAETIPTVSKTTPNFFHSELDTVSSTATSHGADVSSAIPTNISPSELDALTPLVTISGTDTSTTFPTLTKSPHETETRTTWLTHPAETSSTIPRTIPNFSHHESDATPSIATSPGAETSSAIPIMTVSPGAEDLVTSQVTSSGTDRNMTIPTLTLSPGEPKTIASLVTHPEAQTSSAIPTSTISPAVSRLVTSMVTSLAAKTSTTNRALTNSPGEPATTVSLVTHPAQTSPTVPWTTSIFFHSKSDTTPSMTTSHGAESSSAVPTPTVSTEVPGVVTPLVTSSRAVISTTIPILTLSPGEPETTPSMATSHGEEASSAIPTPTVSPGVPGVVTSLVTSSRAVTSTTIPILTFSLGEPETTPSMATSHGTEAGSAVPTVLPEVPGMVTSLVASSRAVTSTTLPTLTLSPGEPETTPSMATSHGAEASSTVPTVSPEVPGVVTSLVTSSSGVNSTSIPTLILSPGELETTPSMATSHGAEASSAVPTPTVSPGVSGVVTPLVTSSRAVTSTTIPILTLSSSEPETTPSMATSHGVEASSAVLTVSPEVPGMVTSLVTSSRAVTSTTIPTLTISSDEPETTTSLVTHSEAKMISAIPTLAVSPTVQGLVTSLVTSSGSETSAFSNLTVASSQPETIDSWVAHPGTEASSVVPTLTVSTGEPFTNISLVTHPAESSSTLPRTTSRFSHSELDTMPSTVTSPEAESSSAISTTISPGIPGVLTSLVTSSGRDISATFPTVPESPHESEATASWVTHPAVTSTTVPRTTPNYSHSEPDTTPSIATSPGAEATSDFPTITVSPDVPDMVTSQVTSSGTDTSITIPTLTLSSGEPETTTSFITYSETHTSSAIPTLPVSPGASKMLTSLVISSGTDSTTTFPTLTETPYEPETTAIQLIHPAETNTMVPRTTPKFSHSKSDTTLPVAITSPGPEASSAVSTTTISPDMSDLVTSLVPSSGTDTSTTFPTLSETPYEPETTATWLTHPAETSTTVSGTIPNFSHRGSDTAPSMVTSPGVDTRSGVPTTTIPPSIPGVVTSQVTSSATDTSTAIPTLTPSPGEPETTASSATHPGTQTGFTVPIRTVPSSEPDTMASWVTHPPQTSTPVSRTTSSFSHSSPDATPVMATSPRTEASSAVLTTISPGAPEMVTSQITSSGAATSTTVPTLTHSPGMPETTALLSTHPRTETSKTFPASTVFPQVSETTASLTIRPGAETSTALPTQTTSSLFTLLVTGTSRVDLSPTASPGVSAKTAPLSTHPGTETSTMIPTSTLSLGLLETTGLLATSSSAETSTSTLTLTVSPAVSGLSSASITTDKPQTVTSWNTETSPSVTSVGPPEFSRTVTGTTMTLIPSEMPTPPKTSHGEGVSPTTILRTTMVEATNLATTGSSPTVAKTTTTFNTLAGSLFTPLTTPGMSTLASESVTSRTSYNHRSWISTTSSYNRRYWTPATSTPVTSTFSPGISTSSIPSSTAATVPFMVPFTLNFTITNLQYEEDMRHPGSRKFNATERELQGLLKPLFRNSSLEYLYSGCRLASLRPEKDSSATAVDAICTHRPDPEDLGLDRERLYWELSNLTNGIQELGPYTLDRNSLYVNGFTHRSSMPTTSTPGTSTVDVGTSGTPSSSPSPTTAGPLLMPFTLNFTITNLQYEEDMRRTGSRKFNTMESVLQGLLKPLFKNTSVGPLYSGCRLTLLRPEKDGAATGVDAICTHRLDPKSPGLNREQLYWELSKLTNDIEELGPYTLDRNSLYVNGFTHQSSVSTTSTPGTSTVDLRTSGTPSSLSSPTIMAAGPLLVPFTLNFTITNLQYGEDMGHPGSRKFNTTERVLQGLLGPIFKNTSVGPLYSGCRLTSLRSEKDGAATGVDAICIHHLDPKSPGLNRERLYWELSQLTNGIKELGPYTLDRNSLYVNGFTHRTSVPTSSTPGTSTVDLGTSGTPFSLPSPATAGPLLVLFTLNFTITNLKYEEDMHRPGSRKFNTTERVLQTLLGPMFKNTSVGLLYSGCRLTLLRSEKDGAATGVDAICTHRLDPKSPGVDREQLYWELSQLTNGIKELGPYTLDRNSLYVNGFTHWIPVPTSSTPGTSTVDLGSGTPSSLPSPTTAGPLLVPFTLNFTITNLKYEEDMHCPGSRKFNTTERVLQSLLGPMFKNTSVGPLYSGCRLTLLRSEKDGAATGVDAICTHRLDPKSPGVDREQLYWELSQLTNGIKELGPYTLDRNSLYVNGFTHQTSAPNTSTPGTSTVDLGTSGTPSSLPSPTSAGPLLVPFTLNFTITNLQYEEDMHHPGSRKFNTTERVLQGLLGPMFKNTSVGLLYSGCRLTLLRPEKNGAATGMDAICSHRLDPKSPGLNREQLYWELSQLTHGIKELGPYTLDRNSLYVNGFTHRSSVAPTSTPGTSTVDLGTSGTPSSLPSPTTAVPLLVPFTLNFTITNLQYGEDMRHPGSRKFNTTERVLQGLLGPLFKNSSVGPLYSGCRLISLRSEKDGAATGVDAICTHHLNPQSPGLDREQLYWQLSQMTNGIKELGPYTLDRNSLYVNGFTHRSSGLTTSTPWTSTVDLGTSGTPSPVPSPTTTGPLLVPFTLNFTITNLQYEENMGHPGSRKFNITESVLQGLLKPLFKSTSVGPLYSGCRLTLLRPEKDGVATRVDAICTHRPDPKIPGLDRQQLYWELSQLTHSITELGPYTLDRDSLYVNGFTQRSSVPTTSTPGTFTVQPETSETPSSLPGPTATGPVLLPFTLNFTITNLQYEEDMRRPGSRKFNTTERVLQGLLMPLFKNTSVSSLYSGCRLTLLRPEKDGAATRVDAVCTHRPDPKSPGLDRERLYWKLSQLTHGITELGPYTLDRHSLYVNGFTHQSSMTTTRTPDTSTMHLATSRTPASLSGPMTASPLLVLFTINFTITNLRYEENMHHPGSRKFNTTERVLQGLLRPVFKNTSVGPLYSGCRLTLLRPKKDGAATKVDAICTYRPDPKSPGLDREQLYWELSQLTHSITELGPYTLDRDSLYVNGFTQRSSVPTTSIPGTPTVDLGTSGTPVSKPGPSAASPLLVLFTLNFTITNLRYEENMQHPGSRKFNTTERVLQGLLRSLFKSTSVGPLYSGCRLTLLRPEKDGTATGVDAICTHHPDPKSPRLDREQLYWELSQLTHNITELGPYALDNDSLFVNGFTHRSSVSTTSTPGTPTVYLGASKTPASIFGPSAASHLLILFTLNFTITNLRYEENMWPGSRKFNTTERVLQGLLRPLFKNTSVGPLYSGCRLTLLRPEKDGEATGVDAICTHRPDPTGPGLDREQLYLELSQLTHSITELGPYTLDRDSLYVNGFTHRSSVPTTSTGVVSEEPFTLNFTINNLRYMADMGQPGSLKFNITDNVMQHLLSPLFQRSSLGARYTGCRVIALRSVKNGAETRVDLLCTYLQPLSGPGLPIKQVFHELSQQTHGITRLGPYSLDKDSLYLNGYNEPGPDEPPTTPKPATTFLPPLSEATTAMGYHLKTLTLNFTISNLQYSPDMGKGSATFNSTEGVLQHLLRPLFQKSSMGPFYLGCQLISLRPEKDGAATGVDTTCTYHPDPVGPGLDIQQLYWELSQLTHGVTQLGFYVLDRDSLFINGYAPQNLSIRGEYQINFHIVNWNLSNPDPTSSEYITLLRDIQDKVTTLYKGSQLHDTFRFCLVTNLTMDSVLVTVKALFSSNLDPSLVEQVFLDKTLNASFHWLGSTYQLVDIHVTEMESSVYQPTSSSSTQHFYLNFTITNLPYSQDKAQPGTTNYQRNKRNIEDALNQLFRNSSIKSYFSDCQVSTFRSVPNRHHTGVDSLCNFSPLARRVDRVAIYEEFLRMTRNGTQLQNFTLDRSSVLVDGYSPNRNEPLTGNSDLPFWAVILIGLAGLLGVITCLICGVLVTTRRRKKEGEYNVQQQCPGYYQSHLDLEDLQ

SEQ ID NO: 12102 - protein, 292 aa, Homo sapiens
MAASTMSIRSSAYSDSWQVDDCPESCCEPPCCATSCCAPAPCLTLVCTPVSRVSSPCCQVTCEPSPCQSGCTSSCTPSCCQQSSCQPAYCTSSPCQQACCVPVCCKPVCCVPVCCGASSCCQQSSYQPACCASSSCQPACCVPVCCKPVCCAPTCSEDSYSCCQQSSCQPACCTSSPCQQSYCVPVCCKPVCCKPICCVPVCSGASSLCCQQSGCQPACCTTSCCRPSSSVSLLCRPVCRPACCVPVSSCCAPTSSRQPSYCRQASCVSLLCRPVCSRPACYSFSSGQKSSC

SEQ ID NO: 12103 - protein, 156 aa, Homo sapiens
MLAEPFPKVVASLIILHLSGATKKGTEKQTTSETQKSVQCGTWTKHAEGGIFTSPNYPSKYPPDRECIYIIEAAPRQCIELYFDEKYSIEPSWECKFDHIEVRDGPFGFSPIIGRFCGQQNPPVIKSSGRFLWIKFFADGELESMGFSARYNFTPE

SEQ ID NO: 12104 - protein, 1553 aa, Homo sapiens
MEPSALRKAGSEQEEGFEGLPRRVTDLGMVSNLRRSNSSLFKSWRLQCPFGNNDKQESLSSWIPENIKKKECVYFVESSKLSDAGKVVCQCGYTHEQHLEEATKPHTFQGTQWDPKKHVQEMPTDAFGDIVFTGLSQKVKKYVRVSQDTPSSVIYHLMTQHWGLDVPNLLISVTGGAKNFNMKPRLKSIFRRGLVKVAQTTGAWIITGGSHTGVMKQVGEAVRDFSLSSSYKEGELITIGVATWGTVHRREGLIHPTGSFPAEYILDEDGQGNLTCLDSNHSHFILVDDGTHGQYGVEIPLRTRLEKFISEQTKERGGVAIKIPIVCVVLEGGPGTLHTIDNATTNGTPCVVVEGSGRVADVIAQVANLPVSDITISLIQQKLSVFFQEMFETFTESRIVEWTKKIQDIVRRRQLLTVFREGKDGQQDVDVAILQALLKASRSQDHFGHENWDHQLKLAVAWNRVDIARSEIFMDEWQWKPSDLHPTMTAALISNKPEFVKLFLENGVQLKEFVTWDTLLYLYENLDPSCLFHSKLQKVLVEDPERPACAPAAPRLQMHHVAQVLRELLGDFTQPLYPRPRHNDRLRLLLPVPHVKLNVQGVSLRSLYKRSSGHVTFTMDPIRDLLIWAIVQNRRELAGIIWAQSQDCIAAALACSKILKELSKEEEDTDSSEEMLALAEEYEHRAIGVFTECYRKDEERAQKLLTRVSEAWGKTTCLQLALEAKDMKFVSHGGIQAFLTKVWWGQLSVDNGLWRVTLCMLAFPLLLTGLISFREKRLQDVGTPAARARAFFTAPVVVFHLNILSYFAFLCLFAYVLMVDFQPVPSWCECAIYLWLFSLVCEEMRQLFYDPDECGLMKKAALYFSDFWNKLDVGAILLFVAGLTCRLIPATLYPGRVILSLDFILFCLRLMHIFTISKTLGPKIIIVKRMMKDVFFFLFLLAVWVVSFGVAKQAILIHNERRVDWLFRGAVYHSYLTIFGQIPGYIDGVNFNPEHCSPNGTDPYKPKCPESDATQQRPAFPEWLTVLLLCLYLLFTNILLLNLLIAMFNYTFQQVQEHTDQIWKFQRHDLIEEYHGRPAAPPPFILLSHLQLFIKRVVLKTPAKRHKQLKNKLEKNEEAALLSWEIYLKENYLQNRQFQQKQRPEQKIEDISNKAGLELWGSRTSSVCKSRQFLHLTVVESRGSEKAPVTTLACLQGCLGKHGRVDAMVDLLDLDPLKRSGSMEQRLASLEEQVAQTAQALHWIVRTLRASGFSSEADVPTLASQKAAEEPDAEPGGRKKTEEPGDSYHVNARHLLYPNCPVTRFPVPNEKVPWETEFLIYDPPFYTAERKDAAAMDPMGDTLEPLSTIQYNVVDGLRDRRSFHGPYTVQAGLPLNPMGRTGLRGRGSLSCFGPNHTLYPMVTRWRRNEDGAICRKSIKKMLEVLVVKLPLSEHWALPGGSREPGEMLPRKLKRILRQEHWPSFENLLKCGMEVYKGYMDDPRNTDNAWIETVAVSVHFQDQNDVELNRLNSNLHACDSGASIRWQVVDRRIPLYANHKTLLQKAAAEFGAHY

SEQ ID NO: 12105 - protein, 396 aa, Homo sapiens
MGANTSRKPPVFDENEDVNFDHFEILRAIGKGSFGKVCIVQKNDTKKMYAMKYMNKQKCVERNEVRNVFKELQIMQGLEHPFLVNLWYSFQDEEDMFMVVDLLLGGDLRYHLQQNVHFKEETVKLFICELVMALDYLQNQRIIHRDMKPDNILLDEHGHVHITDFNIAAMLPRETQITTMAGTKPYMAPEMFSSRKGAGYSFAVDWWSLGVTAYELLRGRRPYHIRSSTSSKEIVHTFETTVVTYPSAWSQEMVSLLKKLLEPNPDQRFSQLSDVQNFPYMNDINWDAVFQKRLIPGFIPNKGRLNCDPTFELEEMILESKPLHKKKKRLAKKEKDMRKCDSSQTCLLQEHLDSVQKEFIIFNREKVNRDFNKRQPNLALEQTKDPQGEDGQNNNL

SEQ ID NO: 12106 - protein, 656 aa, Homo sapiens
MASTDYSTYSQAAAQQGYSAYTAQPTQGYAQTTQAYGQQSYGTYGQPTDVSYTQAQTTATYGQTAYATSYGQPPTGYTTPTAPQAYSQPVQGYGTGAYDTTTATVTTTQASYAAQSAYGTQPAYPAYGQQPAATAPTRPQDGNKPTETSQPQSSTGGYNQPSLGYGQSNYSYPQVPGSYPMQPVTAPPSYPPTSYSSTQPTSYDQSSYSQQNTYGQPSSYGQQSSYGQQSSYGQQPPTSYPPQTGSYSQAPSQYSQQSSSYGQQSSFRQDHPSSMGVYGQESGGFSGPGENRSMSGPDNRGRGRGGFDRGGMSRGGRGGGRGGMGSAGERGGFNKPGGPMDEGPDLDLGPPVDPDEDSDNSAIYVQGLNDSVTLDDLADFFKQCGVVKMNKRTGQPMIHIYLDKETGKPKGDATVSYEDPPTAKAAVEWFDGKDFQGSKLKVSLARKKPPMNSMRGGLPPREGRGMPPPLRGGPGGPGGPGGPMGRMGGRGGDRGGFPPRGPRGSRGNPSGGGNVQHRAGDWQCPNPGCGNQNFAWRTECNQCKAPKPEGFLPPPFPPPGGDRGRGGPGGMRGGRGGLMDRGGPGGMFRGGRGGDRGGFRGGRGMDRGGFGGGRRGGPGGPPGPLMEQMGGRRGGRGGPGKMDKGEHRQERRDRPY

SEQ ID NO: 12107 - protein, 1667 aa, Homo sapiens
MASKQTKKKEVHRINSAHGSDKSKDFYPFGSNVQSGSTEQKKGKFPLWPEWSEADINSEKWDAGKGAKEKDKTGKSPVFHFFEDPEGKIELPPSLKIYSWKRPQDILFSQTPVVVKNEITFDLFSANEHLLCSELMRWIISEIYAVWKIFNGGILSNYFKGTSGEPPLLPWKPWEHIYSLCKAVKGHMPLFNSYGKYVVKLYWMGCWRKITIDDFLPFDEDNNLLLPATTYEFELWPMLLSKAIIKLANIDIHVADRRELGEFTVIHALTGWLPEVISLHPGYMDKVWELLKEILPEFKLSDEASSESKIAVLDSKLKEPGKEGKEGKEIKDGKEVKDVKEFKPESSLTTLKAPEKSDKVPKEKADARDIGKKRSKDGEKEKFKFSLHGSRPSSEVQYSVQSLSDCSSAIQTSHMVVYATFTPLYLFENKIFSLEKMADSAEKLREYGLSHICSHPVLVTRSRSCPLVAPPKPPPLPPWKLIRQKKETVITDEAQELIVKKPERFLEISSPFLNYRMTPFTIPTEMHFVRSLIKKGIPPGSDLPSVSETDETATHSQTDLSQITKATSQGNTASQVILGKGTDEQTDFGLGDAHQSDGLNLEREIVSQTTATQEKSQEELPTTNNSVSKEIWLDFEDFCVCFQNIYIFHKPSSYCLNFQKSEFKFSEERVSYYLFVDSLKPIELLVCFSALVRWGEYGALTKDSPPIEPGLLTAETFSWKSLKPGSLVLKIHTYATKATVVRLPVGRHMLLFNAYSPVGHSIHICSMVSFVIGDEHVVLPNFEPESCRFTEQSLLIMKAIGNVIANFKDKGKLSAALKDLQTAHYPVPFHDKELTAQHFRVFHLSLWRLMKKVQITKPPPNFKFAFRAMVLDLELLNSSLEEVSLVEWLDVKYCMPTSDKEYSAEEVAAAIKIQAMWRGTYVRLLMKARIPDTKENISVADTLQKVWAVLEMNLEQYAVSLLRLMFKSKCKSLESYPCYQDEETKIAFADYTVTYQEQPPNSWFIVFRETFLVHQDMILVPKVYTTLPICILHIVNNDTMEQVPKVFQKVVPYLYTKNKKGYTFVAEAFTGDTYVAASRWKLRLIGSSAPLPCLSRDSPCNSFAIKEIRDYYIPNDKKILFRYSVKVLTPQPATIQVRTSKPDAFIKLQVLENEETMVSSTGKGQAIIPAFHFLKSEKGLSSQSSKHILSFHSASKKEQEVYVKKKAAQGIQKSPKGRAVSAIQDIGLPLVEEETTSTPTREDSSSTPLQNYKYIIQCSVLYNSWPLTESQLTFVQALKDLKKSNTKAYGERHEELINLGSPDSHTISEGQKSSVTSKTTRKGKEKSSEKEKTAKEKQAPRFEPQISTVHPQQEDPNKPYWILRLVTEHNESELFEVKKDTERADEIRAMKQAWETTEPGRAIKASQARLHYLSGFIKKTSDAESPPISESQTKPKEEVETAARGVKEPNSKNSAGSESKEMTQTGSGSAVWKKWQLTKGLRDVAKSTSSESGGVSSPGKEEREQSTRKENIQTGPRTRSPTILETSPRLIRKALEFMDLSQYVRKTDTDPLLQTDELNQQQAMQKAEEIHQFRQHRTRVLSIRNIDQEERLKLKDEVLDMYKEMQDSLDEARQKIFDIREEYRNKLLEAEHLKLETLAAQEAAMKLETEKMTPAPDTQKKKKGKKK

SEQ ID NO: 12108 - protein, 375 aa, Homo sapiens
MKLTRKMVLTRAKASELHSVRKLNCWGSRLTDISICQEMPSLEVITLSVNSISTLEPVSRCQRLSELYLRRNRIPSLAELFYLKGLPRLRVLWLAENPCCGTSPHRYRMTVLRTLPRLQKLDNQAVTEEELSRALSEGEEITAAPEREGTGHGGPKLCCTLSSLSSAAETGRDPLDSEEEATGAQDERGLKPPSRGQFPSLSARDASSSHRGRVSGGPLGAAAASAHCTHCTETVGREHGASQGPVGREHGASQGLEELCPRGSCVCGSVNAHTRVTRAPHGAVLAPQPLLLSWSVECGPGPCWAEGNRSHVEEVPHTRPQAGLLCSDSPSVPNVLTAILLLLRELDAEGLEAVQQTVGSRLQALRGEEVQEHAE

SEQ ID NO: 12109 - protein, 710 aa, Homo sapiens
MSAQGDCEFLVQRARELVPQDLWAAKAWLITARSLYPADFNIQYEMYTIERNAERTATAGRLLYDMFVNFPDQPVVWREISIITSALRNDSQDKQTQFLRSLFETLPGRVQCEMLLKVTEQCFNTLERSEMLLLLLRRFPETVVQHGVGLGEALLEAETIEEQESPVNCFRKLFVCDVLPLIINNHDVRLPANLLYKYLNKAAEFYINYVTRSTQIENQHQGAQDTSDLMSPSKRSSQKYIIEGLTEKSSQIVDPWERLFKILNVVGMRCEWQMDKGRRSYGDILHRMKDLCRYMNNFDSEAHAKYKNQVVYSTMLVFFKNAFQYVNSIQPSLFQGPNAPSQVPLVLLEDVSNVYGDVEIDRNKHIHKKRKLAEGREKTMSSDDEDCSAKGRNRHIVVNKAELANSTEVLESFKLARESWELLYSLEFLDKEFTRICLAWKTDTWLWLRIFLTDMIIYQGQYKKAIASLHHLAALQGSISQPQITGQGTLEHQRALIQLATCHFALGEYRMTCEKVLDLMCYMVLPIQDGGKSQEEPSKVKPKFRKGSDLKLLPCTSKAIMPYCLHLMLACFKLRAFTDNRDDMALGHVIVLLQQEWPRGENLFLKAVNKICQQGNFQYENFFNYVTNIDMLEEFAYLRTQEGGKIHLELLPNQGMLIKHHTVTRGITKGVKEDFRLAMERQVSRCGENLMVVLHRFCINEKILLLQTLT

SEQ ID NO: 12110 - protein, 419 aa, Homo sapiens
MAASSLEQKLSRLEAKLKQENREARRRIDLNLDISPQRPRPTLQLPLANDGGSRSPSSESSPQHPTPPARPRHMLGLPSTLFTPRSMESIEIDQKLQEIMKQTGYLTIGGQRYQAEINDLENLGEMGSGTCGQVWKMRFRKTGHVIAVKQMRRSGNKEENKRILMDLDVVLKSHDCPYIVQCFGTFITNTDVFIAMELMGTCAEKLKKRMQGPIPERILGKMTVAIVKALYYLKEKHGVIHRDVKPSNILLDERGQIKLCDFGISGRLVDSKAKTRSAGCAAYMAPERIDPPDPTKPDYDIRADVWSLGISLVELATGQFPYKNCKTDFEVLTKVLQEEPPLLPGHMGFSGDFQSFVKDCLTKDHRKRPKYNKLLEHSFIKRYETLEVDVASWFKDVMAKTESPRTSGVLSQPHLPFFR

SEQ ID NO: 12111 - protein, 426 aa, Homo sapiens
MAASSLEQKLSRLEAKLKQENREARRRIDLNLDISPQRPRPTLQLPLANDGGSRSPSSESSPQHPTPPARPRHMLGLPSTLFTPRSMESIEIDQKLQEIMKQTGYLTIGGQRYQAEINDLENLGEMGSGTCGQVWKMRFRKTGHVIAVKQMRRSGNKEENKRILMDLDVVLKSHDCPYIVQCFGTFITNTDVFIAMELMGTCAEKLKKRMQGPIPERILGKMTVAIVKALYYLKEKHGVIHRDVKPSNILLDERGQIKLCDFGISGRLVDSKAKTRSAGCAAYMAPERIDPPDPTKPDYDIRADVWSLGISLPCPSPSQVELATGQFPYKNCKTDFEVLTKVLQEEPPLLPGHMGFSGDFQSFVKDCLTKDHRKRPKYNKLLEHSFIKRYETLEVDVASWFKDVMAKTESPRTSGVLSQPHLPFFR

SEQ ID NO: 12112 - protein, 435 aa, Homo sapiens
MAASSLEQKLSRLEAKLKQENREARRRIDLNLDISPQRPRPIIVITLSPAPAPSQRAALQLPLANDGGSRSPSSESSPQHPTPPARPRHMLGLPSTLFTPRSMESIEIDQKLQEIMKQTGYLTIGGQRYQAEINDLENLGEMGSGTCGQVWKMRFRKTGHVIAVKQMRRSGNKEENKRILMDLDVVLKSHDCPYIVQCFGTFITNTDVFIAMELMGTCAEKLKKRMQGPIPERILGKMTVAIVKALYYLKEKHGVIHRDVKPSNILLDERGQIKLCDFGISGRLVDSKAKTRSAGCAAYMAPERIDPPDPTKPDYDIRADVWSLGISLVELATGQFPYKNCKTDFEVLTKVLQEEPPLLPGHMGFSGDFQSFVKDCLTKDHRKRPKYNKLLEHSFIKRYETLEVDVASWFKDVMAKTESPRTSGVLSQPHLPFFR

SEQ ID NO: 12113 - protein, 242 aa, Homo sapiens
MDDLCEANGTFAISLFKILGEEDNSRNVFFSPMSISSALAMVFMGAKGSTAAQMSQALCLYKDGDIHRGFQSLLSEVNRTGTQYLLRTANRLFGEKTCDFLPDFKEYCQKFYQAELEELSFAEDTEECRKHINDWVAEKTEGKISEVLDAGTVDPLTKLVLVNAIYFKGKWNEQFDRKYTRGMLFKTNEEKKTVQMMFKEAKFKMGYADEVHTQVLELPYVEEELSMVILLPDDNTDLAVKE

SEQ ID NO: 12114 - protein, 279 aa, Homo sapiens
SVNKLFGEKSASFREEYIRLCQKYYSSEPQAVDFLECAEEARKKINSWVKTQTKGKIPNLLPEGSVDGDTRMVLVNAVYFKGKWKTPFEKKLNGLYPFRVNSAQRTPVQMMYLREKLNIGYIEDLKAQILELPYAGDVSMFLLLPDEIADVSTGLELLESEITYDKLNKWTSKDKMAEDEVELKVSQLFSHNLLLQEQIANSAPVGENKVSSMDSLATSINQFALELSKKLAESAQGKNIFFSSWSISTSLTIVYLGAKGTTAAQMAQVLQFNRDQGVK

SEQ ID NO: 12115 - protein, 984 aa, Homo sapiens
MALDYLLLLLLASAVAAMEETLMDTRTATAELGWTANPASGWEEVSGYDENLNTIRTYQVCNVFEPNQNNWLLTTFINRRGAHRIYTEMRFTVRDCSSLPNVPGSCKETFNLYYYETDSVIATKKSAFWSEAPYLKVDTIAADESFSQVDFGGRLMKVNTEVRSFGPLTRNGFYLAFQDYGACMSLLSVRVFFKKCPSIVQNFAVFPETMTGAESTSLVIARGTCIPNAEEVDVPIKLYCNGDGEWMVPIGRCTCKPGYEPENSVACKACPAGTFKASQEAEGCSHCPSNSRSPAEASPICTCRTGYYRADFDPPEVACTSVPSGPRNVISIVNETSIILEWHPPRETGGRDDVTYNIICKKCRADRRSCSRCDDNVEFVPRQLGLTECRVSISSLWAHTPYTFDIQAINGVSSKSPFPPQHVSVNITTNQAAPSTVPIMHQVSATMRSITLSWPQPEQPNGIILDYEIRYYEKEHNEFNSSMARSQTNTARIDGLRPGMVYVVQVRARTVAGYGKFSGKMCFQTLTDDDYKSELREQLPLIAGSAAAGVVFVVSLVAISIVCSRKRAYSKEAVYSDKLQHYSTGRGSPGMKIYIDPFTYEDPNEAVREFAKEIDVSFVKIEEVIGAGEFGEVYKGRLKLPGKREIYVAIKTLKAGYSEKQRRDFLSEASIMGQFDHPNIIRLEGVVTKSRPVMIITEFMENGALDSFLRQNDGQFTVIQLVGMLRGIAAGMKYLAEMNYVHRDLAARNILVNSNLVCKVSDFGLSRYLQDDTSDPTYTSSLGGKIPVRWTAPEAIAYRKFTSASDVWSYGIVMWEVMSFGERPYWDMSNQDVINAIEQDYRLPPPMDCPAALHQLMLDCWQKDRNSRPRFAEIVNTLDKMIRNPASLKTVATITAVPSQPLLDRSIPDFTAFTTVDDWLSAIKMVQYRDSFLTAGFTSLQLVTQMTSEDLLRIGITLAGHQKKILNSIHSMRVQISQSPTAMA

SEQ ID NO: 12116 - protein, 1076 aa, Homo sapiens
MIAVSFKCRCQILRRLTKDESPYTKSASQTKPPDGALAVRRQSIPEEFKGSTVVELMKKEGTTLGLTVSGGIDKDGKPRVSNLRQGGIAARSDQLDVGDYIKAVNGINLAKFRHDEIISLLKNVGERVVLEVEYELPPVSVQGSSVIFRTVEVTLHKEGNTFGFVIRGGAHDDRNKSRPVVITCVRPGGPADREGTIKPGDRLLSVDGIRLLGTTHAEAMSILKQCGQEAALLIEYDVSVMDSVATASGPLLVEVAKTPGASLGVALTTSMCCNKQVIVIDKIKSASIADRCGALHVGDHILSIDGTSMEYCTLAEATQFLANTTDQVKLEILPHHQTRLALKGPDHAALVSSSFSPTSMSAYSLSSLNMGTLPRSLYSTSPRGTMMRRRLKKKDFKSSLSLASSTVGLAGQVVHTETTEVVLTADPVTGFGIQLQGSVFATETLSSPPLISYIEADSPAERCGVLQIGDRVMAINGIPTEDSTFEEASQLLRDSSITSKVTLEIEFDVAESVIPSSGTFHVKLPKKHNVELGITISSPSSRKPGDPLVISDIKKGSVAHRTGTLELGDKLLAIDNIRLDNCSMEDAVQILQQCEDLVKLKIRKDEDNSDEQESSGAIIYTVELKRYGGPLGITISGTEEPFDPIIISSLTKGGLAERTGAIHIGDRILAINSSSLKGKPLSEAIHLLQMAGETVTLKIKKQTDAQSASSPKKFPISSHLSDLGDVEEDSSPAQKPGKLSDMYPSTVPSVDSAVDSWDGSAIDTSYGTQGTSFQASGYNFNTYDWRSPKQRGSLSPVTKPRSQTYPDVGLSYEDWDRSTASGFAGAADSAETEQEENFWSQALEDLETCGQSGILRELEEKADRRVSLRNMTLLATIMSGSTMSLNHEAPTPRSQLGRQASFQERSSSRPHYSQTTRSNTLPSDVGRKSVTLRKMKQEIKEIMSPTPVELHKVTLYKDSDMEDFGFSVADGLLEKGVYVKNIRPAGPGDLGGLKPYDRLLQVNHVRTRDFDCCLVVPLIAESGNKLDLVISRNPLASQKSIDQQSLPGDWSEQNSAFFQQPSHGGNLETREPTNTL

SEQ ID NO: 12117 - protein, 162 aa, Homo sapiens
MSRESDVEAQQSHGSSACSQPHGSVTQSQGSSSQSQGISSSSTSTMPNSSQSSHSSSGTLSSLETVSTQELYSIPEDQEPEDQEPEEPTPAPWARLWALQDGFANLECVNDNYWFGRDKSCEYCFDEPLLKRTDKYRTYSKKHFRIFREVGPKNSYIAYIED

SEQ ID NO: 12118 - protein, 500 aa, Homo sapiens
MELENIVANSLLLKARQEKDYSSLCDKQPIGRRLFRQFCDTKPTLKRHIEFLDAVAEYEVADDEDRSDCGLSILDRFFNDKLAAPLPEIPPDVVTECRLGLKEENPSKKAFEECTRVAHNYLRGEPFEEYQESSYFSQFLQWKWLERQPVTKNTFRHYRVLGKGGFGEVCACQVRATGKMYACKKLQKKRIKKRKGEAMALNEKRILEKVQSRFVVSLAYAYETKDALCLVLTIMNGGDLKFHIYNLGNPGFDEQRAVFYAAELCCGLEDLQRERIVYRDLKPENILLDDRGHIRISDLGLATEIPEGQRVRGRVGTVGYMAPEVVNNEKYTFSPDWWGLGCLIYEMIQGHSPFKKYKEKVKWEEVDQRIKNDTEEYSEKFSEDAKSICRMLLTKNPSKRLGCRGEGAAGVKQHPVFKDINFRRLEANMLEPPFCPDPHAVYCKDVLDIEQFSVVKGIYLDTADEDFYARFATGCVSIPWQNEGCLTMVPSEKEVEPKQC

SEQ ID NO: 12119 - protein, 578 aa, Homo sapiens [sequence omitted]

SEQ ID NO: 12120 - protein, 806 aa, Homo sapiens
MAKAKKVGARRKASGAPAGARGGPAKANSNPFEVKVNRQKFQILGRKTRHDVGLPGVSRARALRKRTQTLLKEYKERDKSNVFRDKRFGEYNSNMSPEEKMMKRFALEQQRHHEKKSIYNLNEDEELTHYGQSLADIEKHNDIVDSDSDAEDRGTLSAELTAAHFGGGGGLLHKKTQQEGEEREKPKSRKELIEELIAKSKQEKRERQAQREDALELTEKLDQDWKEIQTLLSHKTPKSENRDKKEKPKPDAYDMMVRELGFEMKAQPSNRMKTEAELAKEEQEHLRKLEAERLRRMLGKDEDENVKKPKHMSADDLNDGFVLDKDDRRLLSYKDGKMNVEEDVQEEQSKEASDPESNEEEGDSSGGEDTEESDSPDSHLDLESNVESEEENEKPAKEQRQTPGKGLISGKERAGKATRDELPYTFAAPESYEELRSLLLGRSMEEQLLVVERIQKCNHPSLAEGNKAKLEKLFGFLLEYVGDLATDDPPDLTVIDKLVVHLYHLCQMFPESASDAIKFVLRDAMHEMEEMIETKGRAALPGLDVLIYLKITGLLFPTSDFWHPVVTPALVCLSQLLTKCPILSLQDVVKGLFVCCLFLEYVALSQRFIPELINFLLGILYIATPNKASQGSTLVHPFRALGKNSELLVVSAREDVATWQQSSLSLRWASRLRAPTSTEANHIRLSCLAVGLALLKRCVLMYGSLPSFHAIMGPLQALLTDHLADCSHPQELQELCQSTLTEMESQKQLCRPLTCEKSKPVPLKLFTPRLVSNSRPQVIHLPWPPNYRCEPQHPAKKVIFFRVIML

SEQ ID NO: 12121 - protein, 697 aa, Homo sapiens
MKIETSGYNSDKLICRGFIGTPAPPVCDSKFLLSPSSDVRMIPCRAALTFARCLIRRKIVTLDSLEDTKLCRCLSTMDLIALGVGSTLGAGVYVLAGEVAKADSGPSIVVSFLIAALASVMAGLCYAEFGARVPKTGSAYLYTYVTVGELWAFITGWNLILSYVIGTSSVARAWSGTFDELLSKQIGQFLRTYFRMNYTGLAEYPDFFAVCLILLLAGLLSFGVKESAWVNKVFTAVNILVLLFVMVAGFVKGNVANWKISEEFLKNISASAREPPSENGTSIYGAGGFMPYGFTGTLAGAATCFYAFVGFDCIATTGEEVRNPQKAIPIGIVTSLLVCFMAYFGVSAALTLMMPYYLLDEKSPLPVAFEYVGWGPAKYVVAAGSLCALSTSLLGSMFPLPRILFAMARDGLLFRFLARVSKRQSPVAATLTAGVISALMAFLFDLKALVDMMSIGTLMAYSLVAACVLILRYQPGLSYDQPKCSPEKDGLGSSPRVTSKSESQVTMLQRQGFSMRTLFCPSLLPTQQSASLVSFLVGFLAFLVLGLSVLTTYGVHAITRLEAWSLALLALFLVLFVAIVLTIWRQPQNQQKVAFMVPFLPFLPAFSILVNIYLMVQLSADTWVRFSIWMAIGFLIYFSYGIRHSLEGHLRDENNEEDAYPDNVHAAAEEKSAIQANDHHPRNLSSPFIFHEKTSEF

SEQ ID NO: 12122 - protein, 1474 aa, Homo sapiens
MALACCMPKNAAVSNLDIESKLSVYYRAPWHQQRNIFLPATRPPCVEELHRHARQSLQALRREHRSRSDRREQRAAAPLSIAAPPLPAYPPAHSQRRREFKDRHFLTFNSTRSPSPTECCHMTPWSRKSHPPEDEDTDVMLGQRPKNPIHNIPSTLDKQTNWSKALPLPTPEEKMKQDAQVISSCIIPINVTGVGFDREASIRCSLVHSQSVLQRRRKLRRRKTISGIPRRVQQEIDSDESPVARERNVIVHTNPDPSNTVNRISGTRDSECQTEDILIAAPSRRRIRAQRGQSIAASLSHSAGNISALADKGDTMFTPAVSSRTRSRSLPREGNRGGDAEPKVGAKPSAYEEGESFVGDHERTPNDFSEAPSSPSAQDHQPTLGLACSQHLHSPQHKLSERGRSRLSRMAADSGSCDISSNSDTFGSPIHCISTAGVLLSSHMDQKDDHQSSSGNWSGSSSTCPSQTSETIPPAASPPLTGSSHCDSELSLNTAPHANEDASVFVTEQYNDHLDKVRGHRANSFTSTVADLLDDPNNSNTSDSEWNYLHHHHDASCRQDFSPERPKADSLGCPSFTSMATYDSFLEKSPSDKADTSSHFSVDTEGYYTSMHFDCGLKGNKSYVCHYAALGPENGQGVGASPGLPDCAWQDYLDHKRQGRPSISFRKPKAKPTPPKRSSSLRKSDGNADISEKKEPKISSGQHLPHSSREMKLPLDFANTPSRMENANLPTKQEPSWINQSEQGIKEPQLDASDIPPFKDEVAESTHYADLWLLNDLKTNDPYRSLSNSSTATGTTVIECIKSPESSESQTSQSESRATTPSLPSVDNEFKLASPEKLAGLASPSSGYSSQSETPTSSFPTAFFSGPLSPGGSKRKPKVPERKSSLQQPSLKDGTISLSKDLELPIIPPTHLDLSALHNVLNKPFHHRHPLHVFTHNKQNTVGETLRSNPPPSLAITPTILKSVNLRSINKSEEVKQKEENNTDLPYLEESTLTTAALSPSKIRPHTANKSVSRQYSTEDTILSFLDSSAVEMGPDKLHLEKNSTFDVKNRCDPETITSAGSSLLDSNVTKDQVRTETEPIPENTPTKNCAFPTEGFQRVSAARPNDLDGKIIQYGPGPDETLEQVQKAPSAGLEEVAQPESVDVITSQSDSPTRATDVSNQFKHQFVMSRHHDKVPGTISYESEITSVNSFPEKCSKQENIASGISAKSASDNSKAEETQGNVDEASLKESSPSDDSIISPLSEDSQAEAEGVFVSPNKPRTTEDLFAVIHRSKRKVLGRKDSGDMSVRSKSRAPLSSSSSSASSITSPSSNVTTPNSQRSPGLIYRNAKKSNTSNEEFKLLLLKKGSRSDSSYRMSATEILKSPILPKPPGELTAESPQSTDDAHQGSQGAEALSPLSPCSPRVNAEGFSSKSFATSASARVGRSRAPPAASSSRYSVRCRLYNTPMQAISEGETENSDGSPHDDRSSQSST

SEQ ID NO: 12123 - protein, 662 aa, Homo sapiens
MNGDSRAAVVTSPPPTTAPHKERYFDRVDENNPEYLRERNMAPDLRQDFNMMEQKKRVSMILQSPAFCEELESMIQEQFKKGKNPTGLLALQQIADFMTTNVPNVYPAAPQGGMAALNMSLGMVTPVNDLRGSDSIAYDKGEKLLRCKLAAFYRLADLFGWSQLIYNHITTRVNSEQEHFLIVPFGLLYSEVTASSLVKINLQGDIVDRGSTNLGVNQAGFTLHSAIYAARPDVKCVVHIHTPAGAAVSAMKCGLLPISPEALSLGEVAYHDYHGILVDEEEKVLIQKNLGPKSKVLILRNHGLVSVGESVEEAFYYIHNLVVACEIQVRTLASAGGPDNLVLLNPEKYKAKSRSPGSPVGEGTGSPPKWQIGEQEFEALMRMLDNLGYRTGYPYRYPALREKSKKYSDVEVPASVTGYSFASDGDSGTCSPLRHSFQKQQREKTRWLNSGRGDEASEEGQNGSSPKSKTKVWTNITHDHVKPLLQSLSSGVCVPSCITNCLWTKEDGHRTSTSAVPNLFVPLNTNPKEVQEMRNKIREQNLQDIKTAGPQSQVLCGVVMDRSLVQGELVTASKAIIEKEYQPHVIVSTTGPNPFTTLTDRELEEYRREVERKQKGSEENLDEAREQKEKSPPDQPAVPHPPPSTPIKLEEGDGCAREYLLP

SEQ ID NO: 12124 - protein, 737 aa, Homo sapiens
MNGDSRAAVVTSPPPTTAPHKERYFDRVDENNPEYLRERNMAPDLRQDFNMMEQKKRVSMILQSPAFCEELESMIQEQFKKGKNPTGLLALQQIADFMTTNVPNVYPAAPQGGMAALNMSLGMVTPVNDLRGSDSIAYDKGEKLLRCKLAAFYRLADLFGWSQLIYNHITTRVNSEQEHFLIVPFGLLYSEVTASSLVKINLQGDIVDRGSTNLGVNQAGFTLHSAIYAARPDVKCVVHIHTPAGAAVSAMKCGLLPISPEALSLGEVAYHDYHGILVDEEEKVLIQKNLGPKSKVLILRNHGLVSVGESVEEAFYYIHNLVVACEIQVRTLASAGGPDNLVLLNPEKYKAKSRSPGSPVGEGTGSPPKWQIGEQEFEALMRMLDNLGYRTGYPYRYPALREKSKKYSDVEVPASVTGYSFASDGDSGTCSPLRHSFQKQQREKTRWLNSGRGDEASEEGQNGSSPKSKTKWTKEDGHRTSTSAVPNLFVPLNTNPKEVQEMRNKIREQNLQDIKTAGPQSQVLCGVVMDRSLVQGELVTASKAIIEKEYQPHVIVSTTGPNPFTTLTDRELEEYRREVERKQKGSEENLDEAREQKEKSPPDQPAVPHPPPSTPIKLEEDLVPEPTTGDDSDAATFKPTLPDLSPDEPSEALGFPMLEKEEEAHRPPSPTEAPTEASPEPAPDPAPVAEEAAPSAVEEGAAADPGSDGSPGKSPSKKKKKFRTPSFLKKSKKKSDS

SEQ ID NO: 12125 - protein, 1216 aa, Homo sapiens
MAAMAPGGSGSGGGVNPFLSDSDEDDDEVAATEERRAVLRLGAGSGLDPGSAGSLSPQDPVALGSSARPGLPGEASAAAVALGGTGETPARLSIDAIAAQLLRDQYLLTALELHTELLESGRELPRLRDYFSNPGNFERQSGTPPGMGAPGVPGAAGVGGAGGREPSTASGGGQLNRAGSISTLDSLDFARYSDDGNRETDEKVAVLEFELRKAKETIQALRANLTKAAEHEVPLQERKNYKSSPEIQEPIKPLEKRALNFLVNEFLLKNNYKLTSITFSDENDDQDFELWDDVGLNIPKPPDLLQLYRDFGNHQVTGKDLVDVASGVEEDELEALTPIISNLPPTLETPQPAENSMLVQKLEDKISLLNSEKWSLMEQIRRLKSEMDFLKNEHFAIPAVCDSVQPPLDQLPHKDSEDSGQHPDVNSSDKGKNTDIHLSISDEADSTIPKENSPNSFPRREREGMPPSSLSSKKTVHFDKPNRKLSPAFHQALLSFCRMSADSRLGYEVSRIADSEKSVMLMLGRCLPHIVPNVLLAKREELIPLILCTACLHPEPKERDQLLHILFNLIKRPDDEQRQMILTGCVAFARHVGPTRVEAELLPQCWEQINHKYPERRLLVAESCGALAPYLPKEIRSSLVLSMLQQMLMEDKADLVREAVIKSLGIIMGYIDDPDKYHQGFELLLSALGDPSERVVSATHQVFLPAYAAWTTELGNLQSHLILTLLNKIEKLLREGEHGLDEHKLHMYLSALQSLIPSLFALVLQNAPFSSKAKLHGEVPQIEVTRFPRPMSPLQDVSTIIGSREQLAVLLQLYDYQLEQEGTTGWESLLWVVNQLLPQLIEIVGKINVTSTACVHEFSRFFWRLCRTFGKIFTNTKVKPQFQEILRLSEENIDSSAGNGVLTKATVPIYATGVLTCYIQEEDRKLLVGFLEDVMTLLSLSHAPLDSLKASFVELGANPAYHELLLTVLWYGVVHTSALVRCTAARMFELTLRGMSEALVDKRVAPALVTLSSDPEFSVRIATIPAFGTIMETVIQRELLERVKMQLASFLEDPQYQDQHSLHTEIIKTFGRVGPNAEPRFRDEFVIPHLHKLALVNNLQIVDSKRLDIATHLFEAYSALSCCFISEDLMVNHFLPGLRCLRTDMEHLSPEHEVILSSMIKECEQKVENKTVQEPQGSMSIAASLVSEDTKTKFLNKMGQLTTSGAMLANVFQRKK

SEQ ID NO: 12126 - protein, 167 aa, Homo sapiens
MQEHYDEFFEEVFTEMEEKYGEVEEMNVCDNLGDHLVGNVYVKFRREEDAEKAVIDLNNRWFNGQPIHAELSPVTDFREACCRQYEMGECTRGGFCNFMHLKPISRELRRELYGRRRKKHRSRSRSRERRSRSRDRGRGGGGGGGGGGGGRERDRRRSRDRERSGRF

SEQ ID NO: 12127 - protein, 711 aa, Homo sapiens
MSDYSTGGPPPGPPPPAGGGGGAGGAGGGPPPGPPGAGDRGGGGPGGGGPGGGSAGGPSQPPGGGGPGIRKDAFADAVQRARQIAAKIGGDAATTVNNSTPDFGFGGQKRQLEDGDQPESKKLASQGDSISSQLGPIHPPPRTSMTEEYRVPDGMVGLIIGRGGEQINKIQQDSGCKVQISPDSGGLPERSVSLTGAPESVQKAKMMLDDIVSRGRGGPPGQFHDNANGGQNGTVQEIMIPAGKAGLVIGKGGETIKQLQERAGVKMILIQDGSQNTNVDKPLRIIGDPYKVQQACEMVMDILRERDQGGFGDRNEYGSRIGGGIDVPVPRHSVGVVIGRSGEMIKKIQNDAGVRIQFKQDDGTGPEKIAHIMGPPDRCEHAARIINDLLQSLRSGPPGPPGGPGMPPGGRGRGRGQGNWGPPGGEMTFSIPTHKCGLVIGRGGENVKAINQQTGAFVEISRQLPPNGDPNFKLFIIRGSPQQIDHAKQLIEEKIEGPLCPVGPGPGGPGPAGPMGPFNPGPFNQGPPGAPPHAGGPPPHQYPPQGWGNTYPQWQPPAPHDPSKAAAAAADPNAAWAAYYSHYYQQPPGPVPGPAPAPAAPPAQGEPPQPPPTGQSDYTKAWEEYYKKIGQQPQQPGAPPQQDYTKAWEEYYKKQAQVATGGGPGAPPGSQPDYSAAWAEYYRQQAAYYGQTPGPGGPQPPPTQQGQQQAQ

SEQ ID NO: 12128 - protein, 396 aa, Homo sapiens
MATRVEEAARGRGGGAEEATEAGRGGRRRSPRQKLEESRSVQKQMKILQKKQAQIVKEKVHLQSEHSKAILARSKLESLCRELQRHNKTLKEENMQQAREEEERRKEATAHFQITLNEIQAQLEQHDIHNAKLRQENIELGEKLKKLIEQYALREEHIDKVFKHKELQQQLVDAKLQQTTQLIKEADEKHQREREFLLKEATESRHKYEQMKQQEVQLKQQLSLYMDKFEEFQTTMAKSNELFTTFRQEMEKMTKKIKKLEKETIIWRTKWENNNKALLQMAEEKTVRDKEYKALQIKLERLEKLCRALQTERNELNEKVEVLKEQVSIKAAIKAANRDLATPVMQPCTALDSHKELNTSSKRALGAHLEAEPKSQRSAVQKPPSTGSAPAIESVD

SEQ ID NO: 12129 - protein, 426 aa, Homo sapiens
MDSALSDPHNGSAEAGGPTNSTTRPPSTPEGIALAYGSLLLMALLPIFFGALRSVRCARGKNASDMPETITSRDAARFPIIASCTLLGLYLFFKIFSQEYINLLLSMYFFVLGILALSHTISPFMNKFFPASFPNRQYQLLFTQGSGENKEEIINYEFDTKDLVCLGLSSIVGVWYLLRKHWIANNLFGLAFSLNGVELLHLNNVSTGCILLGGLFIYDVFWVFGTNVMVTVAKSFEAPIKLVFPQDLLEKGLEANNFAMLGLGDVVIPGIFIALLLRFDISLKKNTHTYFYTSFAAYIFGLGLTIFIMHIFKHAQPALLYLVPACIGFPVLVALAKGEVTEMFSYESSAEILPHTPRLTHFPTVSGSPASLADSMQQKLAGPRRRRPQNPSAIYEESNPKDPAAVTESKEGTEASASKGLEKKEK

SEQ ID NO: 12130 - protein, 336 aa, Homo sapiens
RKKCCKGYKFVLGQCIPEDYDVCAEAPCEQQCTDNFGRVLCTCYPGYRYDRERHRKREKPYCLDIDECASSNGTLCAHICINTLGSYRCECREGYIREDDGKTCTRGDKYPNDTGHEKSENMVKAGTCCATCKEFYQMKQTVLQLKQKIALLPNNAADLGKYITGDKVLASNTYLPGPPGLPGGQGPPGSPGPKGSPGFPGMPGPPGQPGPRGSMGPMGPSPDLSHIKQGRRGPVGPPGAPGRDGSKGERGAPGPRGSPGPPGSFDFLLLMLADIRNDITELQEKVFGHRTHSSAEEFPLPQEFPSYPEAMDLGSGDDHPRRTETRDLRAPRDFYP

SEQ ID NO: 12131 - protein, 797 aa, Homo sapiens
QIGNLEDYYHFYHSKTFKRSTLSSRGPHTFLRMDPQVKWLQQQEVKRRVKRQVRSDPQALYFNDPIWSNMWYLHCGDKNSRCRSEMNVQAAWKRGYTGKNVVVTILDDGIERNHPDLAPNYDSYASYDVNGNDYDPSPRYDASNENKHGTRCAGEVAASANNSYCIVGIAYNAKIGGIRMLDGDVTDVVEAKSLGIRPNYIDIYSASWGPDDDGKTVDGPGRLAKQAFEYGIKKGRQGLGSIFVWASGNGGREGDYCSCDGYTNSIYTISVSSATENGYKPWYLEECASTLATTYSSGAFYERKIVTTDLRQRCTDGHTGTSVSAPMVAGIIALALEAKSIPLVQVLRTTALTSACAEHSDQRVVYLEHVVVRTSISHPRRGDLQIYLVSPSGTKSQLLAKRLLDLSNEGFTNWEFMTVHCWGEKAEGQWTLEIQDLPSQVRNPEKQGKLKEWSLILYGTAEHPYHTFSAHQSRSRMLELSAPELEPPKAALSPSQVEVPEDEEDYTAQSTPGSANILQTSVCHPECGDKGCDGPNADQCLNCVHFSLGSVKTSRKCVSVCPLGYFGDTAARRCRRCHKGCETCSSRAATQCLSCRRGFYHHQEMNTCVTLCPAGFYADESQKNCLKCHPSCKKCVDEPEKCTVCKEGFSLARGSCIPDCEPGTYFDSELIRCGECHHTCGTCVGPGREECIHCAKNFHFHDWKCVPACGEGFYPEEMPGLPHKVCRRCDENCLSCAGSSRNCSRCKTGFTQLGTSCITNHTCSNADETFCEMVKSNRLCERKLFIQFCCRTCLLAG

SEQ ID NO: 12132 - protein, 859 aa, Homo sapiens
MQAAVAVSVPFLLLCVLGTCPPARCGQAGDASLMELEKRKENRFVERQSIVPLRLIYRSGGEDESRHDALDTRVRGDLGGPQLTHVDQASFQVDAFGTSFILDVVLNHDLLSSEYIERHIEHGGKTVEVKGGEHCYYQGHIRGNPDSFVALSTCHGLHGMFYDGNHTYLIEPEENDTTQEDFHFHSVYKSRLFEFSLDDLPSEFQQVNITPSKFILKPRPKRSKRQLRRYPRNVEEETKYIELMIVNDHLMFKKHRLSVVHTNTYAKSVVNMADLIYKDQLKTRIVLVAMETWATDNKFAISENPLITLREFMKYRRDFIKEKSDAVHLFSGSQFESSRSGAAYIGGICSLLKGGGVNEFGKTDLMAVTLAQSLAHNIGIISDKRKLASGECKCEDTWSGCIMGDTGYYLPKKFTQCNIEEYHDFLNSGGGACLFNKPSKLLDPPECGNGFIETGEECDCGTPAECVLEGAECCKKCTLTQDSQCSDGLCCKKCKFQPMGTVCREAVNDCDIRETCSGNSSQCAPNIHKMDGYSCDGVQGICFGGRCKTRDRQCKYIWGQKVTASDKYCYEKLNIEGTEKGNCGKDKDTWIQCNKRDVLCGYLLCTNIGNIPRLGELDGEITSTLVVQQGRTLNCSGGHVKLEEDVDLGYVEDGTPCGPQMMCLEHRCLPVASFNFSTCLSSKEGTICSGNGVCSNELKCVCNRHWIGSDCNTYFPHNDDAKTGITLSGNGVAGTNIIIGIIAGTILVLALILGITAWGYKNYREQRQLPQGDYVKKPGDGDSFYSDIPPGVSTNSASSSKKRSNGLSHSWSERIPDTKHISDICENGRPRSNSWQGNLGGNKKKIRGKRFRPRSNSTE

SEQ ID NO: 12133 - protein, 804 aa, Homo sapiens
MELEKRKENRFVERQSIVPLRLIYRSGGEDESRHDALDTRVRGDLGGPQLTHVDQASFQVDAFGTSFILDVVLNHDLLSSEYIERHIEHGGKTVEVKGGEHCYYQGHIRGNPDSFVALSTCHGLHGMFYDGNHTYLIEPEENDTTQEDFHFHSVYKSRLFEFSLDDLPSEFQQVNITPSKFILKPRPKRSKRQLRRYPRNVEEETKYIELMIVNDHLMFKKHRLSVVHTNTYAKSVVNMADLIYKDQLKTRIVLVAMETWATDNKFAISENPLITLREFMKYRRDFIKEKSDAVHLFSGSQFESSRSGAAYIGGICSLLKGGGVNEFGKTDLMAVTLAQSLAHNIGIISDKRKLASGECKCEDTWSGCIMGDTGYYLPKKFTQCNIEEYHDFLNSGGGACLFNKPSKLLDPPECGNGFIETGEECDCGTPAECVLEGAECCKKCTLTQDSQCSDGLCCKKCKFQPMGTVCREAVNDCDIRETCSGNSSQCAPNIHKMDGYSCDGVQGICFGGRCKTRDRQCKYIWGQKVTASDKYCYEKLNIEGTEKGNCGKDKDTWIQCNKRDVLCGYLLCTNIGNIPRLGELDGEITSTLVVQQGRTLNCSGGHVKLEEDVDLGYVEDGTPCGPQMMCLEHRCLPVASFNFSTCLSSKEGTICSGNGVCSNELKCVCNRHWIGSDCNTYFPHNDDAKTGITLSGNGVAGTNIIIGIIAGTILVLALILGITAWGYKNYREQRQLPQGDYVKKPGDGDSFYSDIPPGVSTNSASSSKKRSNGLSHSWSERIPDTKHISDICENGRPRSNSWQG

SEQ ID NO: 12134 - protein, 870 aa, Homo sapiens
MQAAVAVSVPFLLLCVLGTCPPARCGQAGDASLMELEKRKENRFVERQSIVPLRLIYRSGGEDESRHDALDTRVRGDLGGPQLTHVDQASFQVDAFGTSFILDVVLNHDLLSSEYIERHIEHGGKTVEVKGGEHCYYQGHIRGNPDSFVALSTCHGLHGMFYDGNHTYLIEPEENDTTQEDFHFHSVYKSRLFEFSLDDLPSEFQQVNITPSKFILKPRPKRSKRQLRRYPRNVEEETKYIELMIVNDHLMFKKHRLSVVHTNTYAKSVVNMADLIYKDQLKTRIVLVAMETWATDNKFAISENPLITLREFMKYRRDFIKEKSDAVHLFSGSQFESSRSGAAYIGGICSLLKGGGVNEFGKTDLMAVTLAQSLAHNIGIISDKRKLASGECKCEDTWSGCIMGDTGYYLPKKFTQCNIEEYHDFLNSGGGACLFNKPSKLLDPPECGNGFIETGEECDCGTPAECVLEGAECCKKCTLTQDSQCSDGLCCKKCKFQPMGTVCREAVNDCDIRETCSGNSSQCAPNIHKMDGYSCDGVQGICFGGRCKTRDRQCKYIWGQKVTASDKYCYEKLNIEGTEKGNCGKDKDTWIQCNKRDVLCGYLLCTNIGNIPRLGELDGEITSTLVVQQGRTLNCSGGHVKLEEDVDLGYVEDGTPCGPQMMCLEHRCLPVASFNFSTCLSSKEGTICSGNGVCSNELKCVCNRHWIGSDCNTYFPHNDDAKTGITLSGNGVAGTNIIIGIIAGTILVLALILGITAWGYKNYREQRSNGLSHSWSERIPDTKHISDICENGRPRSNSWQGNLGGNKKKIRGKRFRPRSNSTETLSPAKSPSSSTGSIASSRKYPYPMPPLPDEDKKVNRQSARLWETSI

SEQ ID NO: 12135 - protein, 899 aa, Homo sapiens
MQAAVAVSVPFLLLCVLGTCPPARCGQAGDASLMELEKRKENRFVERQSIVPLRLIYRSGGEDESRHDALDTRVRGDLGGPQLTHVDQASFQVDAFGTSFILDVVLNHDLLSSEYIERHIEHGGKTVEVKGGEHCYYQGHIRGNPDSFVALSTCHGLHGMFYDGNHTYLIEPEENDTTQEDFHFHSVYKSRLFEFSLDDLPSEFQQVNITPSKFILKPRPKRSKRQLRRYPRNVEEETKYIELMIVNDHLMFKKHRLSVVHTNTYAKSVVNMADLIYKDQLKTRIVLVAMETWATDNKFAISENPLITLREFMKYRRDFIKEKSDAVHLFSGSQFESSRSGAAYIGGICSLLKGGGVNEFGKTDLMAVTLAQSLAHNIGIISDKRKLASGECKCEDTWSGCIMGDTGYYLPKKFTQCNIEEYHDFLNSGGGACLFNKPSKLLDPPECGNGFIETGEECDCGTPAECVLEGAECCKKCTLTQDSQCSDGLCCKKCKFQPMGTVCREAVNDCDIRETCSGNSSQCAPNIHKMDGYSCDGVQGICFGGRCKTRDRQCKYIWGQKVTASDKYCYEKLNIEGTEKGNCGKDKDTWIQCNKRDVLCGYLLCTNIGNIPRLGELDGEITSTLVVQQGRTLNCSGGHVKLEEDVDLGYVEDGTPCGPQMMCLEHRCLPVASFNFSTCLSSKEGTICSGNGVCSNELKCVCNRHWIGSDCNTYFPHNDDAKTGITLSGNGVAGTNIIIGIIAGTILVLALILGITAWGYKNYREQRSNGLSHSWSERIPDTKHISDICENGRPRSNSWQGNLGGNKKKIRGKRFRPRSNSTEYLNPWFKRDYNVAKWVEDVNKNTEGPYFRTLSPAKSPSSSTGSIASSRKYPYPMPPLPDEDKKVNRQSARLWETSI

SEQ ID NO: 12136 - protein, 1257 aa, Homo sapiens
MAHFSSEDQAMLQAMLRRLFQSVKEKITGAPSLECAEEILLHLEETDENFHNYEFVKYLRQHIGNTLGSMIEEEMEKCTSDRNQGEECGYDTVVQQVTKRTQESKEYKEMMHYLKNIMIAVVESMINKFEEDETRNQERQKKIQKEKSHSYRTDNCSDSDSSLNQSYKFCQGKLQLILDQLDPGQPKEVRYEALQTLCSAPPSDVLNCENWTTLCEKLTVSLSDPDPVFSDRILKFCAQTFLLSPLHMTKEIYTSLAKYLESYFLSRENHIPTLSAGVDITNPNMTRLLKKVRLLNEYQKEAPSFWIRHPEKYMEEIVESTLSLLTVKHNQSHVVSQKILDPIYFFALVDTKAVWFKKWMHAHYSRTTVLRLLETKYKSLVTTAIQQCVQYFEMCKTRKADETLGHSKHCRNKQKTFYYLGQELQYIYFIHSLCLLGRLLIYKQGRKLFPIKLKNKKGLVSLIDLLVLFTQLIYYSPSCPKMTSAAHSENYSPASMVTEVLWILSDQKECAVECLYNNIVIETLLQPIHNLMKGNEASPNCSETALIHIAGILARIASVEEGLILLLYGANMNSSEESPTGAHIIAQFSKKLLDEDISIFSGSEMLPVVKGAFISVCRHIYSTCEGLQVLITYNLHESIAKAWKKTSLLSERIPTPVEGSDSVSSVSQESQNIMAWEDNLLDDLLHFAATPKGLLLLQRTGAINECVTFIFNRYAKKLQVSRHKKFGYGVLVTRVASTAAGGIALKKSGFINELITELWSNLEYGRDDVRVTHPRTTPVDPIDRSCQKSFLALVNLLSYPAIYELVRNQDLPNKTEYSLREVPTCVIDIIDRLIILNSEAKIRSLFNYEQSHIFGLRDFIIDGLSVERNHVLVRINLVGGPLERILPPRLLEKSDNPYPWPMFSSYPLPNCYLSDITRNAGIKQDNDLDKLLLCLKISDKQTEWIENCQRQFCKMMKAKPDIISGEALIELLEKFVLHLTESPSECYFPSVEYTATDANVKNESLSSVQQLGIKMTVRYGKFLSLLKDGAENDLTWVLKHCERFLKQQQTSIKSSLLCLQGNYAGHDWFVSSLFMIMLGDKEKTFQFLHQFSRLLTSAFLWLPRLHISSYLPNDTVESGIHPVYFCSTHYIEMLLKAELPLVFSAFHMSGFAPSQICLQWITQCFWNYLDWIEICHYIATCVFLGPDYQVYICIAVFKHLQQDILQHTQTQDLQVFLKEEALHGFRVSDYFEYMEILEQNYRTVLLRDMRNIRLQST

SEQ ID NO: 12137 - protein, 466 aa, Homo sapiens
MDAFRSTPYKVRPVAIKQLSEREELIQSVLAQVAEQFSRAFKINELKAEVANHLAVLEKRVELEGLKVVEIEKCKSDIKKMREELAARSSRTNCPCKYSFLDNHKKLTPRRDVPTYPKYLLSPETIEALRKPTFDVWLWEPNEMLSCLEHMYHDLGLVRDFSINPVTLRRWLFCVHDNYRNNPFHNFRHCFCVAQMMYSMVWLCSLQEKFSQTDILILMTAAICHDLDHPGYNNTYQINARTELAVRYNDISPLENHHCAVAFQILAEPECNIFSNIPPDGFKQIRQGMITLILATDMARHAEIMDSFKEKMENFDYSNEEHMTLLKMILIKCCDISNEVRPMEVAEPWVDCLLEEYFMQSDREKSEGLPVAPFMDRDKVTKATAQIGFIKFVLIPMFETVTKLFPMVEEIMLQPLWESRDRYEELKRIDDAMKELQKKTDSLTSGATEKSRERSRDVKNSEGDCA

SEQ ID NO: 12138 - protein, 552 aa, Homo sapiens
MDAFRRNTTISLLTTDDAMVSIDPTMPANSERTPYKVRPVAIKQLSAGVEDKRTTSRGQSAERPLRDRRVVGLEQPRREGAFESGQVEPRPREPQGCYQEGQRIPPEREELIQSVLAQVAEQFSRAFKINELKAEVANHLAVLEKRVELEGLKVVEIEKCKSDIKKMREELAARSSRTNCPCKYSFLDNHKKLTPRRDVPTYPKYLLSPETIEALRKPTFDVWLWEPNEMLSCLEHMYHDLGLVRDFSINPVTLRRWLFCVHDNYRNNPFHNFRHCFCVAQMMYSMVWLCSLQEKFSQTDILILMTAAICHDLDHPGYNNTYQINARTELAVRYNDISPLENHHCAVAFQILAEPECNIFSNIPPDGFKQIRQGMITLILATDMARHAEIMDSFKEKMENFDYSNEEHMTLLKMILIKCCDISNEVRPMEVAEPWVDCLLEEYFMQSDREKSEGLPVAPFMDRDKVTKATAQIGFIKFVLIPMFETVTKLFPMVEEIMLQPLWESRDRYEELKRIDDAMKELQKKTDSLTSGATEKSRERSRDVKNSEGDCA

SEQ ID NO: 12139 - protein, 433 aa, Homo sapiens
MDAFRRAFKINELKAEVANHLAVLEKRVELEGLKVVEIEKCKSDIKKMREELAARSSRTNCPCKYSFLDNHKKLTPRRDVPTYPKYLLSPETIEALRKPTFDVWLWEPNEMLSCLEHMYHDLGLVRDFSINPVTLRRWLFCVHDNYRNNPFHNFRHCFCVAQMMYSMVWLCSLQEKFSQTDILILMTAAICHDLDHPGYNNTYQINARTELAVRYNDISPLENHHCAVAFQILAEPECNIFSNIPPDGFKQIRQGMITLILATDMARHAEIMDSFKEKMENFDYSNEEHMTLLKMILIKCCDISNEVRPMEVAEPWVDCLLEEYFMQSDREKSEGLPVAPFMDRDKVTKATAQIGFIKFVLIPMFETVTKLFPMVEEIMLQPLWESRDRYEELKRIDDAMKELQKKTDSLTSGATEKSRERSRDVKNSEGDCA

SEQ ID NO: 12140 - protein, 459 aa, Homo sapiens
MDAFRRNTTISLLTTDDAMVSIDPTMPANSERAFKINELKAEVANHLAVLEKRVELEGLKVVEIEKCKSDIKKMREELAARSSRTNCPCKYSFLDNHKKLTPRRDVPTYPKYLLSPETIEALRKPTFDVWLWEPNEMLSCLEHMYHDLGLVRDFSINPVTLRRWLFCVHDNYRNNPFHNFRHCFCVAQMMYSMVWLCSLQEKFSQTDILILMTAAICHDLDHPGYNNTYQINARTELAVRYNDISPLENHHCAVAFQILAEPECNIFSNIPPDGFKQIRQGMITLILATDMARHAEIMDSFKEKMENFDYSNEEHMTLLKMILIKCCDISNEVRPMEVAEPWVDCLLEEYFMQSDREKSEGLPVAPFMDRDKVTKATAQIGFIKFVLIPMFETVTKLFPMVEEIMLQPLWESRDRYEELKRIDDAMKELQKKTDSLTSGATEKSRERSRDVKNSEGDCA

SEQ ID NO: 12141 - protein, 526 aa, Homo sapiens
MDAFRSTPYKVRPVAIKQLSAGVEDKRTTSRGQSAERPLRDRRVVGLEQPRREGAFESGQVEPRPREPQGCYQEGQRIPPEREELIQSVLAQVAEQFSRAFKINELKAEVANHLAVLEKRVELEGLKVVEIEKCKSDIKKMREELAARSSRTNCPCKYSFLDNHKKLTPRRDVPTYPKYLLSPETIEALRKPTFDVWLWEPNEMLSCLEHMYHDLGLVRDFSINPVTLRRWLFCVHDNYRNNPFHNFRHCFCVAQMMYSMVWLCSLQEKFSQTDILILMTAAICHDLDHPGYNNTYQINARTELAVRYNDISPLENHHCAVAFQILAEPECNIFSNIPPDGFKQIRQGMITLILATDMARHAEIMDSFKEKMENFDYSNEEHMTLLKMILIKCCDISNEVRPMEVAEPWVDCLLEEYFMQSDREKSEGLPVAPFMDRDKVTKATAQIGFIKFVLIPMFETVTKLFPMVEEIMLQPLWESRDRYEELKRIDDAMKELQKKTDSLTSGATEKSRERSRDVKNSEGDCA

SEQ ID NO: 12142 - protein, 492 aa, Homo sapiens
MDAFRRNTTISLLTTDDAMVSIDPTMPANSERTPYKVRPVAIKQLSEREELIQSVLAQVAEQFSRAFKINELKAEVANHLAVLEKRVELEGLKVVEIEKCKSDIKKMREELAARSSRTNCPCKYSFLDNHKKLTPRRDVPTYPKYLLSPETIEALRKPTFDVWLWEPNEMLSCLEHMYHDLGLVRDFSINPVTLRRWLFCVHDNYRNNPFHNFRHCFCVAQMMYSMVWLCSLQEKFSQTDILILMTAAICHDLDHPGYNNTYQINARTELAVRYNDISPLENHHCAVAFQILAEPECNIFSNIPPDGFKQIRQGMITLILATDMARHAEIMDSFKEKMENFDYSNEEHMTLLKMILIKCCDISNEVRPMEVAEPWVDCLLEEYFMQSDREKSEGLPVAPFMDRDKVTKATAQIGFIKFVLIPMFETVTKLFPMVEEIMLQPLWESRDRYEELKRIDDAMKELQKKTDSLTSGATEKSRERSRDVKNSEGDCA

SEQ ID NO: 12143 - protein, 507 aa, Homo sapiens
MGSGSSSYRPKAIYLDIDGRIQKVIFSKYCNSSDIMDLFCIATGLPRTPYKVRPVAIKQLSEREELIQSVLAQVAEQFSRAFKINELKAEVANHLAVLEKRVELEGLKVVEIEKCKSDIKKMREELAARSSRTNCPCKYSFLDNHKKLTPRRDVPTYPKYLLSPETIEALRKPTFDVWLWEPNEMLSCLEHMYHDLGLVRDFSINPVTLRRWLFCVHDNYRNNPFHNFRHCFCVAQMMYSMVWLCSLQEKFSQTDILILMTAAICHDLDHPGYNNTYQINARTELAVRYNDISPLENHHCAVAFQILAEPECNIFSNIPPDGFKQIRQGMITLILATDMARHAEIMDSFKEKMENFDYSNEEHMTLLKMILIKCCDISNEVRPMEVAEPWVDCLLEEYFMQSDREKSEGLPVAPFMDRDKVTKATAQIGFIKFVLIPMFETVTKLFPMVEEIMLQPLWESRDRYEELKRIDDAMKELQKKTDSLTSGATEKSRERSRDVKNSEGDCA

SEQ ID NO: 12144 - protein, 744 aa, Homo sapiens
MAGRSMQAARCPTDELSLTNCAVVNEKDFQSGQHVIVRTSPNHRYTFTLKTHPSVVPGSIAFSLPQRKWAGLSIGQEIEVSLYTFDKAKQCIGTMTIEIDFLQKKSIDSNPYDTDKMAAEFIQQFNNQAFSVGQQLVFSFNEKLFGLLVKDIEAMDPSILKGEPATGKRQKIEVGLVVGNSQVAFEKAENSSLNLIGKAKTKENRQSIINPDWNFEKMGIGGLDKEFSDIFRRAFASRVFPPEIVEQMGCKHVKGILLYGPPGCGKTLLARQIGKMLNAREPKVVNGPEILNKYVGESEANIRKLFADAEEEQRRLGANSGLHIIIFDEIDAICKQRGSMAGSTGVHDTVVNQLLSKIDGVEQLNNILVIGMTNRPDLIDEALLRPGRLEVKMEIGLPDEKGRLQILHIHTARMRGHQLLSADVDIKELAVETKNFSGAELEGLVRAAQSTAMNRHIKASTKVEVDMEKAESLQVTRGDFLASLENDIKPAFGTNQEDYASYIMNGIIKWGDPVTRVLDDGELLVQQTKNSDRTPLVSVLLEGPPHSGKTALAAKIAEESNFPFIKICSPDKMIGFSETAKCQAMKKIFDDAYKSQLSCVVVDDIERLLDYVPIGPRFSNLVLQALLVLLKKAPPQGRKLLIIGTTSRKDVLQEMEMLNAFSTTIHVPNIATGEQLLEALELLGNFKDKERTTIAQQVKGKKVWIGIKKLLMLIEMSLQMDPEYRVRKFLALLREEGASPLDFD

SEQ ID NO: 12145 - protein, 401 aa, Homo sapiens
MGQWIVYPLCSPGDSGKVTTVVATLGQGPERSQEVAYTDIKVIGNGSFGVVYQARLAETRELVAIKKVLQDKRFKNRELQIMRKLDHCNIVRLRYFFYSSGEKKDELYLNLVLEYVPETVYRVARHFTKAKLTIPILYVKVYMYQLFRSLAYIHSQGVCHRDIKPQNLLVDPDTAVLKLCDFGSAKQLVRGEPNVSYICSRYYRAPELIFGATDYTSSIDVWSAGCVLAELLLGQPIFPGDSGVDQLVEIIKVLGTPTREQIREMNPNYTEFKFPQIKAHPWTKVFKSRTPPEAIALCSSLLEYTPSSRLSPLEACAHSFFDELRCLGTQLPNNRPLPPLFNFSAGELSIQPSLNAILIPPHLRSPAGTTTLTPSSQALTETPTSSDWQSTDATPTLTNSS

SEQ ID NO: 12146 - protein, 271 aa, Homo sapiens
MRELAIEIGVRALLFGVFVFTEFLDPFQRVIQPEEIWLYKNPLVQSDNIPTRLMFAISFLTPLAVICVVKIIRRTDKTEIKEAFLAVSLALALNGVCTNTIKLIVGRPRPDFFYRCFPDGVMNSEMHCTGDPDLVSEGRKSFPSIHSSFAFSGLGFTTFYLAGKLHCFTESGRGKSWRLCAAILPLYCAMMIALSRMCDYKHHWQDSFVGGVIGLIFAYICYRQHYPPLANTACHKPYVSLRVPASLKKEERPTADSAPSLPLEGITEGPV

SEQ ID NO: 12147 - protein, 636 aa, Homo sapiens
MAPRPPTAAPQESVTFKDVSVDFTQEEWYHVDPAQRSLYRDVMLENYSHLVSLGYQVSKPEVIFKLEQGEEPWISEGEIQRPFYPDWKTRPEVKSSHLQQDVSEVSHCTHDLLHATLEDSWDVSSQLDRQQENWKRHLGSEASTQKKIITPQENFEQNKFGENSRLNTNLVTQLNIPARIRPSECETLGSNLGHNADLLNENNILAKKKPYKCDKCRKAFIHRSSLTKHEKTHKGEGAFPNGTDQGIYPGKKHHECTDCGKTFLWKTQLTEHQRIHTGEKPFECNVCGKAFRHSSSLGQHENAHTGEKPYQCSLCGKAFQRSSSLVQHQRIHTGEKPYRCNLCGRSFRHGTSLTQHEVTHSGEKPFQCKECGKAFSRCSSLVQHERTHTGEKPFECSICGRAFGQSPSLYKHMRIHKRGKPYQSSNYSIDFKHSTSLTQDESTLTEVKSYHCNDCGEDFSHITDFTDHQRIHTAENPYDCEQAFSQQAISHPGEKPYQCNVCGKAFKRSTSFIEHHRIHTGEKPYECNECGEAFSRRSSLTQHERTHTGEKPYECIDCGKAFSQSSSLIQHERTHTGEKPYECNECGRAFRKKTNLHDHQRIHTGEKPYSCKECGKNFSRSSALTKHQRIHTRNKL

SEQ ID NO: 12148 - protein, 587 aa, Homo sapiens
MARGYGATVSLVLLGLGLALAVIVLAVVLSRHQAPCGPQAFAHAAVAADSKVCSDIGRAILQQQGSPVDATIAALVCTSVVNPQSMGLGGGVIFTIYNVTTGKVEVINARETVPASHAPSLLDQCAQALPLGTGAQWIGVPGELRGYAEAHRRHGRLPWAQLFQPTIALLRGGHVVAPVLSRFLHNSILRPSLQASTLRQLFFNGTEPLRPQDPLPWPALATTLETVATEGVEVFYTGRLGQMLVEDIAKEGSQLTLQDLAKFQPEVVDALEVPLGDYTLYSPPPPAGGAILSFILNVLRGFNFSTESMARPEGRVNVYHHLVETLKFAKGQRWRLGDPRSHPKLQNASRDLLGETLAQLIRQQIDGRGDHQLSHYSLAEAWGHGTGTSHVSVLGEDGSAVAATSTINTPFGAMVYSPRTGIILNNELLDLCERCPRGSGTTPSPAVSGDRVGGAPGRCWPPVPGERSPSSMVPSILINKAQGSKLVIGGAGGELIISAVAQAIMSKLWLGFDLRAAIAAPILHVNSKGCVEYEPNFSQEVQRGLQDRGQNQTQRPFFLNVVQAVSQEGACVYAVSDLRKSGEAAGY

SEQ ID NO: 12149 - protein, 232 aa, Homo sapiens
MTKVNGTEIEYEFEEITLERGNSGLGFSIAGGTDNPHIGDDPGIFITKIIPGGAAAEDGRLRVNDCILRVNEVDVSEVSHSKAVEALKEAGSIVRLYVRRRRPILETVVEIKLFKGPKGLGFSIAGGVGNQHIPGDNSIYVTKIIDGGAAQKDGRLQVGDRLLMVNNYSLEEVTHEEAVAILKNTSEVVYLKVGKPTTIYMTDPYGPPDITHSYSPPMENHLLSGNNGTLEY

SEQ ID NO: 12150 - protein, 552 aa, Homo sapiens
MNAYLTKQHSCSRGSDGMDAVRSAPTLIRDAHCACGWQRNCQGLGYSSQTMPSSGPGGPASNRTGGSSFNRTLWDSVRKSPHKTSTKGKGTCGEHCTCPHGWFSPAQASPAPIIVNTDTLDTIPYVNGTEIEYEFEEITLERGNSGLGFSIAGGTDNPHIGDDPGIFITKIIPGGAAAEDGRLRVNDCILRVNEVDVSEVSHSKAVEALKEAGSIVRLYVRRRRPILETVVEIKLFKGPKGLGFSIAGGVGNQHIPGDNSIYVTKIIDGGAAQKDGRLQVGDRLLMVNNYSLEEVTHEEAVAILKNTSEVVYLKVGKPTTIYMTDPYGPPDITHSYSPPMENHLLSGNNGTLEYKTSLPPISPGRYSPIPKHMLVDDDYTRPPEPVYSTVNKLCDKPASPRHYSPVECDKSFLLSAPYSHYHLGLLPDSEMTSHSQHSTATRQPSMTLQRAVSLEGEPRKVVLHKGSTGLGFNIVGGEDGEGIFVSFILAGGPADLSGELQRGDQILSVNGIDLRGASHEQAAAALKGAGQTVTIIAQYQPEGQSELKLIMF

SEQ ID NO: 12151 - protein, 796 aa, Homo sapiens
QCEQAMQHAFIPASPAPIIVNTDTLDTIPYVNGTEIEYEFEEITLERGNSGLGFSIAGGTDNPHIGDDPGIFITKIIPGGAAAEDGRLRVNDCILRVNEVDVSEVSHSKAVEALKEAGSIVRLYVRRRRPILETVVEIKLFKGPKGLGFSIAGGVGNQHIPGDNSIYVTKIIDGGAAQKDGRLQVGDRLLMVNNYSLEEVTHEEAVAILKNTSEVVYLKVGKPTTIYMTDPYGPPDITHSYSPPMENHLLSGNNGTLEYKTSLPPISPGRYSPIPKHMLVDDDYTRPPEPVYSTVNKLCDKPASPRHYSPVECDKSFLLSAPYSHYHLGLLPDSEMTSHSQHSTATRQPSMTLQRAVSLEGEPRKVVLHKGSTGLGFNIVGGEDGEGIFVSFILAGGPADLSGELQRGDQILSVNGIDLRGASHEQAAAALKGAGQTVTIIAQYQPEDYARFEAKIHDLREQMMNHSMSSGSGSLRTNQKRSLYVRAMFDYDKSKDSGLPSQGLSFKYGDILHVINASDDEWWQARRVMLEGDSEEMGVIPSKRRVERKERARLKTVKFNAKPGVIDSKGDIPGLGDDGYGTKTLRGQEDLILSYEPVTRQEINYTRPVIILGPMKDRINDDLISEFPDKFGSCVPHTTRPKRDYEVDGRDYHFVISREQMEKDIQEHKFIEAGQYNDNLYGTSVQSVRFVAERGKHCILDVSGNAIKRLQVAQLYPIAIFIKPRSLEPLMEMNKRLTEEQAKKTYDRAIKLEQEFGEYFTAIVQGDTLEDIYNQCKLVIEEQSGPFIWIPSKEKL

SEQ ID NO: 12152 - protein, 870 aa, Homo sapiens
MFFACYCALRTNVKKYRYQDEDAPHDHSLPRLTHEVRGPELVHVSEKNLSQIENVHGYVLQSHISPLKASPAPIIVNTDTLDTIPYVNGTEIEYEFEEITLERGNSGLGFSIAGGTDNPHIGDDPGIFITKIIPGGAAAEDGRLRVNDCILRVNEVDVSEVSHSKAVEALKEAGSIVRLYVRRRRPILETVVEIKLFKGPKGLGFSIAGGVGNQHIPGDNSIYVTKIIDGGAAQKDGRLQVGDRLLMVNNYSLEEVTHEEAVAILKNTSEVVYLKVGKPTTIYMTDPYGPPDITHSYSPPMENHLLSGNNGTLEYKTSLPPISPGRYSPIPKHMLVDDDYTRPPEPVYSTVNKLCDKPASPRHYSPVECDKSFLLSAPYSHYHLGLLPDSEMTSHSQHSTATRQPSMTLQRAVSLEGEPRKVVLHKGSTGLGFNIVGGEDGEGIFVSFILAGGPADLSGELQRGDQILSVNGIDLRGASHEQAAAALKGAGQTVTIIAQYQPEDYARFEAKIHDLREQMMNHSMSSGSGSLRTNQKRSLYVRAMFDYDKSKDSGLPSQGLSFKYGDILHVINASDDEWWQARRVMLEGDSEEMGVIPSKRRVERKERARLKTVKFNAKPGVIDSKGSFNDKRKKSFIFSRKFPFYKNKEQSEQETSDPERGQEDLILSYEPVTRQEINYTRPVIILGPMKDRINDDLISEFPDKFGSCVPHTTRPKRDYEVDGRDYHFVISREQMEKDIQEHKFIEAGQYNDNLYGTSVQSVRFVAERGKHCILDVSGNAIKRLQVAQLYPIAIFIKPRSLEPLMEMNKRLTEEQAKKTYDRAIKLEQEFGEYFTAIVQGDTLEDIYNQCKLVIEEQSGPFIWIPSKEKL

SEQ ID NO: 12153 - protein, 1142 aa, Homo sapiens
MSGPAQVPMMSPNGSVPPIYVPPGYAPQVIEDNGVRRVVVVPQAPEFHPGSHTVLHRSPHPPLPGFIPVPTMMPPPPRHMYSPVTGAGDMTTQYMPQYQSSQVYGDVDAHSTHGRSNFRDERSSKTYERLQKKLKDRQGTQKDKMSSPPSSPQKCPSPINEHNGLIKGQIAGGINTGSAKIKSGKGKGGTQVDTEIEEKDEETKAFEALLSNIVKPVASDIQARTVVLTWSPPSSLINGETDESSVPELYGYEVLISSTGKDGKYKSVYVGEETNITLNDLKPAMDYHAKVQAEYNSIKGTPSEAEIFTTLSCEPDIPNPPRIANRTKNSLTLQWKAPSDNGSKIQNFVLEWDEGKGNGEFCQCYMGSQKQFKITKLSPAMGCKFRLSARNDYGTSGFSEEVLYYTSGCAPSMPASPVLTKAGITWLSLQWSKPSGTPSDEGISYILEMEEETSGYGFKPKYDGEDLAYTVKNLRRSTKYKFKVIAYNSEGKSNPSEVVEFTTCPDKPGIPVKPSVKGKIHSHSFKITWDPPKDNGGATINKYVVEMAEGSNGNKWEMIYSGATREHLCDRLNPGCFYRLRVYCISDGGQSAVSESLLVQTPAVPPGPCLPPRLQGRPKAKEIQLRWGPPLVDGGSPISCYSVEMSPIEKDEPREVYQGSEVECTVSSLLPGKTYSFRLRAANKMGFGPFSEKCDITTAPGPPDQCKPPQVTCRSATCAQVNWEVPLSNGTDVTEYRLEWGGVEGSMQICYCGPGLSYEIKGLSPATTYYCRVQALSVVGAGPFSEVVACVTPPSVPGIVTCLQEISDDEIENPHYSPSTCLAISWEKPCDHGSEILAYSIDFGDKQSLTVGKVTSYIINNLQPDTTYRIRIQALNSLGAGPFSHMIKLKTKPLPPDPPRLECVAFSHQNLKLKWGEGTPKTLSTDSIQYHLQMEDKNGRFVSLYRGPCHTYKVQRLNESTSYKFCIQACNEAGEGPLSQEYIFTTPKSVPAALKAPKIEKVNDHICEITWECLQPMKGDPVIYSLQVMLGKDSEFKQIYKGPDSSFRYSSLQLNCEYRFRVCAIRQCQDSLGHQDLVGPYSTTVLFISQRTEPPASTNRDTVESTRTRRALSDEQCAAVILVLFAFFSILIAFIIQYFVIK

SEQ ID NO: 12154 - protein, 773 aa, Homo sapiens
MFSKRLEKIPQVPLLFPFIFIILTNYSKMEGAVESQPSFFKTSQDIVTCTWVENCYSSFSRRPLEQMFCKHQSKNIISWTGMVAHTCNPSTLGGQGLCDFAKMHHQQRMAALGTDKELSDLLDFSAMFSPPVSSGKNGPTSLASGHFTGSNVEDRSSSGSWGNGGHPSPSRNYGDGTPYDHMTSRDLGSHDNLSPPFVNSRIQSKTERGSYSSYGRESNLQGCHQQSLLGGDMDMGNPGTLSPTKPGSQYYQYSSNNPRRRPLHSSAMEVQTKKVRKVPPGLPSSVYAPSASTADYNRDSPGYPSSKPATSTFPSSFFMQDGHHSSDPWSSSSGMNQPGYAGMLGNSSHIPQSSSYCSLHPHERLSYPSHSSADINSSLPPMSTFHRSGTNHYSTSSCTPPANGTDSIMANRGSGAAGSSQTGDALGKALASIYSPDHTNNSFSSNPSTPVGSPPSLSAGTAVWSRNGGQASSSPNYEGPLHSLQSRIEDRLERLDDAIHVLRNHAVGPSTAMPGGHGDMHGIIGPSHNGAMGGLGSGYGTGLLSANRHSLMVGTHREDGVALRGSHSLLPNQVPVPQLPVQSATSPDLNPPQDPYRGMPPGLQGQSVSSGSSEIKSDDEGDENLQDTKSSEDKKLDDDKKDIKSITRSRSSNNDDEDLTPEQKAEREKERRMANNARERLRVRDINEAFKELGRMVQLHLKSDKPQTKLLILHQAVAVILSLEQQVRERNLNPKAACLKRREEEKVSSEPPPLSLAGPHPGMGDASNHMGQM

SEQ ID NO: 12155 - protein, 503 aa, Homo sapiens
MEDELEPSLRPRTQIQGRILLLTICAAGIGGTFQFGYNLSIINAPTLHIQEFTNETWQARTGEPLPDHLVLLMWSLIVSLYPLGGLFGALLAGPLAITLGRKKSLLVNNIFVVSAAILFGFSRKAGSFEMIMLGRLLVGVNAGVSMNIQPMYLGESAPKELRGAVAMSSAIFTALGIVMGQVVGLRELLGGPQAWPLLLASCLVPGALQLASLPLLPESPRYLLIDCGDTEACLAALRRLRGSGDLAGELEELEEERAACQGCRARRPWELFQHRALRRQVTSLVVLGSAMELCGNDSVYAYASSVFRKAGVPEAKIQYAIIGTGSCELLTAVVSCVVIERVGRRVLLIGGYSLMTCWGSIFTVALCLQSSFPWTLYLAMACIFAFILSFGIGPAGVTGILATELFDQMARPAACMVCGALMWIMLILVGLGFPFIMEALSHFLYVPFLGVCVCGAIYTGLFLPETKGKTFQEISKELHRLNFPRRAQGPTWRSLEVIQSTEL

SEQ ID NO: 12156 - protein, 526 aa, Homo sapiens
MAAGETQLYAKVSNKLKSRSSPSLLEPLLAMGFPVHTALKALAATGRKTAEEALAWLHDHCNDPSLDDPIPQEYALFLCPTGPLLEKLQEFWRESKRQCAKNRAHEVFPHVTLCDFFTCEDQKVECLYEALKRAGDRLLGSFPTAVPLALHSSISYLGFFVSGSPADVIREFAMTFATEASLLADCSVKPCTKQLHLTLAHKFYPHHQRTLEQLARAIPLGHSCQWTAALYSRDMRFVHYQTLRALFQYKPQNVDELTLSPGDYIFVDPTQQDEASEGWVIGISQRTGCRGFLPENYTDRASESDTWVKHRMYTFSLATDLNSRKDGEASSRCSGEFLPQTARSLSSLQALQATVARKSVLVVRHGERVDQIFGKAWLQQCSTPDGKYYRPDLNFPCSLPRRSRGIKDFENDPPLSSCGIFQSRIAGDALLDSGIRISSVFASPALRCVQTAKLILEELKLEKKIKIRVEPGIFEWTKWEAGKTTPTLMSLEELKEANFNIDTDYRSLPWACASVKKIKRKENGSW

SEQ ID NO: 12157 - protein, 344 aa, Homo sapiens
MGENDPPAVEAPFSFRSLFGLDDLKISPVAPDADAVAAQILSLLPLKFFPIIVIGIIALILALAIGLGIHFDCSGKYRCRSSFKCIELIARCDGVSDCKDGEDEYRCVRVGGQNAVLQVFTAASWKTMCSDDWKGHYANVACAQLGFPSYVSSDNLRVSSLEGQFREEFVSIDHLLPDDKVTALHHSVYVREGCASGHVVTLQCTACGHRRGYSSRIVGGNMSLLSQWPWQASLQFQGYHLCGGSVITPLWIITAAHCVYDLYLPKSWTIQVGLVSLLDNPAPSHLVEKIVYHSKYKPKRLGNDIALMKLAGPLTFNGTSGSLCGSAALPLFQEDLQLLIEAFL

SEQ ID NO: 12158 - protein, 451 aa, Homo sapiens
MGENDPPAVEAPFSFRSLFGLDDLKISPVAPDAVAAQILSLLPLKFFPIIVIGIIALILALAIGLGIHFDCSGKYRCRSSFKCIELIARCDGVSDCKDGEDEYRCVRVGGQNAVLQVFTAASWKTMCSDDWKGHYANVACAQLGFPSYVSSDNLRVSSLEGQFREEFVSIDHLLPDDKVTALHHSVYVREGCASGHVVTLQCTACGHRRGYSSRIVGGNMSLLSQWPWQASLQFQGYHLCGGSVITPLWIITAAHCVYDLYLPKSWTIQVGLVSLLDNPAPSHLVEKIVYHSKYKPKRLGNDIALMKLAGPLTFNEMIQPVCLPNSEENFPDGKVCWTSGWGATEDGGDASPVLNHAAVPLISNKICNHRDVYGGIISPSMLCAGYLTGGVDSCQGDSGGPLVCQERRLWKLVGATSFGIGCAEVNKPGVYTRVTSFLDWIHEQMERDLKT

SEQ ID NO: 12159 - protein, 400 aa, Homo sapiens
MSALEKSMHLGRLPSRPPLPGSGGSQSGAKMRMGPGRKRDFSPVPWSQYFESMEDVEVENETGKDTFRVYKSGSEGPVLLLLHGGGHSALSWAVFTAAIISRVQCRIVALDLRSHGETKVKNPEDLSAETMAKDVGNVVEAMYGDLPPPIMLIGHSMGGAIAVHTASSNLVPSLLGLCMIDVVEGTAMDALNSMQNFLRGRPKTFKSLENAIEWSVKSGQIRNLESARVSMVGQVKQCEGITSPEGSKSIVEGIIEEEEEDEEGSESISKRKKEDDMEGLPSETQNLLLFLQTKKDHPYTWRIELAKTEKYWDGWFRGLSNLFLSCPIPKLLLLAGVDRLDKDLTIGQMQGKFQMQVLPQCGHAVHEDAPDKVAEAVATFLIRHRFAEPIGGFQCVFPGC

SEQ ID NO: 12160 - protein, 916 aa, Homo sapiens
MKIATVSVLLPLALCLIQDAASKNEDQEMCHEFQAFMKNGKLFCPQDKKFFQSLDGIMFINKCATCKMILEKEAKSQKRARHLARAPKATAPTELNCDDFKKGERDGDFICPDYYEAVCGTDGKTYDNRCALCAENAKTGSQIGVKSEGECKSSNPEQDVCSAFRPFVRDGRLGCTRENDPVLGPDGKTHGNKCAMCAELFLKEAENAKREGETRIRRNAEKDFCKEYEKQVRNGRLFCTRESDPVRGPDGRMHGNKCALCAEIFKQRFSEENSKTDQNLGKAEEKTKVKREIVKLCSQYQNQAKNGILFCTRENDPIRGPDGKMHGNLCSMCQAYFQAENEEKKKAEARARNKRESGKATSYAELCSEYRKLVRNGKLACTRENDPIQGPDGKVHGNTCSMCEVFFQAEEEEKKKKEGKSRNKRQSKSTASFEELCSEYRKSRKNGRLFCTRENDPIQGPDGKMHGNTCSMCEAFFQQEERARAKAKREAAKEICSEFRDQVRNGTLICTREHNPVRGPDGKMHGNKCAMCASVFKLEEEEKKNDKEEKGKVEAEKVKREAVQELCSEYRHYVRNGRLPCTRENDPIEGLDGKIHGNTCSMCEAFFQQEAKEKERAEPRAKVKREAEKETCDEFRRLLQNGKLFCTRENDPVRGPDGKTHGNKCAMCKAVFQKENEERKRKEEEDQRNAAGHGSSGGGGGNTQDECAEYREQMKNGRLSCTRESDPVRDADGKSYNNQCTMCKAKLEREAERKNEYSRSRSNGTGSESGKDTCDEFRSQMKNGKLICTRESDPVRGPDGKTHGNKCTMCKEKLEREAAEKKKKEDEDRSNTGERSNTGERSNDKEDLCREFRSMQRNGKLICTRENNPVRGPYGKMHINKCAMCQSIFDREANERKKKDEEKSSSKPSNNAKVIY

SEQ ID NO: 12161 - protein, 724 aa, Homo sapiens
MLLFVEQVASKGTGLNPNAKVWQEIAPGNTDATPVTHGTESSWHEIAATSGAHPEGNAELSEDICKEYEVMYSSSCETTRNTTGIEESTDGMILGPEDLSYQIYDVSGESNSAVSTEDLKECLKKQLEFCFSRENLSKDLYLISQMDSDQFIPIWTVANMEEIKKLTTDPDLILEVLRSSPMVQVDEKGEKVRPSHKRCIVILREIPETTPIEEVKGLFKSENCPKVISCEFAHNSNWYITFQSDTDAQQAFKYLREEVKTFQGKPIMARIKAINTFFAKNGYRLMDSSIYSHPIQTQAQYASPVFMQPVYNPHQQYSVYSIVPQSWSPNPTPYFETPLAPFPNGSFVNGFNSPGSYKTNAAAMNMGRPFQKNRVKPQFRSSGGSEHSTEGSVSLGDGQLNRYSSRNFPAERHNPTVTGHQEQTYLQKETSTLQVEQNGDYGRGRRTLFRGRRRREDDRISRPHPSTAESKAPTPKFDLLASNFPPLPGSSSRMPGELVLENRMSDVVKGVYKEKDNEELTISCPVPADEQTECTSAQQLNMSTSSPCAAELTALSTTQQEKDLIEDSSVQKDGLNQTTIPVSPPSTTKPSRASTASPCNNNINAATAVALQEPRKLSYAEVCQKPPKEPSSVLVQPLRELRSNVVSPTKNEDNGAPENSVEKPHEKPEARASKDYSGFRGNIIPRGAAGKIREQRRQFSHRAIPQGVTRRNGKEQYVPPRSPK

SEQ ID NO: 12162 - protein, 534 aa, Homo sapiens
MKFTLGLGSRAWRVSWEGAAAAAAGPGAGGSALRCRAQRVSSPRLGRRGSRLSGALPLCLSRGGGGAQALPDCAGPSPGHPGHPGARQLAGPLAMEQTYGEVNQLGGVFVNGRPLPNAIRLRIVELAQLGIRPCDISRQLRVSHGCVSKILARYNETGSILPGAIGGSKPRVTTPNVVKHIRDYKQGDPGIFAWEIRDRLLADGVCDKYNVPSVSSISRILRNKIGSLAQPGPYEASKQPPSQPTLPYNHIYQYPYPSPVSPTGAKMGSHPGVPGTAGHVSIPRSWPSAHSVSNILGIRTFMEQTGALAGSEGTAYSPKMEDWAGVNRTAFPATPAVNGLEKPALEADIKYTQSASTLSAVGGFLPACAYPASNQHGVYSAPGGGYLAPGPPWPPAQGPPLAPPGAGVAVHGGELAAAMTFKHPSREGSLPAPAARPRTPSVAYTDCPSRPRPPRGSSPRTRARRERQADPGAQVCAAAPAIGTGRIGGLAEEEASAGPRGARPASPQAQPCLWPDPPHFLYWSGFLGFSELGF

SEQ ID NO: 12163 - protein, 865 aa, Homo sapiens
MEGLLHYINPAHAISLLSALNEERLKGQLCDVLLIVGDQKFRAHKNVLAASSEYFQSLFTNKENESQTVFQLDFCEPDAFDNVLNYIYSSSLFVEKSSLAAVQELGYSLGISFLTNIVSKTPQAPFPTCPNRKKVFVEDDENSSQKRSVIVCQSRNEAQGKTVSQNQPDVSHTSRPSPSIAVKANTNKPHVPKPIEPLHNLSLTEKSWPKDSSVVYAKSLEHSGSLDDPNRISLVKRNAVLPSKPLQDREAMDDKPGVSGQLPKGKALELALKRPRPPVLSVCSSSETPYLLKETNKGNGQGEDRNLLYYSKLGLVIPSSGSGSGNQSIDRSGPLVKSLLRRSLSMDSQVPVYSPSIDLKSSQGSSSVSSDAPGNVLCALSQKSSLKDCSEKTALDDRPQVLQPHRLRSFSASQSTDREGASPVTEVRIKTEPSSPLSDPSDIIRVTVGDAATTAAASSSSVTRDLSLKTEDDQKDMSRLPAKRRFQADRRLPFKKLKVNEHGSPVSEDNFEEGSSPTLLDADFPDSDLNKDEFEQGSHERLCRNAAVCPYCSLRFFSPELKQEHESKCEYKKLTCLECMRTFKSSFSIWRHQVEVHNQNNMAPTENFSLPVLDHNGDVTGSSRPQSQPEPNKVNHIVTTKDDNVFSDSSEQVNFDSEDSSCLPEDLSLSKQLKIQVKEEPVEEAEEEAPEASTAPKEAGPSKEASLWPCEKCGKMFTVHKQLERHQELLCSVKPFICHVCNKAFRTNFRLWSHFQSHMSQASEESAHKESEVCPVPTNSPSPPPLPPPPPLPKIQPLEPDSPTGLSENPTPATEKLFVPQESDTLFYHAPPLSAITFKRQFMCKLCHRTFKTAFSLWSHEQTHN

SEQ ID NO: 12164 - protein, 463 aa, Homo sapiens
MQYDDLPHYGGMDGVGIPSTMYGDPHAARSMQPVHHLNHGPPLHSHQYPHTAHTNAMAPSMGSSVNDALKRDKDAIYGHPLFPLLALIFEKCELATCTPREPGVAGGDVCSSESFNEDIAVFAKQIRAEKPLFSSNPELDNLMIQAIQVLRFHLLELEKVHELCDNFCHRYISCLKGKMPIDLVIDDREGGSKSDSEDITRSANLTDQPSWNRDHDDTASTRSGGTPGPSSGGHTSHSGDNSSEQGDGLDNSVASPSTGDDDDPDKDKKRHKKRGIFPKVATNIMRAWLFQHLTHPYPSEEQKKQLAQDTGLTILQVNNWFINARRRIVQPMIDQSNRAVSQGTPYNPDGQPMGGFVMDGQQHMGIRAPGLQSMPGEYVARGGPMGVSMGQPSYTQPQMPPHPAQLRHGPPMHTYIPGHPHHPTVMMHGGPPHPGMPMSASSPTVLNTGDPTMSGQVMDIHAQ

SEQ ID NO: 12165 - protein, 2897 aa, Homo sapiens
MTDPMMDFFDDANLFGETLEGLSDDAFVQPGPVSLVDELNLGAEFEPLHIDSLNHVQGTPTHQKMTDFEQLNQFDSIKFHHVNQSFGSPAEHVLSPHSQFNCSPIHPQNQPNGLFPDVSDGSPMWGHQTATTISNQNGSPFHQQGHSHSMHQNKSFVAHHDFALFQANEQQTQCTSLRSQQNRNNLNPGQNSLSQSKNFMNVSGPHRVNVNHPPQMTNASNSQQSISMQQFSQTSNPSAHFHKCSSHQEGNFNGPSPNMTSCSVSNSQQFSSHYSFSSNHISPNSLLQSSAVLASNHTNQTLSDFTGSNSFSPHRGIKQESTQHILNPNTSLNSNNFQILHSSHPQGNYSNSKLSPVHMNFPDPVDSGTQMGHFNDHVETNGFSSLEENLLHQVESQTEPFTGLDPEDLLQEGLLPHFDESTFGQDNSSHILDHDLDRQFTSHLVTRPSDMAQTQLQSQARSWHSSFSNHQHLHDRNHLCLQRQPPSSKKSDGSGTYTKLQNTQVRVMSEKKQRKKVESESKQEKANRIISEAIAKAKERGERNIPRVMSPENFPTASVEGKEEKKGRRMKSKPKDKDSKKTKTCSKLKEKTKIGKLIITLGKKQKRKNESSDEISDAEQMPQHTLKDQDSQKRRSNRQIKRKKYAEDIEGKQSEEEVKGSMKIKKNSAPLPGEQPLQLFVENPSEEDAAIVDKILSSRTVKKEISPGVMIDTEEFFVKYKNYSYLHCEWATEEQLLKDKRIQQKIKRFKLRQAQRAHFFADMEEEPFNPDYVEVDRVLEVSFCEDKDTGEPVIYYLVKWCSLPYEDSTWELKEDVDLAKIEEFEQLQASRPDTRRLDRPPSNIWKKIDQSRDYKNGNQLREYQLEGLNWLLFNWYNRRNCILADEMGLGKTIQSITFLYEILLTGIRGPFLIIAPLSTIANWEREFRTWTDINVVVYHGSLISRQMIQQYEMYFRDSQGRIIRGAYRFQAIITTFEMILGGCGELNAIEWRCVIIDEAHRLKNKNCKLLEGLKLMNLEHKVLLTGTPLQNTVEELFSLLHFLEPLRFPSESTFMQEFGDLKTEEQVQKLQAILKPMMLRRLKEDVEKKLAPKEETIIEVELTNIQKKYYRAILEKNFSFLSKGAGQTNVPNLVNTMMELRKCCNHPYLIKGAEEKILGEFRDTYNPAASDFHLQAMIQSAGKLVLIDKLLPKMKAGGHKVLIFSQMVRCLDILEDYLIHKRYLYERIDGRVRGNLRQAAIDRFSKPDSDRFVFLLCTRAGGLGINLTAADTCIIFDSDWNPQNDLQAQARCHRIGQNKAVKVYRLVTRNSYEREMFDRASLKLGLDKAVLQSMSGRESNVGGIQQLSKKEIEDLLRRGAYGAIMEEEDEGSKFCEEDIDQILLRRTKTITIESEGRGSTFAKASFVASGNRTDISLDDPNFWQKWAKKAEIDIEAISGRNSLVIDTPRIRKQTRPFSATKDELAELSEAESEGDEKPKLRRPCDRSNGYGRTECFRVEKNLLVYGWGRWREILSHGRFKRQLNEHDVEIICRALLAYCLVHYRGDEKIKGFIWDLITPTEDGQTRELQNHLGLSAPVPRGRKGKKVKTQTSSFDIQKAEWLRKYNPEQLLQDEGYKKHIKHHCNKVLLRVRMLYYLKQEVIGNECQKVFDGVDASDIDVWVPEPDHSEVPAEWWDFDADKSLLIGVFKHGYEKYNTIRADPALCFLERVGKPDEKAVAAEQRANDYMDGDVEDPEYKPAPAIFKDDIEDDVSSPGDLVIADGDGQLMEGDKVYWPTQSALTTRLRRLITAYQRTNKNRQIQQIQPTFSVPTSVMQPIYEEATLNPKMAAKIERQQRWTRREEADFYRVVSTFGVVFDPDRGQFDWTKFRAMARLHKKTDDSLEKYLYAFMSMCRRVCRLPSKEELVDPNIFIQPITEERASRTLYRIELLRKVREQALRHPQLFERLKLCHPNPDLPVWWECGPHDRDLLIGAAKHGVSRTDYHILRDPELSFMAAQRNYSQSKMAHSRTSTPLLQQYQVALSASPLTSLPRLLDAKGIILEEMKVKSENLKEEPQSSEEESMSSVETRTLIKSEPVSPKNGVLPQATGDQKSGGKCETDRRMVAARTEPLTPNPASKKPRVHKRGSESSSDSDSDSERSSCSSRSSSSSSSSSCSHSRSGSSSSSSSSCSSASSSSSSSTSSSSSSSSSSSEESDSDEEEAQKRESTTHMKAYDEESVASLSTTQDETQDSFQMNNGTPESAYILQGGYMLAASYWPKDRVMINRLDSICQTVLKGKWPSARRSYDANTVASFYTTKLLDSPGAATEYSDPSVPTPPGAGVKEEHDQSTQMSKVKKHVREKEFTVKIKDEGGLKLTFQKQGLAQKRPFDGEDGALGQQQYLTRLRELQSASETSLVNFPKSIPVSGTSIQPTLGANGVILDNQPIVKKRRGRRKNVEGVDIFFFNRNKPPNHVSLGLTSSQISTGINPALSYTQPQGIPDTESPVPVINLKDGTRLAGDDAPKRKDLEKWLKEHPGYVEDLGAFIPRMQLHEGRPKQKRHRCRNPNKLDVNSLTGEERVQLINRRNARKVGGAFAPPLKDLCRFLKENSEYGVAPEWGDVVKQSGFLPESMYERILTGPVVREEVSRRGRRPKSGIAKATAAAAAASATSVSGNPLLANGLLPGVDLTTLQALQQNLQNLQSLQVTAGLMGMPTGLPSGGEAKNMAAMFPMLLSGMAGLPNLLGMGGLLTKPTESGTEDKKGSDSKESEGKTERTESQSSENGGENSVSSSPSTSSTAALNTAAAANPLALNPLLLSNILYPGMLLTPGLNLHIPTLSQSNTFDVQNKNSDLGSSKSVEVKEEDSRIKDQEDKGGTEPSPLNENSTDEGSEKADASSGSDSTSSSSEDSDSSNED

SEQ ID NO: 12166 - protein, 224 aa, Homo sapiens
MDESPEPLQQGRGPVPVRRQRPAPRGLREMLKARLWCSCSCSVLCVRALVQDLLPATRWLRQYRPREYLAGDVMSGLVIGIILVPQAIAYSLLAGLQPIYSLYTSFFANLIYFLMGTSRHVSVGIFSLLCLMVGQVVDRELQLAGFDPSQDGLQPGANSSTLNGSAAMLDCGRDCYAIRVATALTLMTGLYQTSWGRNSFQQHPWQLTQRSDSQELLEEEERSC

SEQ ID NO: 12167 - protein, 407 aa, Homo sapiens
MGANTSRKPPVFDENEDVNFDHFEILRAIGKGSFGKVCIVQKNDTKKMYAMKYMNKQKCVERNEVRNVFKELQIMQGLEHPFLVNLWYSFQDEEDMFMVVDLLLGGDLRYHLQQNVHFKEETVKLFICELVMALDYLQNQRIIHRDMKPDNILLDEHGHVHITDFNIAAMLPRETQITTMAGTKPYMAPEMFSSRKGAGYSFAVDWWSLGVTAYELLRGRRPYHIRSSTSSKEIVHTFETTVVTYPSAWSQEMVSLLKKLLEPNPDQRFSQLSDVQNFPYMNDINWDAVFQKRLIPGFIPNKGRLNCDPTFELEEMILESKPLHKKKKRLAKKEKDMRKCDSSQTCLLQEHLDSVQKEFIIFNREKVNRDFNKRQPNLALEQTKDPQVTNGQMDTGLSETFQTSKVS

SEQ ID NO: 12168 - protein, 614 aa, Homo sapiens
MTMRSAVFKAAAAPAGGNPEQRLDYERAAALGGPEDEPGAAEAHFLPRHRKLKEPGPPLASSQGGSPAPSPAGCGGKGRGLLLPAGAAPGQQEESWGGSVPLPCPPPATKQAGIGGEPAAAGAGCSPRPKYQAVLPIQTGSLVAAAKEPTPWAGDKGGAASPAATASDPAGPPPLPLPGPPPLAPTATAGTLAASEGRWKSMRKSPLGGGGGSGASSQAACLKQILLLQLDLIEQQQQQLQAKEKEIEELKSERDTLLARIERMERRMQLVKKDNEKERHKLFQGYETEEREETELSEKIKLECQPELSETSQTLPPKPFSCGRSGKGHKRKSPFGSTERKTPVKKLAPEFSKVKTKTPKHSPIKEEPCGSLSETVCKRELRSQETPEKPRSSVDTPPRLSTPQKGPSTHPKEKAFSSEIEDLPYLSTTEMYLCRWHQPPPSPLPLRESSPKKEETVARCLMPSSVAGETSVLAVPSWRDHSVEPLRDPNPSDLLENLDDSVFSKRHAKLELDEKRRKRWDIQRIREQRILQRLQLRMYKKKGIQESEPEVTSFFPEPDDVESLMITPFLPVVAFGRPLPKLTPQNFELPWLDERSRCRLEIQKKQTPHRTCRK

SEQ ID NO: 12169 - protein, 1554 aa, Homo sapiens
MTPACPLLLSVILSLRLATAFDPAPSACSALASGVLYGAFSLQDLFPTIASGCSWTLENPDPTKYSLYLRFNRQEQVCAHFAPRLLPLDHYLVNFTCLRPSPEEAVAQAESEVGRPEEEEAEAAAGLELCSGSGPFTFLHFDKNFVQLCLSAEPSEAPRLLAPAALAFRFVEVLLINNNNSSQFTCGVLCRWSEECGRAAGRACGFAQPGCSCPGEAGAGSTTTTSPGPPAAHTLSNALVPGGPAPPAEADLHSGSSNDLFTTEMRYGEEPEEEPKVKTQWPRSADEPGLYMAQTGDPAAEEWSPWSVCSLTCGQGLQVRTRSCVSSPYGTLCSGPLRETRPCNNSATCPVHGVWEEWGSWSLCSRSCGRGSRSRMRTCVPPQHGGKACEGPELQTKLCSMAACPVEGQWLEWGPWGPCSTSCANGTQQRSRKCSVAGPAWATCTGALTDTRECSNLECPATDSKWGPWNAWSLCSKTCDTGWQRRFRMCQATGTQGYPCEGTGEEVKPCSEKRCPAFHEMCRDEYVMLMTWKKAAAGEIIYNKCPPNASGSASRRCLLSAQGVAYWGLPSFARCISHEYRYLYLSLREHLAKGQRMLAGEGMSQVVRSLQELLARRTYYSGDLLFSVDILRNVTDTFKRATYVPSADDVQRFFQVVSFMVDAENKEKWDDAQQVSPGSVHLLRVVEDFIHLVGDALKAFQSSLIVTDNLVISIQREPVSAVSSDITFPMRGRRGMKDWVRHSEDRLFLPKEVLSLSSPGKPATSGAAGSPGRGRGPGTVPPGPGHSHQRLLPADPDESSYFVIGAVLYRTLGLILPPPRPPLAVTSRVMTVTVRPPTQPPAEPLITVELSYIINGTTDPHCASWDYSRADASSGDWDTENCQTLETQAAHTRCQCQHLSTFAVLAQPPKDLTLELAGSPSVPLVIGCAVSCMALLTLLAIYAAFWRFIKSERSIILLNFCLSILASNILILVGQSRVLSKGVCTMTAAFLHFFFLSSFCWVLTEAWQSYLAVIGRMRTRLVRKRFLCLGWGLPALVVAVSVGFTRTKGYGTSSYCWLSLEGGLLYAFVGPAAVIVLVNMLIGIIVFNKLMARDGISDKSKKQRAGSERCPWASLLLPCSACGAVPSPLLSSASARNAMASLWSSCVVLPLLALTWMSAVLAMTDRRSVLFQALFAVFNSAQGFVITAVHCFLRREVQDVVKCQMGVCRADESEDSPDSCKNGQLQILSDFEKDVDLACQTVLFKEVNTCNPSTITGTLSRLSLDEDEEPKSCLVGPEGSLSFSPLPGNILVPMAASPGLGEPPPPQEANPVYMCGEGGLRQLDLTWLRPTEPGSEGDYMVLPRRTLSLQPGGGGGGGEDAPRARPEGTPRRAAKTVAHTEGYPSFLSVDHSGLGLGPAYGSLQNPYGMTFQPPPPTPSARQVPEPGERSRTMPRTVPGSTMKMGSLERKKLRYSDLDFEKVMHTRKRHSELYHELNQKFHTFDRYRSQSTAKDKPSPGERPSLSQHRRHQSWSTFKSMTLGSLPPKPRERLTLHRAAAWEPTEPPDGDFQTEV

SEQ ID NO: 12170 - protein, 1034 aa, Homo sapiens
MASVFMCGVEDLLFSGSRFVWNLTVSTLRRWYTERLRACHQVLRTWCGLQDVYQMTEGRHCQVHLLDDRRLELLVQPKLLARELLDLVASHFNLKEKEYFGITFIDDTGQQNWLQLDHRVLDHDLPKKPGPTILHFAVRFYIESISFLKDKTTVELFFLNAKACVHKGQIEVESETIFKLAAFILQEAKGDYTSDENARKDLKTLPAFPTKTLQEHPSLAYCEDRVIEHYLKIKGLTRGQAVVQYMKIVEALPTYGVHYYAVKDKQGLPWWLGISYKGIGQYDIQDKVKPRKLFQWKQLENLYFREKKFAVEVHDPRRISVSRRTFGQSGLFVQTWYANSSLIKSIWVMAISQHQFYLDRKQSKAKIPSARSLDEIAMDLTETGTQRASKLVTLETKSQFIMASNGSLISSGSQDSEVSEEQKREKILELKKKEKLLQEKLLKKVEELKKICLREAELTGKMPKEYPLNIGEKPPQVRRRVGTAFKLDDNLLPSEEDPALQELESNFLIQQKLVEAAKKLANEPDLCKTVKKKRKQDYTDAMKKLQEIENAINEYRIRCGKKPSQKATVLPEDIIPSESSSLSDTTTYDDPSDAFTFPGQRSSSVPHSPRILPPKSLGIERIHFRKSSINEQFVDTRQSREMLSTHSSPYKTLERRPQGGRSMPTTPVLTRNAYSSSHLEPESSSQHCRQRSGSLESQSHLLSEMDSDKPFFSLSKSQRSSSTEILDDGSSYTSQSSTEYYCVTPVTGPYYTTQTLDTRTRGRRRSKKQNVSTSNSGSMPNLAQKDSLRNGVYSKSQEPPSSSYYIAGYTPYAECDFYYSGGYVYENDTEGQYSVNPSYRSSAHYGYERQRDYSRSFHEDEVDRVPHNPYATLRLPRKAAAKSEHITKNIHKALVAEHLRGWYQRASGQKDQGHSPQTSFDSDRGSQRCLGFAGLQVPCSPSSRASSYSSVSSTNASGNWRTQLTIGLSDYETPAHSSYTSCYGNVYNPLPSPSRQYTEISQLDGTDGNQLEDNLESSEQRLFWHEDSKPGTLV

SEQ ID NO: 12171 - protein, 1466 aa, Homo sapiens
MTPACPLLLSVILSLRLATAFDPAPSACSALASGVLYGAFSLQDLFPTIASGCSWTLENPDPTKYSLYLRFNRQEQVCAHFAPRLLPLDHYLVNFTCLRPSPEEAVAQAESEVGRPEEEEAEAAAGLELCSGSGPFTFLHFDKNFVQLCLSAEPSEAPRLLAPAALAFRFVEVLLINNNNSSQFTCGVLCRWSEECGRAAGRACGFAQPGCSCPGEAGAGSTTTTSPGPPAAHTLSNALVPGGPAPPAEADLHSGSSNDLFTTEMRYGEEPEEEPKVKTQWPRSADEPGLYMAQTGDPAAEEWSPWSVCSLTCGQGLQVRTRSCVSSPYGTLCSGPLRETRPCNNSATCPVEGQWLEWGPWGPCSTSCANGTQQRSRKCSVAGPAWATCTGALTDTRECSNLECPATDSKWGPWNAWSLCSKTCDTGWQRRFRMCQATGTQGYPCEGTGEEVKPCSEKRCPAFHEMCRDEYVMLMTWKKAAAGEIIYNKCPPNASGSASRRCLLSAQGVAYWGLPSFARCISHEYRYLYLSLREHLAKGQRMLAGEGMSQVVRSLQELLARRTYYSGDLLFSVDILRNVTDTFKRATYVPSADDVQRFFQVVSFMVDAENKEKWDDAQQVSPGSVHLLRVVEDFIHLVGDALKAFQSSLIVTDNLVISIQREPVSAVSSDITFPMRGRRGMKDWVRHSEDRLFLPKEVLSLSSPGKPATSGAAGSPGRGRGPGTVPPGPGHSHQRLLPADPDESSYFVIGAVLYRTLGLILPPPRPPLAVTSRVMTVTVRPPTQPPAEPLITVELSYIINGTTDPHCASWDYSRADASSGDWDTENCQTLETQAAHTRCQCQHLSTFAVLAQPPKDLTLELAGSPSVPLVIGCAVSCMALLTLLAIYAAFWRFIKSERSIILLNFCLSILASNILILVGQSRVLSKGVCTMTAAFLHFFFLSSFCWVLTEAWQSYLAVIGRMRTRLVRKRFLCLGWGLPALVVAVSVGFTRTKGYGTSSYCWLSLEGGLLYAFVGPAAVIVLVNMLIGIIVFNKLMARDGISDKSKKQRAGASLWSSCVVLPLLALTWMSAVLAMTDRRSVLFQALFAVFNSAQGFVITAVHCFLRREVQDVVKCQMGVCRADESEDSPDSCKNGQLQILSDFEKDVDLACQTVLFKEVNTCNPSTITGTLSRLSLDEDEEPKSCLVGPEGSLSFSPLPGNILVPMAASPGLGEPPPPQEANPVYMCGEGGLRQLDLTWLRPTEPGSEGDYMVLPRRTLSLQPGGGGGGGEDAPRARPEGTPRRAAKTVAHTEGYPSFLSVDHSGLGLGPAYGSLQNPYGMTFQPPPPTPSARQVPEPGERSRTMPRTVPGSTMKMGSLERKKLRYSDLDFEKVMHTRKRHSELYHELNQKFHTFDRYRSQSTAKDKPSPGERPSLSQHRRHQSWSTFKSMTLGSLPPKPRERLTLHRAAAWEPTEPPDGDFQTEV

SEQ ID NO: 12172 - protein, 587 aa, Homo sapiens
MFSSLHSALLTDSFIILSFLAQNKLCFIQFTKKMESSDVNKRLEKLSALDYKIFYYEIPGPINKTTERHLAINCVHDRVVCWWPLVNDDAWPWAPISSEKDRANLLLLGYAQGRLEVLSSVRTEWDPLDVRFGTKQPYQVFTVEHSVSVDKEPMADSCIYECIRNKIQCVSVTRIPLKSKAISCCRNVTEDKLILGCEDSSLILYETHRRVTLLAQTELLPSLISCHPSGAILLVGSNQGELQIFDMALSPINIQLLAEDRLPRETLQFSKLFDASSSLVQMQWIAPQVVSQKGEGSDIYDLLFLRFERGPLGVLLFKLGVFTRGQLGLIDIIFQYIHCDEIYEAINILSSMNWDTLGHQCFISMSAIVNHLLRQKLTPEREAQLETSLGTFYAPTRPLLDSTILEYRDQISKYARRFFHHLLRYQRFEKAFLLAVDVGARDLFMDIHYLALDKGELALAEVARKRASDIDAESITSGVELLGPLDRGDMLNEAFIGLSLAPQGEDSFPDNLPPSCPTHRHILQQRILNGSSNRQIIDRRNELEKDICSGFLMTNTCNAEDGELREDGREQEIRDGGSLKMIHFGLV

SEQ ID NO: 12173 - protein, 514 aa, Homo sapiens
MYSQRFGTVQREVKGPTPKVVIVRSKPPKGQGAEHHLERIRRSHQKHNAILASIKSSERDRLKAEWDQHNDCKILDSLVRARIKDAVQGFIINIEERRNKLRELLALEENEYFTEMQLKKETIEEKKDRMREKTKLLKEKNEKERQDFVAEKLDQQFRERCEELRVELLSIHQKKVCEERKAQIAFNEELSRQKLVEEQMFSKLWEEDRLAKEKREAQEARRQKELMENTRLGLNAQITSIKAQRQATQLLKEEEARLVESNNAQIKHENEQDMLKKQKAKQETRTILQKALQERIEHIQQEYRDEQDLNMKLVQRALQDLQEEADKKKQKREDMIREQKIYHKYLAQRREEEKAQEKEFDRILEEDKAKKLAEKDKELRLEKEARRQLVDEVMCTRKLQVQEKLQREAKEQEERAMEQKHINESLKELNCEEKENFARRQRLAQEYRKQLQMQIAYQQQSQEAEKEEKRREFEAGVAANKMCLDKVQEVLSTHQVLPQNIHPMRKACPSKLPP

SEQ ID NO: 12174 - protein, 1499 aa, Homo sapiens
MTPACPLLLSVILSLRLATAFDPAPSACSALASGVLYGAFSLQDLFPTIASGCSWTLENPDPTKYSLYLRFNRQEQVCAHFAPRLLPLDHYLVNFTCLRPSPEEAVAQAESEVGRPEEEEAEAAAGLELCSGSGPFTFLHFDKNFVQLCLSAEPSEAPRLLAPAALAFRFVEVLLINNNNSSQFTCGVLCRWSEECGRAAGRACGFAQPGCSCPGEAGAGSTTTTSPGPPAAHTLSNALVPGGPAPPAEADLHSGSSNDLFTTEMRYGEEPEEEPKVKTQWPRSADEPGLYMAQTVHGVWEEWGSWSLCSRSCGRGSRSRMRTCVPPQHGGKACEGPELQTKLCSMAACPVEGQWLEWGPWGPCSTSCANGTQQRSRKCSVAGPAWATCTGALTDTRECSNLECPATDSKWGPWNAWSLCSKTCDTGWQRRFRMCQATGTQGYPCEGTGEEVKPCSEKRCPAFHEMCRDEYVMLMTWKKAAAGEIIYNKCPPNASGSASRRCLLSAQGVAYWGLPSFARCISHEYRYLYLSLREHLAKGQRMLAGEGMSQVVRSLQELLARRTYYSGDLLFSVDILRNVTDTFKRATYVPSADDVQRFFQVVSFMVDAENKEKWDDAQQVSPGSVHLLRVVEDFIHLVGDALKAFQSSLIVTDNLVISIQREPVSAVSSDITFPMRGRRGMKDWVRHSEDRLFLPKEVLSLSSPGKPATSGAAGSPGRGRGPGTVPPGPGHSHQRLLPADPDESSYFVIGAVLYRTLGLILPPPRPPLAVTSRVMTVTVRPPTQPPAEPLITVELSYIINGTTDPHCASWDYSRADASSGDWDTENCQTLETQAAHTRCQCQHLSTFAVLAQPPKDLTLELAGSPSVPLVIGCAVSCMALLTLLAIYAAFWRFIKSERSIILLNFCLSILASNILILVGQSRVLSKGVCTMTAAFLHFFFLSSFCWVLTEAWQSYLAVIGRMRTRLVRKRFLCLGWGLPALVVAVSVGFTRTKGYGTSSYCWLSLEGGLLYAFVGPAAVIVLVNMLIGIIVFNKLMARDGISDKSKKQRAGSERCPWASLLLPCSACGAVPSPLLSSASARNAMASLWSSCVVLPLLALTWMSAVLAMTDRRSVLFQALFAVFNSAQGFVITAVHCFLRREVQDVVKCQMGVCRADESEDSPDSCKNGQLQILSDFEKDVDLACQTVLFKEVNTCNPSTITGTLSRLSLDEDEEPKSCLVGPEGSLSFSPLPGNILVPMAASPGLGEPPPPQEANPVYMCGEGGLRQLDLTWLRPTEPGSEGDYMVLPRRTLSLQPGGGGGGGEDAPRARPEGTPRRAAKTVAHTEGYPSFLSVDHSGLGLGPAYGSLQNPYGMTFQPPPPTPSARQVPEPGERSRTMPRTVPGSTMKMGSLERKKLRYSDLDFEKVMHTRKRHSELYHELNQKFHTFDRYRSQSTAKDKPSPGERPSLSQHRRHQSWSTFKSMTLGSLPPKPRERLTLHRAAAWEPTEPPDGDFQTEV

SEQ ID NO: 12175 - protein, 1178 aa, Homo sapiens
MPRRRPPASGAAQFPERIATRSPDPIPLCTFQRQVSEMAEDGSEEIMFIWCEDCSQYHDSECPELGPVVMVKDSFVLSRARSSLPPNLEIRRLEDGAEGVFAITQLVKRTQFGPFESRRVAKWEKESAFPLKVFQKDGHPVCFDTSNEDDCNWMMLVRPAAEAEHQNLTAYQHGSDVYFTTSRDIPPGTELRVWYAAFYAKKMDKPMLKQAGSGVHAAGTPENSAPVESEPSQWACKVCSATFLELQLLNEHLLGHLEQAKSLPPGSQSEAAAPEKEQDTPRGEPPAVPESENVATKEQKKKPRRGRKPKVSKAEQPLVIVEDKEPTEQVAEIITEVPPDEPVSATPDERIMELVLGKLATTTTDTSSVPKFTHHQNNTITLKRSLILSSRHGIRRKLIKQLGEHKRVYQCNICSKIFQNSSNLSRHVRSHGDKLFKCEECAKLFSRKESLKQHVSYKHSRNEVDGEYRYRCGTCEKTFRIESALEFHNCRTDDKTFQCEMCFRFFSTNSNLSKHKKKHGDKKFACEVCSKMFYRKDVMLDHQRRHLEGVRRVKREDLEAGGENLVRYKKEPSGCPVCGKVFSCRSNMNKHLLTHGDKKYTCEICGRKFFRVDVLRDHIHVHFKDIALMDDHQREEFIGKIGISSEENDDNSDESADSEPHKYSCKRCQLTFGRGKEYLKHIMEVHKEKGYGCSICNRRFALKATYHAHMVIHRENLPDPNVQKYIHPCEICGRIFNSIGNLERHKLIHTGVKSHACEQCGKSFARKDMLKEHMRVHDNVREYLCAECGKGMKTKHALRHHMKLHKGIKEYECKECHRRFAQKVNMLKHCKRHTGIKDFMCELCGKTFSERNTMETHKLIHTVGKQWTCSVCDKKYVTEYMLQKHVQLTHDKVEAQSCQLCGTKVSTRASMSRHMRRKHPEVLAVRIDDLDHLPETTTIDASSIGIVQPELTLEQEDLAEGKHGKAAKRSHKRKQKPEEEAGAPVPEDATFSEYSEKETEFTGSVGDETNSAVQSIQQVVVTLGDPNVTTPSSSVGLTNITVTPITTAAATQFTNLQPVAVGHLTTPERQLQLDNSILTVTFDTVSGSAMLHNRQNDVQIHPQPEASNPQSVAHFINLTTLVNSITPLGSQLSDQHPLTWRAVPQTDVLPPSQPQAPPQQAAQPQVQAEQQQQQMYSY

SEQ ID NO: 12176 - protein, 1500 aa, Homo sapiens
MLSLRGPDTHGKGHRMTPACPLLLSVILSLRLATAFDPAPSACSALASGVLYGAFSLQDLFPTIASGCSWTLENPDPTKYSLYLRFNRQEQVCAHFAPRLLPLDHYLVNFTCLRPSPEEAVAQAESEVGRPEEEEAEAAAGLELCSGSGPFTFLHFDKNFVQLCLSAEPSEAPRLLAPAALAFRFVEVLLINNNNSSQFTCGVLCRWSEECGRAAGRACGFAQPGCSCPGEAGAGSTTTTSPGPPAAHTLSNALVPGGPAPPAEADLHSGSSNDLFTTEMRYGEEPEEEPKVKTQWPRSADEPGLYMAQTVHGVWEEWGSWSLCSRSCGRGSRSRMRTCVPPQHGGKACEGPELQTKLCSMAACPVEGQWLEWGPWGPCSTSCANGTQQRSRKCSVAGPAWATCTGALTDTRECSNLECPATDSKWGPWNAWSLCSKTCDTGWQRRFRMCQATGTQGYPCEGTGEEVKPCSEKRCPAFHEMCRDEYVMLMTWKKAAAGEIIYNKCPPNASGSASRRCLLSAQGVAYWGLPSFARCISHEYRYLYLSLREHLAKGQRMLAGEGMSQVVRSLQELLARRTYYSGDLLFSVDILRNVTDTFKRATYVPSADDVQRFFQVVSFMVDAENKEKWDDAQQVSPGSVHLLRVVEDFIHLVGDALKAFQSSLIVTDNLVISIQREPVSAVSSDITFPMRGRRGMKDWVRHSEDRLFLPKEVLSLSSPGKPATSGAAGSPGRGRGPGTVPPGPGHSHQRLLPADPDESSYFVIGAVLYRTLGLILPPPRPPLAVTSRVMTVTVRPPTQPPAEPLITVELSYIINGTTDPHCASWDYSRADASSGDWDTENCQTLETQAAHTRCQCQHLSTFAVLAQPPKDLTLELAGSPSVPLVIGCAVSCMALLTLLAIYAAFWRFIKSERSIILLNFCLSILASNILILVGQSRVLSKGVCTMTAAFLHFFFLSSFCWVLTEAWQSYLAVIGRMRTRLVRKRFLCLGWGLPALVVAVSVGFTRTKGYGTSSYCWLSLEGGLLYAFVGPAAVIVLVNMLIGIIVFNKLMARDGISDKSKKQRAGASLWSSCVVLPLLALTWMSAVLAMTDRRSVLFQALFAVFNSAQGFVITAVHCFLRREVQDVVKCQMGVCRADESEDSPDSCKNGQLQILSDFEKDVDLACQTVLFKEVNTCNPSTITGTLSRLSLDEDEEPKSCLVGPEGSLSFSPLPGNILVPMAASPGLGEPPPPQEANPVYMCGEGGLRQLDLTWLRPTEPGSEGDYMVLPRRTLSLQPGGGGGGGEDAPRARPEGTPRRAAKTVAHTEGYPSFLSVDHSGLGLGPAYGSLQNPYGMTFQPPPPTPSARQVPEPGERSRTMPRTVPGSTMKMGSLERKKLRYSDLDFEKVMHTRKRHSELYHELNQKFHTFDRYRSQSTAKREKRWSVSSGGAAERSVCTDKPSPGERPSLSQHRRHQSWSTFKSMTLGSLPPKPRERLTLHRAAAWEPTEPPDGDFQTEV

SEQ ID NO: 12177 - protein, 1272 aa, Homo sapiens [sequence omitted]

SEQ ID NO: 12178 - protein, 1093 aa, Homo sapiens
MSWFNASQLSSFAKQALSQAQKSIDRVLDIQEEEPSIWAETIPYGEPGISSPVSGGWDTSTWGLKSNTEPQSPPIASPKAITKPVRRTVVDESENFFSAFLSPTDVQTIQKSPVVSKPPAKSQRPEEEVKSSLHESLHIGQSRTPETTESQVKDSSLCVSGETLAAGTSSPKTEGKHEETVNKESDMKVPTVSLKVSESVIDVKTTMESISNTSTQSLTAETKDIALEPKEQKHEDRQSNTPSPPVSTFSSGTSTTSDIEVLDHESVISESSASSRQETTDSKSSLHLMQTSFQLLSASACPEYNRLDDFQKLTESCCSSDAFERIDSFSVQSLDSRSVSEINSDDELSGKGYALVPIIVNSSTPKSKTVESAEGKSEEVNETLVIPTEEAEMEESGRSATPVNCEQPDILVSSTPINEGQTVLDKVAEQCEPAESQPEALSEKEDVCKTVEFLNEKLEKREAQLLSLSKEKALLEEAFDNLKDEMFRVKEESSSISSLKDEFTQRIAEAEKKVQLACKERDAAKKEIKNIKEELATRLNSSETADLLKEKDEQIRGLMEEGEKLSKQQLHNSNIIKKLRAKDKENENMVAKLNKKVKELEEELQHLKQVLDGKEEVEKQHRENIKKLNSMVERQEKDLGRLQVDMDELEEKNRSIQAALDSAYKELTDLHKANAAKDSEAQEAALSREMKAKEELSAALEKAQEEARQQQETLAIQVGDLRLALQRTEQAAARKEDYLRHEIGELQQRLQEAENRNQELSQSVSSTTRPLLRQIENLQATLGSQTSSWEKLEKNLSDRLGESQTLLAAAVERERAATEELLANKIQMSSMESQNSLLRQENSRFQAQLESEKNRLCKLEDENNRYQVELENLKDEYVRTLEETRKEKTLLNSQLEMERMKVEQERKKAIFTQETIKEKERKPFSVSSTPTMSRSSSISGVDMAGLQTSFLSQDESHDHSFGPMPISANGSNLYDAVRMGAGSSIIENLQSQLKLREGEITHLQLEIGNLEKTRSIMAEELVKLTNQNDELEEKVKEIPKLRTQLRDLDQRYNTILQMYGEKAEEAEELRLDLEDVKNMYKTQIDELLRQSLS

SEQ ID NO: 12179 - protein, 1369 aa, Homo sapiens
MRPPGFLSRAPSLNRAERGIWSCSMDQREPLPPAPAENEMKYDTNNNEEEEGEQFDFDSGDEIPEADRQAPSAPETGGAGASEAPAPTGGEDGAGAETTPVAEPTKLVLPMKVNPYSVIDITPFQEDQPPTPVPSAEEENVGLHVPCGYLVPVPCGYAVPSNLPLLLPAYSSPVIICATSLDEEAETPEVTEDRQPNSLSSEEPPTSEDQVGREDSALARWAADPANTAWMENPEEAIYDDVPRENSDSEPDEMIYDDVENGDEGGNSSLEYGWSSSEFESYEEQSDSECKNGIPRSFLRSNHKKQLSHDLTRLKEHYEKKMRDLMASTVGVVEIQQLRQKHELKMQKLVKAAKDGTKDGLERTRAAVKRGRSFIRTKSLIAQDHRSSLEEEQNLFIDVDCKHPEAILTPMPEGLSQQQVVRRYILGSVVDSEKNYVDALKRILEQYEKPLSEMEPKVLSERKLKTVFYRVKEILQCHSLFQIALASRVSEWDSVEMIGDVFVASFSKSMVLDAYSEYVNNFSTAVAVLKKTCATKPAFLEFLKQEQEASPDRTTLYSLMMKPIQRFPQFILLLQDMLKNTSKGHPDRLPLQMALTELETLAEKLNERKRDADQRCEVKQIAKAINERYLNKLLSSGSRYLIRSDDMIETVYNDRGEIVKTKERRVFMLNDVLMCATVSSRPSHDSRVMSSQRYLLKWSVPLGHVDAIEYGSSAGTGEHSRHLAVHPPESLAVVANAKPNKVYMGPGQLYQDLQNLLHDLNVIGQITQLIGNLKGNYQNLNQSVAHDWTSGLQRLILKKEDEIRAADCCRIQLQLPGKQDKSGRPTFFTAVFNTFTPAIKESWVNSLQMAKLALEEENHMGWFCVEDDGNHIKKEKHPLLVGHMPVMVAKQQEFKIECAAYNPEPYLNNESQPDSFSTAHGFLWIGSCTHQMGQIAIVSFQNSTPKVIECFNVESRILCMLYVPVEEKRREPGAPPDPETPAVRASDVPTICVGTEEGSISIYKSSQGSKKVRLQHFFTPEKSTVMSLACTSQSLYAGLVNGAVASYARAPDGSWDSEPQKVIKLGVLPVRSLLMMEDTLWAASGGQVFIISVETHAVEGQLEAHQEEGMVISHMAVSGVGIWIAFTSGSTLRLFHTETLKHLQDINIATPVHNMLPGHQRLSVTSLLVCHGLLMVGTSLGVLVALPVPRLQGIPKVTGRGMVSYHAHNSPVKFIVLATALHEKDKDKSRDSLAPGPEPQDEDQKDALPSGGAGSSLSQGDPDAAIWLGDSLGSMTQKSDLSSSSGSLSLSHGSSSLEHRSEDSTIYDLLKDPVSLRSKARRAKKAKASSALVVCGGQGHRRVHRKARQPHQEELAPTVMVWQIPLLNI

SEQ ID NO: 12180 - protein, 953 aa, Homo sapiens
MSSGLWSQEKVTSPYWEERIFYLLLQECSVTDKQTQKLLKVPKGSIGQYIQDRSVGHSRIPSAKGKKNQIGLKILEQPHAVLFVDEKDVVEINEKFTELLLAITNCEERFSLFKNRNRLSKGLQIDVGCPVKVQLRSGEEKFPGVVRFRGPLLAERTVSGIFFGVELLEEGRGQGFTDGVYQGKQLFQCDEDCGVFVALDKLELIEDDDTALESDYAGPGDTMQVELPPLEINSRVSLKVGETIESGTVIFCDVLPGKESLGYFVGVDMDNPIGNWDGRFDGVQLCSFACVESTILLHINDIIPESVTQERRPPKLAFMSRGVGDKGSSSHNKPKATGSTSDPGNRNRSELFYTLNGSSVDSQPQSKSKNTWYIDEVAEDPAKSLTEISTDFDRSSPPLQPPPVNSLTTENRFHSLPFSLTKMPNTNGSIGHSPLSLSAQSVMEELNTAPVQESPPLAMPPGNSHGLEVGSLAEVKENPPFYGVIRWIGQPPGLNEVLAGLELEDECAGCTDGTFRGTRYFTCALKKALFVKLKSCRPDSRFASLQPVSNQIERCNSLAFGGYLSEVVEENTPPKMEKEGLEIMIGKKKGIQGHYNSCYLDSTLFCLFAFSSVLDTVLLRPKEKNDVEYYSETQELLRTEIVNPLRIYGYVCATKIMKLRKILEKVEAASGFTSEEKDPEEFLNILFHHILRVEPLLKIRSAGQKVQDCYFYQIFMEKNEKVGVPTIQQLLEWSFINSNLKFAEAPSCLIIQMPRFGKDFKLFKKIFPSLELNITDLLEDTPRQCRICGGLAMYECRECYDDPDISAGKIKQFCKTCNTQVHLHPKRLNHKYNPVSLPKDLPDWDWRHGCIPCQNMELFAVLCIETSHYVAFVKYGKDDSAWLFFDSMADRDGGQNGFNIPQVTPCPEVGEYLKMSLEDLHSLDSRRIQGCARRLLCDAYMCMYQSPTMSLYK

SEQ ID NO: 12181 - protein, 3546 aa, Homo sapiens
MCENCADLVEVLNEISDVEGGDGLQLRKEHTLKIFTYINSWTQRQCLCCFKEYKHLEIFNQVVCALINLVIAQVQVLRDQLCKHCTTINIDSTWQDESNQAEEPLNIDRECNEGSTERQKSIEKKSNSTRICNLTEEESSKSSDPFSLWSTDEKEKLLLCVAKIFQIQFPLYTAYKHNTHPTIEDISTQESNILGAFCDMNDVEVPLHLLRYVCLFCGKNGLSLMKDCFEYGTPETLPFLIAHAFITVVSNIRIWLHIPAVMQHIIPFRTYVIRYLCKLSDQELRQSAARNMADLMWSTVKEPLDTTLCFDKESLDLAFKYFMSPTLTMRLAGLSQITNQLHTFNDVCNNESLVSDTETSIAKELADWLISNNVVEHIFGPNLHIEIIKQCQVILNFLAAEGRLSTQHIDCIWAAAQLKHCSRYIHDLFPSLIKNLDPVPLRHLLNLVSALEPSVHTEQTLYLASMLIKALWNNALAAKAQLSKQSSFASLLNTNIPIGNKKEEEELRRTAPSPWSPAASPQSSDNSDTHQSGGSDIEMDEQLINRTKHVQQRLSDTEESMQGSSDETANSGEDGSSGPGSSSGHSDGSSNEVNSSHASQSAGSPGSEVQSEDIADIEALKEEDEDDDHGHNPPKSSCGTDLRNRKLESQAGICLGDSQGMSERNGTSSGTGKDLVFNTESLPSVDNRMRMLDACSHSEDPEHDISGEMNATHIAQGSQESCITRTGDFLGETIGNELFNCRQFIGPQHHHHHHHHHHHHDGHMVDDMLSADDVSCSSSQVSAKSEKNMADFDGEESGCEEELVQINSHAELTSHLQQHLPNLASIYHEHLSQGPVVHKHQFNSNAVTDINLDNVCKKGNTLLWDIVQDEDAVNLSEGLINEAEKLLCSLVCWFTDRQIRMRFIEGCLENLGNNRSVVISLRLLPKLFGTFQQFGSSYDTHWITMWAEKELNMMKLFFDNLVYYIQTVREGRQKHALYSHSAEVQVRLQFLTCVFSTLGSPDHFRLSLEQVDILWHCLVEDSECYDDALHWFLNQVRSKDQHAMGMETYKHLFLEKMPQLKPETISMTGLNLFQHLCNLARLATSAYDGCSNSELCGMDQFWGIALRAQSGDVSRAAIQYINSYYINGKTGLEKEQEFISKCMESLMIASSSLEQESHSSLMVIERGLLMLKTHLEAFRRRFAYHLRQWQIEGTGISSHLKALSDKQSLPLRVVCQPAGLPDKMTIEMYPSDQVADLRAEVTHWYENLQKEQINQQAQLQEFGQSNRKGEFPGGLMGPVRMISSGHELTTDYDEKALHELGFKDMQMVFVSLGAPRRERKGEGVQLPASCLPPPQKDNIPMLLLLQEPHLTTLFDLLEMLASFKPPSGKVAVDDSESLRCEELHLHAENLSRRVWELLMLLPTCPNMLMAFQNISDEQSNDGFNWKELLKIKSAHKLLYALEIIEALGKPNRRIRRESTGSYSDLYPDSDDSSEDQVENSKNSWSCKFVAAGGLQQLLEIFNSGILEPKEQESWTVWQLDCLACLLKLICQFAVDPSDLDLAYHDVFAWSGIAESHRKRTWPGKSRKAAGDHAKGLHIPRLTEVFLVLVQGTSLIQRLMSVAYTYDNLAPRVLKAQSDHRSRHEVSHYSMWLLVSWAHCCSLVKSSLADSDHLQDWLKKLTLLIPETAVRHESCSGLYKLSLSGLDGGDSINRSFLLLAASTLLKFLPDAQALKPIRIDDYEEEPILKPGCKEYFWLLCKLVDNIHIKDASQTTLLDLDALARHLADCIRSREILDHQDGNVEDDGLTGLLRLATSVVKHKPPFKFSREGQEFLRDIFNLLFLLPSLKDRQQPKCKSHSSRAAAYDLLVEMVKGSVENYRLIHNWVMAQHMQSHAPYKWDYWPHEDVRAECRFVGLTNLGATCYLASTIQQLYMIPEARQAVFTAKYSEDMKHKTTLLELQKMFTYLMESECKAYNPRPFCKTYTMDKQPLNTGEQKDMTEFFTDLITKIEEMSPELKNTVKSLFGGVITNNVVSLDCEHVSQTAEEFYTVRCQVADMKNIYESLDEVTIKDTLEGDNMYTCSHCGKKVRAEKRACFKKLPRILSFNTMRYTFNMVTMMKEKVNTHFSFPLRLDMTPYTEDFLMGKSERKEGFKEVSDHSKDSESYEYDLIGVTVHTGTADGGHYYSFIRDIVNPHAYKNNKWYLFNDAEVKPFDSAQLASECFGGEMTTKTYDSVTDKFMDFSFEKTHSAYMLFYKRMEPEEENGREYKFDVSSELLEWIWHDNMQFLQDKNIFEHTYFGFMWQLCSCIPSTLPDPKAVSLMTAKLSTSFVLETFIHSKEKPTMLQWIELLTKQFNNSQAACEWFLDRMADDDWWPMQILIKCPNQIVRQMFQRLCIHVIQRLRPVHAHLYLQPGMEDGSDDMDTSVEDIGGRSCVTRFVRTLLLIMEHGVKPHSKHLTEYFAFLYEFAKMGEEESQFLLSLQAISTMVHFYMGTKGPENPQVEVLSEEEGEEEEEEEDILSLAEEKYRPAALEKMIALVALLVEQSRSERHLTLSQTDMAALTGGKGFPFLFQHIRDGINIRQTCNLIFSLCRYNNRLAEHIVSMLFTSIAKLTPEAANPFFKLLTMLMEFAGGPPGMPPFASYILQRIWEVIEYNPSQCLDWLAVQTPRNKLAHSWVLQNMENWVERFLLAHNYPRVRTSAAYLLVSLIPSNSFRQMFRSTRSLHIPTRDLPLSPDTTVVLHQVYNVLLGLLSRAKLYVDAAVHGTTKLVPYFSFMTYCLISKTEKLMFSTYFMDLWNLFQPKLSEPAIATNHNKQALLSFWYNVCADCPENIRLIVQNPVVTKNIAFNYILADHDDQDVVLFNRGMLPAYYGILRLCCEQSPAFTRQLASHQNIQWAFKNLTPHASQYPGAVEELFNLMQLFIAQRPDMREEELEDIKQFKKTTISCYLRCLDGRSCWTTLISAFRILLESDEDRLLVVFNRGLILMTESFNTLHMMYHEATACHVTGDLVELLSIFLSVLKSTRPYLQRKDVKQALIQWQERIEFAHKLLTLLNSYSPPELRNACIDVLKELVLLSPHDFLHTLVPFLQHNHCTYHHSNIPMSLGPYFPCRENIKLIGGKSNIRPPRPELNMCLLPTMVETSKGKDDVYDRMLLDYFFSYHQFIHLLCRVAINCEKFTETLVKLSVLVAYEGLPLHLALFPKLWTELCQTQSAMSKNCIKLLCEDPVFAEYIKCILMDERTFLNNNIVYTFMTHFLLKVQSQVFSEANCANLISTLITNLISQYQNLQSDFSNRVEISKASASLNGDLRALALLLSVHTPKQLNPALIPTLQELLSKCRTCLQQRNSLQEQEAKERKTKDDEGATPIKRRRVSSDEEHTVDSCISDMKTETREVLTPTSTSDNETRDSSIIDPGTEQDLPSPENSSVKEYRMEVPSSFSEDMSNIRSQHAEEQSNNGRYDDCKEFKDLHCSKDSTLAEEESEFPSTSISAVLSDLADLRSCDGQALPSQDPEVALSLSCGHSRGLFSHMQQHDILDTLCRTIESTIHVVTRISGKGNQAAS

SEQ ID NO: 12182 - protein, 472 aa, Homo sapiens
SINTNAFTPITIRYTTPVGSPGVVCMIEMTADGKPPVQKKDTEISHASQAYFESMFLGHIPANVQIHKKAGPVYGFRGCILDLQVNNKEFFIIDEARHGKNIENCHVPWCAHHLCRNNGTCISDNENLFCECPRLYSGKLCQFASCENNPCGNGATCVPKSGTDIVCLCPYGRSGPLCTDAINITQPRFSGTDAFGYTSFLAYSRISDISFHYEFHLKFQLANNHSALQNNLIFFTGQKGHGLNGDDFLAVGLLNGSVVYSYNLGSGIASIRSEPLNLSLGVHTVHLGKFFQEGWLKVDDHKNKSIIAPGRLVGLNVFSQFYVGGYSEYTPDLLPNGADFKNGFQGCIFTLQVRTEKDGHFRGLGNPEGHPNAGRSVGQCHASPCSLMKCGNGGTCIESGTSVYCNCTTGWKGSFCTETVSTCDPEHDPPHHCSRGATCISLPHGYTCFCPLGTTGIYCEQGHQFIGKDVFK

SEQ ID NO: 12183 - protein, 529 aa, Homo sapiens
MPPAPPGGESGCEERGAAGHIEHSRYLSLLDAVDNSKMALNSGSPPAIGPYYENHGYQPENPYPAQPTVVPTVYEVHPAQYYPSPVPQYAPRVLTQASNPVVCTQPKSPSGTVCTSKTKKALCITLTLGTFLVGAALAAGLLWKFMGSKCSNSGIECDSSGTCINPSNWCDGVSHCPGGEDENRCVRLYGPNFILQVYSSQRKSWHPVCQDDWNENYGRAACRDMGYKNNFYSSQGIVDDSGSTSFMKLNTSAGNVDIYKKLYHSDACSSKAVVSLRCIACGVNLNSSRQSRIVGGESALPGAWPWQVSLHVQNVHVCGGSIITPEWIVTAAHCVEKPLNNPWHWTAFAGILRQSFMFYGAGYQVEKVISHPNYDSKTKNNDIALMKLQKPLTFNDLVKPVCLPNPGMMLQPEQLCWISGWGATEEKGKTSEVLNAAKVLLIETQRCNSRYVYDNLITPAMICAGFLQGNVDSCQGDSGGPLVTSKNNIWWLIGDTSWGSGCAKAYRPGVYGNVMVFTDWIYRQMRADG

SEQ ID NO: 12184 - protein, 935 aa, Homo sapiens
MANRLQRGDRSRLLLLLCIFLGTLRGFRARQIRYSVPEETEKGSFVGNISKDLGLEPRELAKRGVRIVSRGKTQLFAVNPRSGSLITAGRIDREELCETVSSCFLNMELLVEDTLKIYGVEVEIIDINDNAPSFQEDEVEIKVSEHAIPGARFALPNARDPDVGVNSLQSYQLSPNNYFSLQLRGRTDGAKNPELVLEGSLDREKEAAHLLLLTALDGGDPIRKGAVPIRVVVLDVNDHIPMFTQSVYRVSVPENISSGTRVLMVNATDPDEGINGEVMYSFRNMESKASEIFQLDSQTGEVQVRGSLDFEKYRFYEMEIQGQDGGGLFTTTTMLITVVDVNDNAPEITITSSINSILENSPPGTVIALLNVQDQDSGENGQVSCFIPNHLPFKLEKTYGNYYKLITSRVLDRELVQSYNITLTATDQGSPPLSAETHVWLNVADDNDNPPVFPHSSYSAYIPENNPRGASIFSVTALDPDSKQNALVTYSLTDDTVQGVPLSSYVSINSNTGVLYALQSFDYEQFRDLELRVIARDSGDPPLSSNVSLSLFVLDQNDNAPEILYPALPTDGSTGVELAPRSAEPGYLVTKVVAVDKDSGQNAWLSYRLLKASEPGLFAVGEHTGEVRTARALLDRDALKQSLVVAVQDHGQPPLSATVTLTVAVADSIPEVLADLGSLESLANSETSDLSLYLVVAVAAVSCIFLVFVIVLLALRLWRWHKSRLLQASEGGLAGMPTSHFVGVDGVQAFLQTYSHEVSLIADSQKSHLIFPQPNYGDTLISQESCEKSEPLLIAEDSAIILGKCDPTSNQQAPPNTDWRFSQAQRPGTSGSQNGDDTGTWPNNQFDTEMLQAMILASASEAADGSSTLGGGAGTMGLSARYGPQFTLQHVPDYRQNVYIPGSNATLTNAAGKRDGKAPAGGNGNKKKSGKKEKK

SEQ ID NO: 12185 - protein, 929 aa, Homo sapiens
MGGSCAQRRRAGPRQVLFPLLLPLFYPTLCEPIRYSIPEELAKGSVVGNLAKDLGLSVLDVSARELRVSAEKLHFSVDAQSGDLLVKDRIDREQICKERRRCELQLEAVVENPLNIFHVIVVIEDVNDHAPQFRKDEINLEISESVSLGMGTILESAEDPDISMNSLSKYQLSPNEYFSLVEKDNPDGGKYPELVLQKTLDRETQSAHHLVLTALDGGDPPRSGTAQIRILVIDANDNPPVFSQDVYRVSLREDVPPGTSILRVKATDQDEGINSEITYSFFGVADKAQHVFSLDYTTGNILTQQPLDFEEVERYTINIEAKDRGSLSTRCKVIVEVVDENDNSPEIIITSLSDQIMEDSPPGVVVALFKTRDQDSGENGEVRCSLSRGVPFKIHSSSNNYYKLVTDEALDREQTPEYNVTIAATDRGKPPLSSSKTITLHITDVNDNAPVFGQSAYLVHVPENNQPGASIAQVSASDPDFGLNGRVSYSLIASDLESRTLSSYVSVSAQSGVVFAQRAFDHEQLRTFELTLQARDQGSPALSANVSLRVLVGDRNDNAPRVLYPALGPDGSALFDTVPRAAQPGYLVTKVVAVDADSGHNAWLSYHVVQASEPGLFSLGLRTGEVRMVRALGDKDSVRQRLLVAVRDGGQPPLSATATLHLVFADSLQEVLPDFSDHPTPSDSQAEMQFYLVVALALISVLFLLAVILAIALRLRQSFSPTAGDCFESVLCSKSGPVGPPNYSEGTLPYAYNFCVPGDQMNPEFNFFTSVDHCPATQDNLNKDSMLLASILTPSVEADKKILKQQAPPNTDWRFSQAQRPGTSGSQNGDDTGTWPNNQFDTEMLQAMILASASEAADGSSTLGGGAGTMGLSARYGPQFTLQHVPDYRQNVYIPGSNATLTNAAGKRDGKAPAGGNGNKKKSGKKEKK

SEQ ID NO: 12186 - protein, 662 aa, Homo sapiens
MVVSEVDIAKADPAAASHPLLLNGDATVAQKNPGSVAENNLCSQYEEKVRPCIDLIDSLRALGVEQDLALPAIAVIGDQSSGKSSVLEALSGVALPRGSGIVTRCPLVLKLKKLVNEDKWRGKVSYQDYEIEISDASEVEKEINKAQNAIAGEGMGISHELITLEISSRDVPDLTLIDLPGITRVAVGNQPADIGYKIKTLIKKYIQRQETISLVVVPSNVDIATTEALSMAQEVDPEGDRTIGILTKPDLVDKGTEDKVVDVVRNLVFHLKKGYMIVKCRGQQEIQDQLSLSEALQREKIFFENHPYFRDLLEEGKATVPCLAEKLTSELITHICKSLPLLENQIKETHQRITEELQKYGVDIPEDENEKMFFLIDKVNAFNQDITALMQGEETVGEEDIRLFTRLRHEFHKWSTIIENNFQEGHKILSRKIQKFENQYRGRELPGFVNYRTFETIVKQQIKALEEPAVDMLHTVTDMVRLAFTDVSIKNFEEFFNLHRTAKSKIEDIRAEQEREGEKLIRLHFQMEQIVYCQDQVYRGALQKVREKELEEEKKKKSWDFGAFQSSSATDSSMEEIFQHLMAYHQEASKRISSHIPLIIQFFMLQTYGQQLQKAMLQLLQDKDTYSWLLKERSDTSDKRKFLKERLARLTQARRRLAQFPG

SEQ ID NO: 12187 - protein, 701 aa, Homo sapiens
MESPSAPPHRWCIPWQRLLLTASLLTFWNPPTTAKLTIESTPFNVAEGKEVLLLVHNLPQHLFGYSWYKGERVDGNRQIIGYVIGTQQATPGPAYSGREIIYPNASLLIQNIIQNDTGFYTLHVIKSDLVNEEATGQFRVYPELPKPSISSNNSKPVEDKDAVAFTCEPETQDATYLWWVNNQSLPVSPRLQLSNGNRTLTLFNVTRNDTASYKCETQNPVSARRSDSVILNVLYGPDAPTISPLNTSYRSGENLNLSCHAASNPPAQYSWFVNGTFQQSTQELFIPNITVNNSGSYTCQAHNSDTGLNRTTVTTITVYEPPKPFITSNNSNPVEDEDAVALTCEPEIQNTTYLWWVNNQSLPVSPRLQLSNDNRTLTLLSVTRNDVGPYECGIQNELSVDHSDPVILNVLYGPDDPTISPSYTYYRPGVNLSLSCHAASNPPAQYSWLIDGNIQQHTQELFISNITEKNSGLYTCQANNSASGHSRTTVKTITVSAELPKPSISSNNSKPVEDKDAVAFTCEPEAQNTTYLWWVNGQSLPVSPRLQLSNGNRTLTLFNVTRNDARAYVCGIQNSVSANRSDPVTLDVLYGPDTPIISPPDSSYLSGANLNLSCHSASNPSPQYSWRINGIPQQHTQVLFIAKITPNNNGTYACFVSNLATGRNNSIVKSITVSASGTSPGLSAGATVGIMIGVLVGVALI

SEQ ID NO: 12188 - protein, 932 aa, Homo sapiens
MAAPQSRPRRGELILLCALLGTLWEIGRGQIRYSVPEETDKGSFVGNISKDLGLDPRKLAKHGVRIVSRGRTQLFALNPRSGSLITAGRIDREELCAQSPRCLININTLVEDKGKLFGVEIEIIDINDNNPKFQVEDLEVKINEIAVPGARYPLPEAVDPDVGVNSLQSYQLSPNHHFSLDVQTGDNGAINPELVLERALDREEEAAHHLVLTASDGGKPPRSSTVRIHVTVLDTNDNAPVFPHPIYRVKVLENMPPGTRLLTVTASDPDEGINGKVAYKFRKINEKQTPLFQLNENTGEISIAKSLDYEECSFYEMEIQAEDVGALLGRTKLLISVEDVNDNRPEVIITSLFSPVLENSLPGTVIAFLSVHDQDSGKNGQVVCYTRDNLPFKLEKSIGNYYRLVTRKYLDRENVSIYNITVMASDLGTPPLSTETQIALHVADINDNPPTFPHASYSAYILENNLRGASIFSLTAHDPDSQENAQVTYSVTEDTLQGAPLSSYISINSDTGVLYALQSFDYEQIRDLQLLVTASDSGDPPLSSNMSLSLFVLDQNDNAPEILYPALPTDGSTGVELAPRSAERGYLVTKVVAVDRDSGQNAWLSYRLLKASEPGLFSVGLHTGEVRTARALLDRDALKQSLVVAVQDHGQPPLSATVTLTVAVADSIPEVLTELGSLKPSVDPNDSSLTLYLVVAVAAISCVFLAFVAVLLGLRLRRWHKSRLLQDSGGRLVGVPASHFVGVEEVQAFLQTYSQEVSLTADSRKSHLIFPQPNYADMLISQEGCEKNDSLLTSVDFHEYKNEADHGQQAPPNTDWRFSQAQRPGTSGSQNGDDTGTWPNNQFDTEMLQAMILASASEAADGSSTLGGGAGTMGLSARYGPQFTLQHVPDYRQNVYIPGSNATLTNAAGKRDGKAPAGGNGNKKKSGKKEKK

SEQ ID NO: 12189 - protein, 936 aa, Homo sapiens
MAAQRNRSKESKDCSGLVLLCLFFGIPWEAGARQISYSIPEELEKGSFVGNISKDLGLAPRELAERGVRIVSRGRTQLFSLNPRSGSLITAGRIDREELCAQSARCVVSFNILVEDRVKLFGIEIEVTDINDNAPKFQAENLDVKINENVAAGMRFPLPEAIDPDVGVNSLQSYQLSPNKHFSLRVQSRANGVKYPELVLEHSLDREEEAIHHLVLTASDGGDPLRSGTVLVSVTVFDANDNAPVFTLPEYRVSVPENLPVGTQLLTVTATDRDEGANGEVTYSFRKLPDTQLLKFQLNKYTGEIKISENLDYEETGFYEIEIQAEDGGAYLATAKVLITVEDVNDNSPELTITSLFSPVTEDSPLGTVVALLNVHDLDSEQNGQVTCSILAYLPFKLEKSIDSYYRLVIHRALDREQVSSYNITVTATDGGSPPLSTEAHFMLQVADINDNPPTFSQVSYFTYIPENNARGASIFSVTALDPDSKENAQIIYSLAEDTIQGVPLSSYISINSDTGVLYALRSFDYEQFHELQMQVTASDSGDPPLSSNVSLSLFVLDQNDNAPEILYPALPTDGSTGVELAPRSAEPGYLVTKVVAVDRDSGQNAWLSYRLLKASEPGLFAVGEHTGEVRTARALLDRDALKQSLVVAVQDHGQPPLSATVTLTVAVADSIPQVLADLGSFESPANSETSDLTLYLVVAVAAVSCVFLAFVIVLLAHRLRRWHKSRLLQASGGGLTGVSGSHFVGVDGVRAFLQTYSHEVSLTADSRKSHLIFPQPNYADTLISQESCEKNDPLSLLDDSKFPIEDTPLVPQAPPNTDWRFSQAQRPGTSGSQNGDDTGTWPNNQFDTEMLQAMILASASEAADGSSTLGGGAGTMGLSARYGPQFTLQHVPDYRQNVYIPGSNATLTNAAGKRDGKAPAGGNGNKKKSGKKEKK

SEQ ID NO: 12190 - protein, 941 aa, Homo sapiens
MVIIGPRGPGSQRLLLSLLLLAAWEVGSGQLHYSVYEEAKHGTFVGRIAQDLGLELAELVPRLFRVASKRHGDLLEVNLQNGILFVNSRIDREKLCGRSAECSIHLEVIVDRPLQVFHVDVEVKDINDNPPVFREREQKVPVSESAPLDSHFPLEGASDADIGVNSLLTYALSLNENFELKIKTKKDKSILPELVLRKLLDREQTPKLNLLLMVIDGGKPELTGSVQIQITVLDVNDNGPAFDKPSYKVVLSENVQNDTRVIQLNASDPDEGLNGEISYGIKMILPVSEKCMFSINPDTGEIRIYGELDFEENNAYEIQVNAIDKGIPSMAGHSMVLVEVLDVNDNVPEVMVTSLSLPVQEDAQVGTVIALISVSDRDSGANGQVICSLTPHVPFKLVSTYKNYYSLVLDSALDRESVSAYELVVTARDGGSPSLWATARVSVEVADVNDNAPAFAQPEYTVFVKENNPPGCHIFTVSAWDADAQKNALVSYSLVERRVGEHALSSYVSVHAESGKVYALQPLDHEELELLQFQVSARDAGVPPLGSNVTLQVFVLDENDNAPALLATPAGSAGGAVSELVPRSVGAGHVVAKVRAVDADSGYNAWLSYELQPAAVGAHIPFHVGLYTGEISTTRILDEADAPRHRLLVLVKDHGEPALTSTATVLVSLVENGQAPKTSSRASVGAVDPEAALVDINVYLIIAICAVSSLLVLTLLLYTALRCSAPPTVSRCAPGKPTLVCSSAVGSWSYSQQRRQRVCSAESPPKTDLMAFSPSLQLSREDCLNPPSEPRQPNPDWRYSASLRAGMHSSVHLEEAGILRAGPGGPDQQWPTVSSATPEPEAGEVSPPVGAGVNSNSWTFKYGPGNPKQSGPGELPDKFIIPGSPAIISIRQEPTNSQIDKSDFITFGKKEETKKKKKKKKGNKTQEKKEKGNSTTDNSDQ

SEQ ID NO: 12191 - protein, 487 aa, Homo sapiens
MMHFKSGLELTELQNMTVPEDDNISNDSNDFTEVENGQINSKFISDRESRRSLTNSHLEKKKCDEYIPGTTSLGMSVFNLSNAIMGSGILGLAFALANTGILLFLVLLTSVTLLSIYSINLLLICSKETGCMVYEKLGEQVFGTTGKFVIFGATSLQNTGAMLSYLFIVKNELPSAIKFLMGKEETFSAWYVDGRVLVVIVTFGIILPLCLLKNLGYLGYTSGFSLSCMVFFLIVVIYKKFQIPCIVPELNSTISANSTNADTCTPKYVTFNSKTVYALPTIAFAFVCHPSVLPIYSELKDRSQKKMQMVSNISFFAMFVMYFLTAIFGYLTFYDNVQSDLLHKYQSKDDILILTVRLAVIVAVILTVPVLFFTVRSSLFELAKKTKFNLCRHTVVTCILLVVINLLVIFIPSMKDIFGVVGVTSANMLIFILPSSLYLKITDQDGDKGTQRIWAALFLGLGVLFSLVSIPLVIYDWACSSSSDEGH

SEQ ID NO: 12192 - protein, 949 aa, Homo sapiens
MFGFQRRGLGTPRLQLWLLLLEFWEVGSGQLHYSVSEEAKHGTFVGRIAQDLGLELAELVQRLFRVASKTHGDLLEVNLQNGILFVNSRIDREELCGQSAECSIHLEVIVDRPLQVFHVNVEVKDINDNPPVFSLREQKLLIAESKQSDSRFPLEGASDADIEENALLTYRLSKNEYFSLDSPTNGKQIKRLSLILKKSLDREKTPELNLLLTATDGGKPELTGTVRLLVQVLDVNDNDPEFDKSEYKVSLMENAAKETLVLKLNATDRDEGVNGEVTYSLMSIKPNGRHLFTLDQNNGEVRVNGTLDYEENKFYKIEVQATDKGTPPMAGHCTVWVEILDTNDNSPEVAVTSLSLPVREDAQPSTVIALISVSDRDSGVNGQVTCSLTPHVPFKLVSTFKNYYSLVLDSALDRENVWAYELVVTARDGGSPSLWATARVSVEVADVNDNAPAFAQPEYTVFVKENNPPGCHIFTVSARDADAQENALVSYSLVERRLGDRALSSYVSVHAESGKVYALQPLDHEELELLQFQVSARDAGVPPLSSNVTLQVFVLDENDNAPALLATQAGSAGGAVNKLVPRSVGAGHVVAKVRAVDADSGYNAWLSYELQPAAGGSRIPFRVGLYTGEISTTRALDEADSPRHRLLVLVKDHGEPALTATATVLVSLVESGQAPKASSRTLAGAASPEAALVDVNVYLIIAICVVSSLLVLTLLLYTALWWSATPTEGACAPGKPTLVCSRAVGSWSYSQQRRQRVCSEEGPPKTDLMAFSPSLPLGLNKEEEGERQEPGSNHPGQPRQPNPDWRYSASLRAGMHSSVHLEEAGILRAGPGGPDQQWPTVSSATPEPEAGEVSPPVGAGVNSNSWTFKYGPGNPKQSGPGELPDKFIIPGSPAIISIRQEPTNSQIDKSDFITFGKKEETKKKKKKKKGNKTQEKKEKGNSTTDNSDQ

SEQ ID NO: 12193 - protein, 782 aa, Homo sapiens
MEPEEERIRYSQRLRGTMRRRYEDDGISDDEIEGKRTFDLEEKLHTNKYNANFVTFMEGKDFNVEYIQRGGLRDPLIFKNSDGLGIKMPDPDFTVNDVKMCVGSRRMVDVMDVNTQKGIEMTMAQWTRYYETPEEEREKLYNVISLEFSHTRLENMVQRPSTVDFIDWVDNMWPRHLKESQTESTNAILEMQYPKVQKYCLMSVRGCYTDFHVDFGGTSVWYHIHQGGKVFWLIPPTAHNLELYENWLLSGKQGDIFLGDRVSDCQRIELKQGYTFVIPSGWIHAVYTPTDTLVFGGNFLHSFNIPMQLKIYNIEDRTRVPNKFRYPFYYEMCWYVLERYVYCITNRSHLTKEFQKESLSMDLELNGLESGNGDEEAVDREPRRLSSRRSVLTSPVANGVNLDYDGLGKTCRSLPSLKKTLAGDSSSDCSRGSHNGQVWDPQCAPRKDRQVHLTHFELEGLRCLVDKLESLPLHKKCVPTGIEDEDALIADVKILLEELANSDPKLALTGVPIVQWPKRDKLKFPTRPKVRVPTIPITKPHTMKPAPRLTPVRPAAASPIVSGARRRRVRCRKCKACVQGECGVCHYCRDMKKFGGPGRMKQSCVLRQCLAPRLPHSVTCSLCGEVDQNEETQDFEKKLMECCICNEIVHPGCLQMDGEGLLNEELPNCWECPKCYQEDSSEKAQKRKMEESDEEAVQAKVLRPLRSCDEPLTPPPHSPTSMLQLIHDPVSPRGMVTRSSPGAGPSDHHSASRDERFKRRQLLRLQATERTMVLRQETLDKN

SEQ ID NO: 12194 - protein, 370 aa, Homo sapiens
MGNVPSAVKHCLSYQQLLREHLWIGDSVAGALDPAQTSLLTNLHCFQPDVSGFSVSLAGTVACIHWETSQLSGLPEFVKIVEVGPRDGLQNEKVIVPTDIKIEFINRLSQTGLSVIEVTSFVSSRWVPQMADHTEVMKGIHQYPGVRYPVLTPNLQGFHHAVAAGATEISVFGAASESFSKKNINCSIEESMGKFEEVVKSARHMNIPARGYVSCALGCPYEGSITPQKVTEVSKRLYGMGCYEISLGDTIGVGTPGSMKRMLESVMKEIPPGALAVHCHDTYGQALANILTALQMGINVVDSAVSGLGGCPYAKGASGNVATEDLIYMLNGLGLNTGVNLYKVMEAGDFICKAVNKTTNSKVAQASFNA

SEQ ID NO: 12195 - protein, 1537 aa, Homo sapiens
MGEKLELRLKSPVGAEPAVYPWPLPVYDKHHDAAHEIIETIRWVCEEIPDLKLAMENYVLIDYDTKSFESMQRLCDKYNRAIDSIHQLWKGTTQPMKLNTRPSTGLLRHILQQVYNHSVTDPEKLNNYEPFSPEVYGETSFDLVAQMIDEIKMTDDDLFVDLGSGVGQVVLQVAAATNCKHHYGVEKADIPAKYAETMDREFRKWMKWYGKKHAEYTLERGDFLSEEWRERIANTSVIFVNNFAFGPEVDHQLKERFANMKEGGRIVSSKPFAPLNFRINSRNLSDIGTIMRVVELSPLKGSVSWTGKPVSYYLHTIDRTILENYFSSLKNPKLREEQEAARRRQQRESKSNAATPTKGPEGKVAGPADAPMDSGAEEEKAGAATVKKPSPSKARKKKLNKKGRKMAGRKRGRPKKMNTANPERKPKKNQTALDALHAQTVSQTAASSPQDAYRSPHSPFYQLPPSVQRHSPNPLLVAPTPPALQKLLESFKIQYLQFLAYTKTPQYKASLQELLGQEKEKNAQLLGAAQQLLSHCQAQKEEIRRLFQQKLDELGVKALTYNDLIQAQKEISAHNQQLREQSEQLEQDNRALRGQSLQLLKARCEELQLDWATLSLEKLLKEKQALKSQISEKQRHCLELQISIVELEKSQRQQELLQLKSCVPPDDALSLHLRGKGALGRELEPDASRLHLELDCTKFSLPHLSSMSPELSMNGQAAGYELCGVLSRPSSKQNTPQYLASPLDQEVVPCTPSHVGRPRLEKLSGLAAPDYTRLSPAKIVLRRHLSQDHTVPGRPAASELHSRAEHTKENGLPYQSPSVPGSMKLSPQDPRPLSPGALQLAGEKSSEKGLRERAYGSSGELITSLPISIPLSTVQPNKLPVSIPLASVVLPSRAERARSTPSPVLQPRDPSSTLEKQIGANAHGAGSRSLALAPAGFSYAGSVAISGALAGSPASLTPGAEPATLDESSSSGSLFATVGSRSSTPQHPLLLAQPRNSLPASPAHQLSSSPRLGGAAQGPLPEASKGDLPSDSGFSDPESEAKRRIVFTITTGAGSAKQSPSSKHSPLTASARGDCVPSHGQDSRRRGRRKRASAGTPSLSAGVSPKRRALPSVAGLFTQPSGSPLNLNSMVSNINQPLEITAISSPETSLKSSPVPYQDHDQPPVLKKERPLSQTNGAHYSPLTSDEEPGSEDEPSSARIERKIATISLESKSPPKTLENGGGLAGRKPAPAGEPVNSSKWKSTFSPISDIGLAKSADSPLQASSALSQNSLFTFRPALEEPSADAKLAAHPRKGFPGSLSGADGLSPGTNPANGCTFGGGLAADLSLHSFSDGASLPHKGPEAAGLSSPLSFPSQRGKEGSDANPFLSKRQLDGLAGLKGEGSRGKEAGEGGLPLCGPTDKTPLLSGKAAKARDREVDLKNGHNLFISAAAVPPGSLLSGPGLAPAASSAGGAASSAQTHRSFLGPFPPGPQFALGPMSLQANLGSVAGSSVLQSLFSSVPAAAGLVHVSSAATRLTNSHAMGSFSGVAGGTVGGN

SEQ ID NO: 12196 - protein, 440 aa, Homo sapiens
MRRYLRVVVLCVACGFCSLLYAFSQLAVSLEEGTGGGGGKPQAAVASWLAGGGRGAVRGAGVAGPAAHPGVSDRCKDFSLCYWNPYWMLPSDVCGMNCFWEAAFRYSLKIQPVEKMHLAVVACGERLEETMTMLKSAIIFSIKPLQFHIFAEDQLHHSFKGRLDNWSFLQTFNYTLYPITFPSENAAEWKKLFKPCASQRLFLPLILKEVDSLLYVDTDILFLRPVDDIWSLLKKFNSTQIAAMAPEHEEPRIGWYNRFARHPYYGKTGVNSGVMLMNMTRMRRKYFKNDMTTVRLQWGDILMPLLKKYKLNITWGDQDLLNIVFFHNPESLFVFPCQWNYRPDHCIYGSNCQEAEEGGIFILHGNRGVYHDDKQPAFRAVYEALRNCSFEDDNIRSLLKPLELELQKTVHTYCGKIYKIFIKQLAKSVRDRYARSPKEK

SEQ ID NO: 12197 - protein, 512 aa, Homo sapiens
MTVWTGDVVGGGTDSNIFMTLYGINGSTEEMQLDKKKARFEREQNDTFIMEILDIAPFTKMRIRIDGLGSRPEWFLERILLKNMNTGDLTMFYYGDWLSQRKGKKTLVCEMCAVIDEEEMMEWTSYTVAVKTSDILGAGTDANVFIIIFGENGDSGTLALKQSANWNKFERNNTDTFNFPDMLSLGHLCKLRVWHDNKGIFPGWHLSYVDVKDNSRDETFHFQCDCWLSKSEGDGQTVRDFACANNKICDELEETTYEIVIETGNGGETRENVWLILEGRKNRSKEFLMENSSRQRAFRKGTTDTFEFDSIYLGDIASLCVGHLAREDRFIPKRELAWHVKTITITEMEYGNVYFFNCDCLIPLKRKRKYFKVFEVTKTTESFASKVQSLVPVKYEVIVTTGYEPGAGTDANVFVTIFGANGDTGKRELKQKMRNLFERGSTDRFFLETLELGELRKVRLEHDSSGYCSGWLVEKVEVTNTSTGVATIFNCGRWLDKKRGDGLTWRDLFPSV

SEQ ID NO: 12198 - protein, 457 aa, Homo sapiens
MTVWTGDVVGGGTDSNIFMTLYGINGSTEEMQLDKKKARFEREQNDTFIMEILDIAPFTKMRIRIDGLGSRPEWFLERILLKNMNTGDLTMFYYGDWLSQRKGKKTLVCEMCAVIDEEEMMEWTSYTVAVKTSDILGAGTDANVFIIIFGENGDSGTLALKQSANWNKFERNNTDTFNFPDMLSLGHLCKLRVWHDNKGIFPGWHLSYVDVKDNSRDETFHFQCDCWLSKSEGDGQTVRDFACANNKICDELEETTYEIVIETGNGGETRENVWLILEGRKNRSKEFLMENSSRQRAFRKGTTDTFEFDSIYLGDIASLCVGHLAREDRFIPKRELAWHVKTITITEMEYGNVYFFNCDCLIPLKRKRKYFKVFEVTKTTESFASKVQSLVPVKYEVIVTTGYEPGAGTDANVFVTIFGANGDTGKRELKQKMRNLFERGSTDRFFLETLELGELRK

SEQ ID NO: 12199 - protein, 1842 aa, Homo sapiens
MELMFAEWEDGERFSFEDSDRFEEDSLCSFISEAESLCQNWRGWRKQSAGPNSPTGGGGGGGSGGTRMRDGLVIPLVELSAKQVAFHIPFEVVEKVYPPVPEQLQLRIAFWSFPENEEDIRLYSCLANGSADEFQRGDQLFRMRAVKDPLQIGFHLSATVVPPQMVPPKGAYNVAVMFDRCRVTSCSCTCGAGAKWCTHVVALCLFRIHNASAVCLRAPVSESLSRLQRDQLQKFAQYLISELPQQILPTAQRLLDELLSSQSTAINTVCGAPDPTAGPSASDQSTWYLDESTLTDNIKKTLHKFCGPSPVVFSDVNSMYLSSTEPPAAAEWACLLRPLRGREPEGVWNLLSIVREMFKRRDSNAAPLLEILTDQCLTYEQITGWWYSVRTSASHSSASGHTGRSNGQSEVAAHACASMCDEMVTLWRLAVLDPALSPQRRRELCTQLRQWQLKVIENVKRGQHKKTLERLFPGFRPAVEACYFNWEEAYPLPGVTYSGTDRKLALCWARALPSRPGASRSGGLEESRDRPRPLPTEPAVRPKEPGTKRKGLGEGVPSSQRGPRRLSAEGGDKALHKMGPGGGKAKALGGAGSGSKGSAGGGSKRRLSSEDSSLEPDLAEMSLDDSSLALGAEASTFGGFPESPPPCPLHGGSRGPSTFLPEPPDTYEEDGGVYFSEGPEPPTASVGPPGLLPGDVCTQDDLPSTDESGNGLPKTKEAAPAVGEEDDDYQAYYLNAQDGAGGEEEKAEGGAGEEHDLFAGLKPLEQESRMEVLFACAEALHAHGYSSEASRLTVELAQDLLANPPDLKVEPPPAKGKKNKVSTSRQTWVATNTLSKAAFLLTVLSERPEHHNLAFRVGMFALELQRPPASTKALEVKLAYQESEVAALLKKIPLGPSEMSTMRCRAEELREGTLCDYRPVLPLMLASFIFDVLCAPVVSPTGSRPPSRNWNSETPGDEELGFEAAVAALGMKTTVSEAEHPLLCEGTRREKGDLALALMITYKDDQAKLKKILDKLLDRESQTHKPQTLSSFYSSSRPTTASQRSPSKHGGPSAPGALQPLTSGSAGPAQPGSVAGAGPGPTEGFTEKNVPESSPHSPCEGLPSEAALTPRPEGKVPSRLALGSRGGYNGRGWGSPGRPKKKHTGMASIDSSAPETTSDSSPTLSRRPLRGGWAPTSWGRGQDSDSISSSSSDSLGSSSSSGSRRASASGGARAKTVEVGRYKGRRPESHAPHVPNQPSEAAAHFYFELAKTVLIKAGGNSSTSIFTHPSSSGGHQGPHRNLHLCAFEIGLYALGLHNFVSPNWLSRTYSSHVSWITGQAMEIGSAALTILVECWDGHLTPPEVASLADRASRARDSNMVRAAAELALSCLPHAHALNPNEIQRALVQCKEQDNLMLEKACMAVEEAAKGGGVYPEVLFEVAHQWFWLYEQTAGGSSTAREGATSCSASGIRAGGEAGRGMPEGRGGPGTEPVTVAAAAVTAAATVVPVISVGSSLYPGPGLGHGHSPGLHPYTALQPHLPCSPQYLTHPAHPAHPMPHMPRPAVFPVPSSAYPQGVHPAFLGAQYPYSVTPPSLAATAVSFPVPSMAPITVHPYHTEPGLPLPTSVACELWGQGTVSSVHPASTFPAIQGASLPALTTQPSPLVSGGFPPPEEETHSQPVNPHSLHHLHAAYRVGMLALEMLGRRAHNDHPNNFSRSPPYTDDVKWLLGLAAKLGVNYVHQFCVGAAKGVLSPFVLQEIVMETLQRLSPAHAHNHLRAPAFHQLVQRCQQAYMQYIHHRLIHLTPADYDDFVNAIRSARSAFCLTPMGMMQFNDILQNLKRSKQTKELWQRVSLEMATFSP

SEQ ID NO: 12200 - protein, 387 aa, Homo sapiens
MAPPAGGAAAAASDLGSAAVLLAVHAAVRPLGAGPDAEAQLRRLQLSADPERPGRFRLELLGAGPGAVNLEWPLESVSYTIRGPTQHELQPPPGGPGTLSLHFLNPQEAQRWAVLVRGATVEGQNGSKSNSPPALGPEACPVSLPSPPEASTLKGPPPEADLPRSPGNLTEREELAGSLARAIAGGDEKGAAQVAAVLAQHRVALSVQLQEACFPPGPIRLQVTLEDAASAASAASSAHVALQVHPHCTVAALQEQVFSELGFPPAVQRWVIGRCLCVPERSLASYGVRQDGDPAFLYLLSAPREAPATGPSPQHPQKMDGELGRLFPPSLGLPPGPQPAASSLPSPLQPSWSCPSCTFINAPDRPGCEMCSTQRPCTWDPLAAAST

SEQ ID NO: 12201 - protein, 314 aa, Homo sapiens
MCLEMAFPKMRLMYICLLVLGALCLYFSMYSLNPFKEQSFVYKKDGNFLKLPDTDCRQTPPFLVLLVTSSHKQLAERMAIRQTWGKERMVKGKQLKTFFLLGTTSSAAETKEVDQESQRHGDIIQKDFLDVYYNLTLKTMMGIEWVHRFCPQAAFVMKTDSDMFINVDYLTELLLKKNRTTRFFTGFLKLNEFPIRQPFSKWFVSKSEYPWDRYPPFCSGTGYVFSGDVASQVYNVSKSVPYIKLEDVFVGLCLERLNIRLEELHSQPTFFPGGLRFSVCLFRRIVACHFIKPRTLLDYWQALENSRGEDCPPV

SEQ ID NO: 12202 - protein, 509 aa, Homo sapiens
MERRRLWGSIQSRYISMSVWTSPRRLVELAGQSLLKDEALAIAALELLPRELFPPLFMAAFDGRHSQTLKAMVQAWPFTCLPLGVLMKGQHLHLETFKAVLDGLDVLLAQEVRPRRWKLQVLDLRKNSHQDFWTVWSGNRASLYSFPEPEAAQPMTKKRKVDGLSTEAEQPFIPVEVLVDLFLKEGACDELFSYLIEKVKRKKNVLRLCCKKLKIFAMPMQDIKMILKMVQLDSIEDLEVTCTWKLPTLAKFSPYLGQMINLRRLLLSHIHASSYISPEKEEQYIAQFTSQFLSLQCLQALYVDSLFFLRGRLDQLLRHVMNPLETLSITNCRLSEGDVMHLSQSPSVSQLSVLSLSGVMLTDVSPEPLQALLERASATLQDLVFDECGITDDQLLALLPSLSHCSQLTTLSFYGNSISISALQSLLQHLIGLSNLTHVLYPVPLESYEDIHGTLHLERLAYLHARLRELLCELGRPSMVWLSANPCPHCGDRTFYDPEPILCPCFMPN

SEQ ID NO: 12203 - protein, 642 aa, Homo sapiens
MTHILLLYYLVFLLPTESCRTLYQAASKSKEKVPARPHGVCDGVCTDYSQCTQPCPPDTQGNMGFSCRQKTWHKITDTCQTLNALNIFEEDSRLVQPFEDNIKISVYTGKSETITDMLLQKCPTDLSCVIRNIQQSPWIPGNIAVIVQLLHNISTAIWTGVDEAKMQSYSTIANHILNSKSISNWTFIPDRNSSYILLHSVNSFARRLFIDKHPVDISDVFIHTMGTTISGDNIGKNFTFSMRINDTSNEVTGRVLISRDELRKVPSPSQVISIAFPTIGAILEASLLENVTVNGLVLSAILPKELKRISLIFEKISKSEERRTQCVGWHSVENRWDQQACKMIQENSQQAVCKCRPSKLFTSFSILMSPHILESLILTYITYVGLGISICSLILCLSIEVLVWSQVTKTEITYLRHVCIVNIAATLLMADVWFIVASFLSGPITHHKGCVAATFFVHFFYLSVFFWMLAKALLILYGIMIVFHTLPKSVLVASLFSVGYGCPLAIAAITVAATEPGKGYLRPEICWLNWDMTKALLAFVIPALAIVVVNLITVTLVIVKTQRAAIGNSMFQEVRAIVRISKNIAILTPLLGLTWGFGVATVIDDRSLAFHIIFSLLNAFQGFFILVFGTILDPKIREALKG

SEQ ID NO: 12204 - protein, 4515 aa, Homo sapiens
MKIVPDERDRVQKKTFTKWVNKHLIKAQRHISDLYEDLRDGHNLISLLEVLSGDSLPREKGRMRFHKLQNVQIALDYLRHRQVKLVNIRNDDIADGNPKLTLGLIWTIILHFQISDIQVSGQSEDMTAKEKLLLWSQRMVEGYQGLRCDNFTSSWRDGRLFNAIIHRHKPLLIDMNKVYRQTNLENLDQAFSVAERDLGVTRLLDPEDVDVPQPDEKSIITYVSSLYDAMPRVPDVQDGVRANELQLRWQEYRELVLLLLQWMRHHTAAFEERRFPSSFEEIEILWSQFLKFKEMELPAKEADKNRSKGIYQSLEGAVQAGQLKVPPGYHPLDVEKEWGKLHVAILEREKQLRSEFERLECLQRIVTKLQMEAGLCEEQLNQADALLQSDVRLLAAGKVPQRAGEVERDLDKADSMIRLLFNDVQTLKDGRHPQGEQMYRRVYRLHERLVAIRTEYNLRLKAGVAAPATQVAQVTLQSVQRRPELEDSTLRYLQDLLAWVEENQHRVDGAEWGVDLPSVEAQLGSHRGLHQSIEEFRAKIERARSDEGQLSPATRGAYRDCLGRLDLQYAKLLNSSKARLRSLESLHSFVAAATKELMWLNEKEEEEVGFDWSDRNTNMTAKKESYSALMRELELKEKKIKELQNAGDRLLREDHPARPTVESFQAALQTQWSWMLQLCCCIEAHLKENAAYFQFFSDVREAEGQLQKLQEALRRKYSCDRSATVTRLEDLLQDAQDEKEQLNEYKGHLSGLAKRAKAVVQLKPRHPAHPMRGRLPLLAVCDYKQVEVTVHKGDECQLVGPAQPSHWKVLSSSGSEAAVPSVCFLVPPPNQEAQEAVTRLEAQHQALVTLWHQLHVDMKSLLAWQSLRRDVQLIRSWSLATFRTLKPEEQRQALHSLELHYQAFLRDSQDAGGFGPEDRLMAEREYGSCSHHYQQLLQSLEQGAQEESRCQRCISELKDIRLQLEACETRTVHRLRLPLDKEPARECAQRIAEQQKAQAEVEGLGKGVARLSAEAEKVLALPEPSPAAPTLRSELELTLGKLEQVRSLSAIYLEKLKTISLVIRGTQGAEEVLRAHEEQLKEAQAVPATLPELEATKASLKKLRAQAEAQQPTFDALRDELRGAQEVGERLQQRHGERDVEVERWRERVAQLLERWQAVLAQTDVRQRELEQLGRQLRYYRESADPLGAWLQDARRRQEQIQAMPLADSQAVREQLRQEQALLEEIERHGEKVEECQRFAKQYINAIKDYELQLVTYKAQLEPVASPAKKPKVQSGSESVIQEYVDLRTHYSELTTLTSQYIKFISETLRRMEEEERLAEQQRAEERERLAEVEAALEKQRQLAEAHAQAKAQAEREAKELQQRMQEEVVRREEAAVDAQQQKRSIQEELQQLRQSSEAEIQAKARQAEAAERSRLRIEEEIRVVRLQLEATERQRGGAEGELQALRARAEEAEAQKRQAQEEAERLRRQVQDESQRKRQAEVELASRVKAEAEAAREKQRALQALEELRLQAEEAERRLRQAEVERARQVQVALETAQRSAEAELQSKRASFAEKTAQLERSLQEEHVAVAQLREEAERRAQQQAEAERAREEAERELERWQLKANEALRLRLQAEEVAQQKSLAQAEAEKQKEEAEREARRRGKAEEQAVRQRELAEQELEKQRQLAEGTAQQRLAAEQELIRLRAETEQGEQQRQLLEEELARLQREAAAATQKRQELEAELAKVRAEMEVLLASKARAEEESRSTSEKSKQRLEAEAGRFRELAEEAARLRALAEEAKRQRQLAEEDAARQRAEAERVLAEKLAAIGEATRLKTEAEIALKEKEAENERLRRLAEDEAFQRRRLEEQAAQHKADIEERLAQLRKASDSELERQKGLVEDTLRQRRQVEEEILALKASFEKAAAGKAELELELGRIRSNAEDTLRSKEQAELEAARQRQLAAEEERRRREAEERVQKSLAAEEEAARQRKAALEEVERLKAKVEEARRLRERAEQESARQLQLAQEAAQKRLQAEEKAHAFAVQQKEQELQQTLQQEQSVLDQLRGEAEAARRAAEEAEEARVQAEREAAQSRRQVEEAERLKQSAEEQAQARAQAQAAAEKLRKEAEQEAARRAQAEQAALRQKQAADAEMEKHKKFAEQTLRQKAQVEQELTTLRLQLEETDHQKNLLDEELQRLKAEATEAARQRSQVEEELFSVRVQMEELSKLKARIEAENRALILRDKDNTQRFLQEEAEKMKQVAEEAARLSVAAQEAARLRQLAEEDLAQQRALAEKMLKEKMQAVQEATRLKAEAELLQQQKELAQEQARRLQEDKEQMAQQLAEETQGFQRTLEAERQRQLEMSAEAERLKLRVAEMSRAQARAEEDAQRFRKQAEEIGEKLHRTELATQEKVTLVQTLEIQRQQSDHDAERLREAIAELEREKEKLQQEAKLLQLKSEEMQTVQQEQLLQETQALQQSFLSEKDSLLQRERFIEQEKAKLEQLFQDEVAKAQQLREEQQRQQQQMEQERQRLVASMEEARRRQHEAEEGVRRKQEELQQLEQQRRQQEELLAEENQRLREQLQLLEEQHRAALAHSEEVTASQVAATKTLPNGRDALDGPAAEAEPEHSFDGLRRKVSAQRLQEAGILSAEELQRLAQGHTTVDELARREDVRHYLQGRSSIAGLLLKATNEKLSVYAALQRQLLSPGTALILLEAQAASGFLLDPVRNRRLTVNEAVKEGVVGPELHHKLLSAERAVTGYKDPYTGQQISLFQAMQKGLIVREHGIRLLEAQIATGGVIDPVHSHRVPVDVAYRRGYFDEEMNRVLADPSDDTKGFFDPNTHENLTYLQLLERCVEDPETGLCLLPLTDKAAKGGELVYTDSEARDVFEKATVSAPFGKFQGKTVTIWEIINSEYFTAEQRRDLLRQFRTGRITVEKIIKIIITVVEEQEQKGRLCFEGLRSLVPAAELLESRVIDRELYQQLQRGERSVRDVAEVDTVRRALRGANVIAGVWLEEAGQKLSIYNALKKDLLPSDMAVALLEAQAGTGHIIDPATSARLTVDEAVRAGLVGPEFHEKLLSAEKAVTGYRDPYTGQSVSLFQALKKGLIPREQGLRLLDAQLSTGGIVDPSKSHRVPLDVACARGCLDEETSRALSAPRADAKAYSDPSTGEPATYGELQQRCRPDQLTGLSLLPLSEKAARARQEELYSELQARETFEKTPVEVPVGGFKGRTVTVWELISSEYFTAEQRQELLRQFRTGKVTVEKVIKILITIVEEVETLRQERLSFSGLRAPVPASELLASGVLSRAQFEQLKDGKTTVKDLSELGSVRTLLQGSGCLAGIYLEDTKEKVSIYEAMRRGLLRATTAALLLEAQAATGFLVDPVRNQRLYVHEAVKAGVVGPELHEQLLSAEKAVTGYRDPYSGSTISLFQAMQKGLVLRQHGIRLLEAQIATGGIIDPVHSHRVPVDVAYQRGYFSEEMNRVLADPSDDTKGFFDPNTHENLTYRQLLERCVEDPETGLRLLPLKGAEKAEVVETTQVYTEEETRRAFEETQIDIPGGGSHGGSTMSLWEVMQSDLIPEEQRAQLMADFQAGRVTKERMIIIIIEIIEKTEIIRQQGLASYDYVRRRLTAEDLFEARIISLETYNLLREGTRSLREALEAESAWCYLYGTGSVAGVYLPGSRQTLSIYQALKKGLLSAEVARLLLEAQAATGFLLDPVKGERLTVDEAVRKGLVGPELHDRLLSAERAVTGYRDPYTEQTISLFQAMKKELIPTEEALRLLDAQLATGGIVDPRLGFHLPLEVAYQRGYLNKDTHDQLSEPSEVRSYVDPSTDERLSYTQLLRRCRRDDGTGQLLLPLSDARKLTFRGLRKQITMEELVRSQVMDEATALQLREGLTSIEEVTKNLQKFLEGTSCIAGVFVDATKERLSVYQAMKKGIIRPGTAFELLEAQAATGYVIDPIKGLKLTVEEAVRMGIVGPEFKDKLLSAERAVTGYKDPYSGKLISLFQAMKKGLILKDHGIRLLEAQIATGGIIDPEESHRLPVEVAYKRGLFDEEMNEILTDPSDDTKGFFDPNTEENLTYLQLMERCITDPQTGLCLLPLKEKKRERKTSSKSSVRKRRVVIVDPETGKEMSVYEAYRKGLIDHQTYLELSEQECEWEEITISSSDGVVKSMIIDRRSGRQYDIDDAIAKNLIDRSALDQYRAGTLSITEFADMLSGNAGGFRSRSSSVGSSSSYPISPAVSRTQLASWSDPTEETGPVAGILDTETLEKVSITEAMHRNLVDNITGQRLLEAQACTGGIIDPSTGERFPVTDAVNKGLVDKIMVDRINLAQKAFCGFEDPRTKTKMSAAQALKKGWLYYEAGQRFLEVQYLTGGLIEPDTPGRVPLDEALQRGTVDARTAQKLRDVGAYSKYLTCPKTKLKISYKDALDRSMVEEGTGLRLLEAAAQSTKGYYSPYSVSGSGSTAGSRTGSRTGSRAGSRRGSFDATGSGFSMTFSSSSYSSSGYGRRYASGSSASLGGPESAVA

SEQ ID NO: 12205 - protein, 739 aa, Homo sapiens [sequence omitted]

SEQ ID NO: 12206 - protein, 1114 aa, Homo sapiens
MVKSPMNRELVATYEVTLSVIDNASDLPERSVSVPNAKLTVNVLDVNDNTPQFKPFGITYYMERILEGATPGTTLIAVAAVDPDKGLNGLVTYTLLDLVPPGYVQLEDSSAGKVIANRTVDYEEVHWLNFTVRASDNGSPPRAAEIPVYLEIVDINDNNPIFDQPSYQEAVFEDVPVGTIILTVTATDADSGNFALIEYSLGDGESKFAINPTTGDIYVLSSLDREKKDHYILTALAKDNPGDVASNRRENSVQVVIQVLDVNDCRPQFSKPQFSTSVYENEPAGTSVITMMATDQDEGPNGELTYSLEGPGVEAFHVDMDSGLVTTQRPLQSYEKFSLTVVATDGGEPPLWGTTMLLVEVIDVNDNRPVFVRPPNGTILHIREEIPLRSNVYEVYATDKDEGLNGAVRYSFLKTAGNRDWEFFIIDPISGLIQTAQRLDRESQAVYSLILVASDLGQPVPYETMQPLQVALEDIDDNEPLFVRPPKGSPQYQLLTVPEHSPRGTLVGNVTGAVDADEGPNAIVYYFIAAGNEEKNFHLQPDGCLLVLRDLDREREAIFSFIVKASSNRSWTPPRGPSPTLDLVADLTLQEVRVVLEDINDQPPRFTKAEYTAGVATDAKVGSELIQVLALDADIGNNSLVFYSILAIHYFRALANDSEDVGQVFTMGSMDGILRTFDLFMAYSPGYFVVDIVARDLAGHNDTAIIGIYILRDDQRVKIVINEIPDRVRGFEEEFIHLLSNITGAIVNTDNVQFHVDKKGRVNFAQTELLIHVVNRDTNRILDVDRVIQMIDENKEQLRNLFRNYNVLDVQPAISVRLPDDMSALQMAIIVLAILLFLAAMLFVLMNWYYRTVHKRKLKAIVAGSAGNRGFIDIMDMPNTNKYSFDGANPVWLDPFCRNLELAAQAEHEDDLPENLSEIADLWNSPTRTHGTFGREPAAVKPDDDRYLRAAIQEYDNIAKLGQIIREGPIKGSLLKVVLEDYLRLKKLFAQRMVQKASSCHSSISELIQTELDEEPGDHSPGQGSLRFRHKPPVELKGPDGIHVVHGSTGTLLATDLNSLPEEDQKGLGRSLETLTAAEATAFERNARTESAKSTPLHKLRDVIMETPLEITEL

SEQ ID NO: 12207 - protein, 870 aa, Homo sapiens
MEKTKTKQGENEHMPVNNPSTQIYQLQALASELKTGFTEAMQELSRIQHGEYALEEKVKSCRCSMEEKVTEMKNSLNYFKEELSNAMSMIQAITSKQEEMQQKIEQLQQEKRRESRKVKAKKTQKEEHSSQAGPAQAQGSPFRSINIPEPVLPSEDFTNLLPSQAYEKAQESRSVHVGDSNVKGMMGPGVNPTTPEAEENLKSCLSADIQSKGHLPSGMWRQPKDGKEWGEEYVTKDHPDKLKEAGQGRHSSLENVLCETSLAAKRQTVALELLESERKYVINISLILKIKATFQGSDGKRNSKERSLFPGSLRYLVQQHLDLLHALQERVLKWPRQGVLGDLFLKLTNDENNFLDYYVAYLRDLPECISLVHVVVLKEGDEEIKSDIYTLFFHIVQRIPEYLIHLQNVLKFTEQEHPDYYLLLVCVQRLRVFISHYTLLFQCNEDLLIQKRKKLKKSSMAKLYKGLASQCANAGQDASPTAGPEAVRDTGIHSEELLQPYPSAPSSGPAITHLMPPVKKSQQQQSLMESMQPGKPSDWELEGRKHERPESLLAPTQFCAAEQDVKALAGPLQAIPEMDFESSPAEPLGNVERSLRAPAELLPDARGFVPAAYEEFEYGGEIFALPAPYDEEPFQAPALFENCSPASSESSLDICFLRPVSFAMEAERPEHPLQPLPKSATSPAGSSSAYKLEAAAQAHGKAKPLSRSLKEFPRAPPADGVAPRLYSTRSSSGGRAPIKAERAAQAHGPAAAAVAARGASRTFFPQQRSQSEKQTYLEVRREMHLEDTTRFCPKEERESEQTSFSDQNPRQDQKGGFRSSFRKLFKKKSSGSEYREKTNENPSMDPSPTKQDFFRNRLALANDLDQGTAV

SEQ ID NO: 12208 - protein, 288 aa, Homo sapiens
MPVEEFVAGWISGALGLVLGHPFDTVKVRLQTQTTYRGIVDCMVKIYRHESLLGFFKGMSFPIASIAVVNSVLFGVYSNTLLVLTATSHQERRAQPPSYMHIFLAGCTGGFLQAYCLAPFDLIKVRLQNQTEPRAQPGSPPPRYQGPVHCAASIFREEGPRGLFRGAWALTLRDTPTVGIYFITYEGLCRQYTPEGQNPSSATVLVAGGFAGIASWVAATPLDMIKSRMQMDGLRRRVYQGMLDCMVSSIRQEGLGVFFRGVTINSARAFPVNAVTFLSYEYLLRWWG

SEQ ID NO: 12209 - protein, 345 aa, Homo sapiens
MLPNTGRLAGCTVFITGASRGIGKAIALKAAKDGANIVIAAKTAQPHPKLLGTIYTAAEEIEAVGGKALPCIVDVRDEQQISAAVEKAIKKFGAYTIAKYGMSMYVLGMAEEFKGEIAVNALWPKTAIHTAAMDMLGGPGIESQCRKVDIIADAAYSIFQKPKSFTGNFVIDENILKEEGIENFDVYAIKPGHPLQPDFFLDEYPEAVSKKVESTGAVPEFKEEKLQLQPKPRSGAVEETFRIVKDSLSDDVVKATQAIYLFELSGEDGGTWFLDLKSKGGNVGYGEPSDQADVVMSMTTDDFVKMFSGKLKPTMAFMSGKLKIKGNMALAIKLEKLMNQMNARL

SEQ ID NO: 12210 - protein, 418 aa, Homo sapiens
MLPNTGRLAGCTVFITGASRGIGKAIALKAAKDGANIVIAAKTAQPHPKLLGTIYTAAEEIEAVGGKALPCIVDVRDEQQISAAVEKAIKKFGGIDILVNNASAISLTNTLDTPTKRLDLMMNVNTRGTYLASKACIPYLKKSKVAHILNISPPLNLNPVWFKQHCAYTIAKYGMSMYVLGMAEEFKGEIAVNALWPKTAIHTAAMDMLGGPGIESQCRKVDIIADAAYSIFQKPKSFTGNFVIDENILKEEGIENFDVYAIKPGHPLQPDFFLDEYPEAVSKKVESTGAVPEFKEEKLQLQPKPRSGAVEETFRIVKDSLSDDVVKATQAIYLFELSGEDGGTWFLDLKSKGGNVGYGEPSDQADVVMSMTTDDFVKMFSGKLKPTMAFMSGKLKIKGNMALAIKLEKLMNQMNARL

SEQ ID NO: 12211 - protein, 1380 aa, Homo sapiens
MGRHVATSCHVAWLLVLISGCWGQVNRLPFFTNHFFDTYLLISEDTPVGSSVTQLLAQDMDNDPLVFGVSGEEASRFFAVEPDTGVVWLRQPLDRETKSEFTVEFSVSDHQGVITRKVNIQVGDVNDNAPTFHNQPYSVRIPENTPVGTPIFIVNATDPDLGAGGSVLYSFQPPSQFFAIDSARGIVTVIRELDYETTQAYQLTVNATDQDKTRPLSTLANLAIIITDVQDMDPIFINLPYSTNIYEHSPPGTTVRIITAIDQDKGRPRGIGYTIVSGNTNSIFALDYISGVLTLNGLLDRENPLYSHGFILTVKGTELNDDRTPSDATVTTTFNILVIDINDNAPEFNSSEYSVAITELAQVGFALPLFIQVVDKDENLGLNSMFEVYLVGNNSHHFIISPTSVQGKADIRIRVAIPLDYETVDRYDFDLFANESVPDHVGYAKVKITLINENDNRPIFSQPLYNISLYENVTVGTSVLTVLATDNDAGTFGEVSYFFSDDPDRFSLDKDTGLIMLIARLDYELIQRFTLTIIARDGGGEETTGRVRINVLDVNDNVPTFQKDAYVGALRENEPSVTQLVRLRATDEDSPPNNQITYSIVSASAFGSYFDISLYEGYGVISVSRPLDYEQISNGLIYLTVMAMDAGNPPLNSTVPVTIEVFDENDNPPTFSKPAYFVSVVENIMAGATVLFLNATDLDRSREYGQESIIYSLEGSTQFRINARSGEITTTSLLDRETKSEYILIVRAVDGGVGHNQKTGIATVNITLLDINDNHPTWKDAPYYINLVEMTPPDSDVTTVVAVDPDLGENGTLVYSIQPPNKFYSLNSTTGKIRTTHAMLDRENPDPHEAELMRKIVVSVTDCGRPPLKATSSATVFVNLLDLNDNDPTFQNLPFVAEVLEGIPAGVSIYQVVAIDLDEGLNGLVSYRMPVGMPRMDFLINSSSGVVVTTTELDRERIAEYQLRVVASDAGTPTKSSTSTLTIHVLDVNDETPTFFPAVYNVSVSEDVPREFRVVWLNCTDNDVGLNAELSYFITGGNVDGKFSVGYRDAVVRTVVGLDRETTAAYMLILEAIDNGPVGKRHTGTATVFVTVLDVNDNRPIFLQSSYEASVPEDIPEGHSILQAATDADEGEFGRVWYRILHGNHGNNFRIHVSNGLLMRGPRPLDRERNSSHVLIVEAYNHDLGPMRSSVRVIVYVEDINDEAPVFTQQQYSRLGLRETAGIGTSVIVVQATDRDSGDGGLVNYRILSGAEGKFEIDESTGLIITVNYLDYETKTSYMMNVSATDQAPPFNQGFCSVYITLLNELDEAVQFSNASYEAAILENLALGTEIVRVQAYSIDNLNQITYRFNAYTSTQAKALFKIDAITVRGWGQGAPFLPI

SEQ ID NO: 12212 - protein, 755 aa, Homo sapiens
MGLKNKKNTEDPEEPLIASQSTEPEIGHLSPSKKETIMVTLHGATNLPACKDGSEPWPYVVVKSTSEEKNNQSSKAVTSVTSEPTRAPIWGDTVNVEIQAEDAGQEDVILKVVDNRKKQELLSYKIPIKYLRVFHPYHFELVKPTESGKADEATAKTQLYATVVRKSSFIPRYIGCNHMALEIFLRGVNEPLANNPNPIVVIARVVPNYKEFKVSQANRDLASVGLPITPLSFPIPSMMNFDVPRVSQNGCPQLSKPGGPPEQPLWNQSFLFQGRDGATSFSEDTALVLEYYSSTSMKGSQPWTLNQPLGISVLPLKSRLYQKMLTGKGLDGLHVERLPIMDTSLKTINDEAPTVALSFQLLSSERPENFLTPNNSKALPTLDPKILDKKLRTIQESWSKDTVSSTMDLSTSTPREAEEEPLVPEMSHDTEMNNYRRAMQKMAEDILSLRRQASILEGENRILRSRLAQQEEEEGQGKASEAQNTVSMKQKLLLSELDMKKLRDRVQHLQNELIRKNDREKELLLLYQAQQPQAALLKQYQGKLQKMKALEETVRHQEKVIEKMERVLEDRLQDRSKPPPLNRQQGKPYTGFPMLSASGLPLGSMGENLPVELYSVLLAENAKLRTELDKNRHQQAPIILQQQALPDLLSGTSDKFNLLAKLEHAQSRILSLESQLEDSARRWGREKQDLATRLQEQEKGFRHPSNSIIIEQPSALTHSMDLKQPSELEPLLPSSDSKLNKPLSPQKETANSQQT

SEQ ID NO: 12213 - protein, 143 aa, Homo sapiens
MSLWPPFRCRWKLAPRYSRRASPQQPQQDFEALLAECLRNGCLFEDTSFPATLSSIGSGSLLQKLPPRLQWKRPPELHSNPQFYFAKAKRLDLCQGIVGDCWFLAALQALALHQDILSRVVPLNQSFTEKYAGIFRFWALWFL

SEQ ID NO: 12214 - protein, 445 aa, Homo sapiens
MDNDPLVFGVSGEEASRFFAVEPDTGVVWLRQPLDRETKSEFTVEFSVSDHQGVITRKVNIQVGDVNDNAPTFHNQPYSVRIPENTPVGTPIFIVNATDPDLGAGGSVLYSFQPPSQFFAIDSARGIVTVIRELDYETTQAYQLTVNALAIIITNLPYSTNIYEHSPPGTTVRIITAIDQDKGRPRGIGYTIVSGNTNSIFALDYISGVLTLNGLLDRENPLYSHGFILTVKGTELNDDRTPSDATVTTTFNILVIDINDNAPEFNSSEYSVAITELAQVGFALPLFIQVVDKDEGLNSMFEVYLVGNNSHHFIISPTSVQGKADIRIRVAIPLDYETVDRYDFDLFANESVPDHVGYAKVKITLINENDNRPIFSQPLYNISLYENVTVGTSVLTVLVSPRFTAGPLSSPGPTVVRHPEGFCPRDLSNQGRRHPQIPELCLLVY

SEQ ID NO: 12215 - protein, 1093 aa, Homo sapiens
MSQPGIPASGGAPASLQAQNGAALASGSPYTNGPVQNALLSSQESVSQGYNFQLPGSYPHPIPAKTLNPVSGQSNYGGSQGSGQTLNRPPVASNPVTPSLHSGPAPRMPLPASQNPATTPMPSSSFLPEANLPPPLNWQYNYPSTASQTNHCPRASSQPTVSGNTSLTTNHQYVSSGYPSLQNSFIKSGPSVPPLVNPPLPTTFQPGAPHGPPPAGGPPPVRALTPLTSSYRDVPQPLFNSAVNQEGITSNTNNGSMVVHSSYDEIEGGGLLATPQLTNKNPKMSRSVGYSYPSLPPGYQNTTPPGATGVPPSSLNYPSGPQAFTQTPLGANHLTTSMSGLSLQPEGLRVVNLLQERNMLPSTPLKPPVPNLHEDIQKLNCNPELFRCTLTSIPQTQALLNKAKLPLGLLLHPFKDLVQLPVVTSSTIVRCRSCRTYINPFVSFLDQRRWKCNLCYRVNDVPEEFLYNPLTRVYGEPHRRPEVQNATIEFMAPSEYMLRPPQPPVYLFVFDVSHNAVETGYLNSVCQSLLDNLDLLPGNTRTKIGFITFDSTIHFYGLQESLSQPQMLIVSDIEDVFIPMPENLLVNLNESKELVQDLLKTLPQMFTKTLETQSALGPALQAAFKLMSPTGGRMSVFQTQLPTLGVGALKPREEPNHRSSAKDIHMTPSTDFYKKLALDCSGQQVAVDLFLLSGQYSDLASLGCISRYSAGSVYYYPSYHHQHNPVQVQKLQKELQRYLTRKIGFEAVMRIRCTKGLSIHTFHGNFFVRSTDLLSLPNVNPDAGYAVQMSVEESLTDTQLVSFQSALLYTSSKGERRIRVHTLCLPVVSTLNDVFLGADVQAISGLLANMAVDRSMTASLSDARDALVNAVIDSLSAYRSSVLSNQQPGLMVPFSLRLFPLFVLALLKQKSFQTGTNARLDERIFAMCQVKNQPLVYLMLTTHPSLYRVDNLSDEGALNISDRTIPQPPILQLSVEKLSRDGAFLMDAGSVLMLWVGKNCTQNFLSQVLGVQNYASIPQPMTDLPELDTPESARIIAFISWLREQRPFFPILYVIRDESPMKANFLQNMIEDRTESALSYYEFLLHIQQQVNK

SEQ ID NO: 12216 - protein, 541 aa, Homo sapiens
MLSPQRVAAAASRGADDAMESSKPGPVQVVLVQKDQHSFELDEKALASILLQDHIRDLDVVVVSVAGAFRKGKSFILDFMLRYLYSQKESGHSNWLGDPEEPLTGFSWRGGSDPETTGIQIWSEVFTVEKPGGKKVAVVLMDTQGAFDSQSTVKDCATIFALSTMTSSVQIYNLSQNIQEDDLQQLQLFTEYGRLAMDEIFQKPFQTLMFLVRDWSFPYEYSYGLQGGMAFLDKRLQVKEHQHEEIQNVRNHIHSCFSDVTCFLLPHPGLQVATSPDFDGKLKDIAGEFKEQLQALIPYVLNPSKLMEKEINGSKVTCRGLLEYFKAYIKIYQGEDLPHPKSMLQATAEANNLAAAASAKDIYYNNMEEVCGGEKPYLSPDILEEKHCEFKQLALDHFKKTKKMGGKDFSFRYQQELEEEIKELYENFCKHNGSKNVFSTFRTPAVLFTGIVALYIASGLTGFIGLEVVAQLFNCMVGLLLIALLTWGYIRYSGQYRELGGAIDFGAAYVLEQASSHIGNSTQATVRDAVVGRPSMDKKAQ

SEQ ID NO: 12217 - protein, 824 aa, Homo sapiens
MGEAEKFHYIYSCDLDINVQLKIWNEWLKLPVKYPDLPRNAQVALTIWDVYGPGKAVPVGGTTVSLFGKYGMFRQGMHDLKVWPNVEADGSEPTKTPGRTSSTLSEDQMSRLAKLTKAHRQGHMVKVDWLDRLTFREIEMINESEKRSSNFMYLMVEFRCVKCDDKEYGIVYYEKDGDESSPILTSFELVKVPDPQMSMENLVESKHHKLARSLRSGPSDHDLKPNAATRDQLNIIVSYPPTKQLTYEEQDLVWKFRYYLTNQEKALTKFLKCVNWDLPQEAKQALELLGKWKPMDVEDSLELLSSHYTNPTVRRYAVARLRQADDEDLLMYLLQLVQALKYENFDDIKNGLEPTKKDSQSSVSENVSNSGINSAEIDSSQIITSPLPSVSSPPPASKTKEVPDGENLEQDLCTFLISRACKNSTLANYLYWYVIVECEDQDTQQRDPKTHEMYLNVMRRFSQALLKGDKSVRVMRSLLAAQQTFVDRLVHLMKAVQRESGNRKKKNERLQALLGDNEKMNLSDVELIPLPLEPQVKIRGIIPETATLFKSALMPAQLFFKTEDGGKYPVIFKHGDDLRQDQLILQIISLMDKLLRKENLDLKLTPYKVLATSTKHGFMQFIQSVPVAEVLDTEGSIQNFFRKYAPSENGPNGISAEVMDTYVKSCAGYCVITYILGVGDRHLDNLLLTKTGKLFHIDFGYILGRDPKPLPPPMKLNKEMVEGMGGTQSEQYQEFRKQCYTAFLHLRRYSNLILNLFSLMVDANIPDIALEPDKTVKKVQDKFRLDLSDEEAVHYMQSLIDESVHALFAAVVEQIHKFAQYWRK

SEQ ID NO: 12218 - protein, 719 aa, Homo sapiens
MAGGVWGRSRAREAPVGALTLTALTEGIRARQGQPQGPPSAGPQPKSWEVKPEAEPQTQALTAPSEAEPGRGATVPEAGSEPCSLNSALEPAPEGPHQVPQSSWEEGVLADLALYTAACLEEAGFAGTQATVLTLSSALEARGERLEDQVHALVRGLLAQVPSLAEGRPWRAALRVLSALALEHARDVVCALLPRSLPADRVAAELWRSLSRNQRVNGQVLVQLLWALKGASGPEPQALAATRALGEMLAVSGCVGATRGFYPHLLLALVTQLHKLARSPCSPDMPKIWVLSHRGPPHSHASCAVEALKALLTGDGGRMVVTCMEQAGGWRRLVGAHTHLEGVLLLASAMVAHADHHLRGLFADLLPRLRSADDPQRLTAMAFFTGLLQSRPTARLLREEVILERLLTWQGDPEPTVRWLGLLGLGHLALNRRKVRHVSTLLPALLGALGEGDARLVGAALGALRRLLLRPRAPVRLLSAELGPRLPPLLDDTRDSIRASAVGLLGTLVRRGRGGLRLGLRGPLRKLVLQSLVPLLLRLHDPSRDAAESSEWTLARCDHAFCWGLLEELVTVAHYDSPEALSHLCCRLVQRYPGHVPNFLSQTQGYLRSPQDPLRRAAAVLIGFLVHHASPGCVNQDLLDSLFQDLGRLQSDPKPAVAAAAHVSAQQVAMLARARGCPRGPRLLRIAPRPARPPPVFADSPFQRRSVAGRWGCSGPRRA

SEQ ID NO: 12219 - protein, 1318 aa, Homo sapiens
MSGGASATGPRRGPPGLEDTTSKKKQKDRANQESKDGDPRKETGSRYVAQAGLEPLASGDPSASASHAAGITGSRHRTRLFFPSSSGSASTPQEEQTKEGACEDPHDLLATPTPELLLDWRQSAEEVIVKLRVGVGPLQLEDVDAAFTDTDCVVRFAGGQQWGGVFYAEIKSSCAKVQTRKGSLLHLTLPKKVPMLTWPSLLVEADEQLCIPPLNSQTCLLGSEENLAPLAGEKAVPPGNDPVSPAMVRSRNPGKDDCAKEEMAVAADAATLVDEPESMVNLAFVKNDSYEKGPDSVVVHVYVKEICRDTSRVLFREQDFTLIFQTRDGNFLRLHPGCGPHTTFRWQVKLRNLIEPEQCTFCFTASRIDICLRKRQSQRWGGLEAPAARVGGAKVAVPTGPTPLDSTPPGGAPHPLTGQEEARAVEKDKSKARSEDTGLDSVATRTPMEHVTPKPETHLASPKPTCMVPPMPHSPVSGDSVEEEEEEEKKVCLPGFTGLVNLGNTCFMNSVIQSLSNTRELRDFFHDRSFEAEINYNNPLGTGGRLAIGFAVLLRALWKGTHHAFQPSKLKAIVASKASQFTGYAQHDAQEFMAFLLDGLHEDLNRIQNKPYTETVDSDGRPDEVVAEEAWQRHKMRNDSFIVDLFQGQYKSKLVCPVCAKVSITFDPFLYLPVPLPQKQKVLPVFYFAREPHSKPIKFLVSVSKENSTASEVLDSLSQSVHVKPENLRLAEVIKNRFHRVFLPSHSLDTVSPSDTLLCFELLSSELAKERVVVLEVQQRPQVPSVPISKCAACQRKQQSEDEKLKRCTRCYRVGYCNQLCQKTHWPDHKGLCRPENIGYPFLVSVPASRLTYARLAQLLEGYARYSVSVFQPPFQPGRMALESQSPGCTTLLSTGSLEAGDSERDPIQPPELQLVTPMAEGDTGLPRVWAAPDRGPVPSTSGISSEMLASGPIEVGSLPAGERVSRPEAAVPGYQHPSEAMNAHTPQFFIYKIDSSNREQRLEDKGDTPLELGDDCSLALVWRNNERLQEFVLVASKELECAEDPGSAGEAARAGHFTLDQCLNLFTRPEVLAPEEAWYCPQCKQHREASKQLLLWRLPNVLIVQLKRFSFRSFIWRDKINDLVEFPVRNLDLSKFCIGQKEEQLPSYDLYAVINHYGGMIGGHYTACARLPNDRSSQRSDVGWRLFDDSTVTTVDESQVVTRYAYVLFYRRRNSPVERPPRAGHSEHHPDLGPAAEAAASQASRIWQELEAEEEPVPEGSGPLGPWGPQDWVGPLPRGPTTPDEGCLRYFVLGTVAALVALVLNVFYPLVSQSRWR

SEQ ID NO: 12220 - protein, 1179 aa, Homo sapiens
STPQEEQTKEELLLDWRQSAEEVIVKLRVGVGPLQLEDVDAAFTDTDCVVRFAGGQQWGGVFYAEIKSSCAKVQTRKGSLLHLTLPKKVPMLTWPSLLVEADEQLCIPPLNSQTCLLGSEENLAPLAGEKAVPPGNDPVSPAMVRSRNPGKDDCAKEEMAVAADAATLVDEPESMVNLAFVKNDSYEKGPDSVVVHVYVKEICRDTSRVLFREQDFTLIFQTRDGNFLRLHPGCGPHTTFRWQVKLRNLIEPEQCTFCFTASRIDICLRKRQSQRWGGLEAPAARGAVGGAKVAVPTGPTPLDSTPPGGAPHPLTGQEEARAVEKDKSKARSEDTGLDSVATRTPMEHVTPKPETHLASPKPTCMVPPMPHSPVSGDSVEEEEEEEKKVCLPGFTGLVNLGNTCFMNSVIQSLSNTRELRDFFHDRSFEAEINYNNPLGTGGRLAIGFAVLLRALWKGTHHAFQPSKLKAIVASKASQFTGYAQHDAQEFMAFLLDGLHEDLNRIQNKPYTETVDSDGRPDEVVAEEAWQRHKMRNDSFIVDLFQGQYKSKLVCPVCAKVSITFDPFLYLPVPLPQKQKVLPVFYFAREPHSKPIKFLVSVSKENSTASEVLDSLSQSVHVKPENLRLAEVIKNRFHRVFLPSHSLDTVSPSDTLLCFELLSSELAKERVVVLEVQQRPQVPSVPISKCAACQRKQQSEDEKLKRCTRCYRVGYCNQLCQKTHWPDHKGLCRPENIGYPFLVSVPASRLTYARLAQLLEGYARYSVSVFQPPFQPGRMALESQSPGCTTLLSTGSLEAGDSERDPIQPPELQLVTPMAEGDTGLPRVWAAPDRGPVPSTSGISSEMLASGPIEVGSLPAGERVSRPEAAVPGYQHPSEAMNAHTPQFFIYKIDSSNREQRLEDKGDTPLELGDDCSLALVWRNNERLQEFVLVASKELECAEDPGSAGEAARAGHFTLDQCLNLFTRPEVLAPEEAWYCPQCKQHREASKQLLLWRLPNVLIVQLKRFSFRSFIWRDKINDLVEFPVRNLDLSKFCIGQKEEQLPSYDLYAVINHYGGMIGGHYTACARLPNDRSSQRSDVGWRLFDDSTVTTVDESQVVTRYAYVLFYRRRNSPVERPPRAGHSEHHPDLGPAAEAAASQGLGPGQAPEVAPTRTAPERFAPPVDRPAPTYSNMEEVD

SEQ ID NO: 12221 - protein, 363 aa, Homo sapiens
MVGSPDTVGMNYGSYMEEKHMPPPNMTTNERRVIVPADPTLWSTDHVRQWLEWAVKEYGLPDVNILLFQNIDGKELCKMTKDDFQRLTPSYNADILLSHLHYLRETPLPHLTSDDVDKALQNSPRLMHARNTDLPYEPPRRSAWTGHGHPTPQSKAAQPSPSTVPKTEDQRPQLDPYQILGPTSSRLANPGSGQIQLWQFLLELLSDSSNSSCITWEGTNGEFKMTDPDEVARRWGERKSKPNMNYDKLSRALRYYYDKNIMTKVHGKRYAYKFDFHGIAQALQPHPPESSLYKYPSDLPYMGSYHAHPQKMNFVAPHPPALPVTSSSFFAAPNPYWNSPTGGIYPNTRLPTSHMPSHLGTYY

SEQ ID NO: 12222 - protein, 455 aa, Homo sapiens
MASTIKEALSVVSEDQSLFECAYGTPHLAKTEMTASSSSDYGQTSKMSPRVPQQDWLSQPPARVTIKMECNPSQVNGSRNSPDECSVAKGGKMVGSPDTVGMNYGSYMEEKHMPPPNMTTNERRVIVPADPTLWSTDHVRQWLEWAVKEYGLPDVNILLFQNIDGKELCKMTKDDFQRLTPSYNADILLSHLHYLRETPLPHLTSDDVDKALQNSPRLMHARNTDLPYEPPRRSAWTGHGHPTPQSKAAQPSPSTVPKTEDQRPQLDPYQILGPTSSRLANPGSGQIQLWQFLLELLSDSSNSSCITWEGTNGEFKMTDPDEVARRWGERKSKPNMNYDKLSRALRYYYDKNIMTKVHGKRYAYKFDFHGIAQALQPHPPESSLYKYPSDLPYMGSYHAHPQKMNFVAPHPPALPVTSSSFFAAPNPYWNSPTGGIYPNTRLPTSHMPSHLGTYY

SEQ ID NO: 12223 - protein, 456 aa, Homo sapiens
MASTIKEALSVVSEDQSLFECAYGTPHLAKTEMTASSSSDYGQTSKMSPRVPQQDWLSQPPARVTIKMECNPSQVNGSRNSPDECSVAKGGKMVGSPDTVGMNYGSYMEEKHMPPPNMTTNERRVIVPADPTLWSTDHVRQWLEWAVKEYGLPDVNILLFQNIDGKELCKMTKDDFQRLTPSYNADILLSHLHYLRETPLPHLTSDDVDKALQNSPRLMHARNTGGAAFIFPNTSVYPEATQRITTRPAAQPSPSTVPKTEDQRPQLDPYQILGPTSSRLANPGSGQIQLWQFLLELLSDSSNSSCITWEGTNGEFKMTDPDEVARRWGERKSKPNMNYDKLSRALRYYYDKNIMTKVHGKRYAYKFDFHGIAQALQPHPPESSLYKYPSDLPYMGSYHAHPQKMNFVAPHPPALPVTSSSFFAAPNPYWNSPTGGIYPNTRLPTSHMPSHLGTYY

SEQ ID NO: 12224 - protein, 463 aa, Homo sapiens
MIQTVPDPAAHIKEALSVVSEDQSLFECAYGTPHLAKTEMTASSSSDYGQTSKMSPRVPQQDWLSQPPARVTIKMECNPSQVNGSRNSPDECSVAKGGKMVGSPDTVGMNYGSYMEEKHMPPPNMTTNERRVIVPADPTLWSTDHVRQWLEWAVKEYGLPDVNILLFQNIDGKELCKMTKDDFQRLTPSYNADILLSHLHYLRETPLPHLTSDDVDKALQNSPRLMHARNTGGAAFIFPNTSVYPEATQRITTRPAAQPSPSTVPKTEDQRPQLDPYQILGPTSSRLANPGSGQIQLWQFLLELLSDSSNSSCITWEGTNGEFKMTDPDEVARRWGERKSKPNMNYDKLSRALRYYYDKNIMTKVHGKRYAYKFDFHGIAQALQPHPPESSLYKYPSDLPYMGSYHAHPQKMNFVAPHPPALPVTSSSFFAAPNPYWNSPTGGIYPNTRLPTSHMPSHLGTYY

SEQ ID NO: 12225 - protein, 462 aa, Homo sapiens
MIQTVPDPAAHIKEALSVVSEDQSLFECAYGTPHLAKTEMTASSSSDYGQTSKMSPRVPQQDWLSQPPARVTIKMECNPSQVNGSRNSPDECSVAKGGKMVGSPDTVGMNYGSYMEEKHMPPPNMTTNERRVIVPADPTLWSTDHVRQWLEWAVKEYGLPDVNILLFQNIDGKELCKMTKDDFQRLTPSYNADILLSHLHYLRETPLPHLTSDDVDKALQNSPRLMHARNTDLPYEPPRRSAWTGHGHPTPQSKAAQPSPSTVPKTEDQRPQLDPYQILGPTSSRLANPGSGQIQLWQFLLELLSDSSNSSCITWEGTNGEFKMTDPDEVARRWGERKSKPNMNYDKLSRALRYYYDKNIMTKVHGKRYAYKFDFHGIAQALQPHPPESSLYKYPSDLPYMGSYHAHPQKMNFVAPHPPALPVTSSSFFAAPNPYWNSPTGGIYPNTRLPTSHMPSHLGTYY

SEQ ID NO: 12226 - protein, 486 aa, Homo sapiens
MIQTVPDPAAHIKEALSVVSEDQSLFECAYGTPHLAKTEMTASSSSDYGQTSKMSPRVPQQDWLSQPPARVTIKMECNPSQVNGSRNSPDECSVAKGGKMVGSPDTVGMNYGSYMEEKHMPPPNMTTNERRVIVPADPTLWSTDHVRQWLEWAVKEYGLPDVNILLFQNIDGKELCKMTKDDFQRLTPSYNADILLSHLHYLRETPLPHLTSDDVDKALQNSPRLMHARNTGGAAFIFPNTSVYPEATQRITTRPDLPYEPPRRSAWTGHGHPTPQSKAAQPSPSTVPKTEDQRPQLDPYQILGPTSSRLANPGSGQIQLWQFLLELLSDSSNSSCITWEGTNGEFKMTDPDEVARRWGERKSKPNMNYDKLSRALRYYYDKNIMTKVHGKRYAYKFDFHGIAQALQPHPPESSLYKYPSDLPYMGSYHAHPQKMNFVAPHPPALPVTSSSFFAAPNPYWNSPTGGIYPNTRLPTSHMPSHLGTYY

SEQ ID NO: 12227 - protein, 61 aa, Homo sapiens
MDAIHIGMSSTPLVKHTAGAGLKANRPRVMSKSGHSNVRIDKVDGIYLLYLQDLWTTVIDM

SEQ ID NO: 12228 - protein, 156 aa, Homo sapiens
MDAIHIGMSSTPLVKHTAGAGLKANRPRVMSKSGHSNVRIDKVDGIYLLYLQDLWTTVIDMKWRYKLTLFAATFVMTWFLFGVIYYAIAFIHGDLEPGEPISNHTPCIMKVDSLTGAFLFSLESQTTIGYGVRSITEECPHAIFLLVAQLVITTLI

SEQ ID NO: 12229 - protein, 865 aa, Homo sapiens
MPAVSLPPKENALFKRILRCYEHKQYRNGLKFCKQILSNPKFAEHGETLAMKGLTLNCLGKKEEAYELVRRGLRNDLKSHVCWHVYGLLQRSDKKYDEAIKCYRNALKWDKDNLQILRDLSLLQIQMRDLEGYRETRYQLLQLRPAQRASWIGYAIAYHLLEDYEMAAKILEEFRKTQQTSPDKVDYEYSELLLYQNQVLREAGLYREALEHLCTYEKQICDKLAVEETKGELLLQLCRLEDAADVYRGLQERNPENWAYYKGLEKALKPANMLERLKIYEEAWTKYPRGLVPRRLPLNFLSGEKFKECLDKFLRMNFSKGCPPVFNTLRSLYKDKEKVAIIEELVVGYETSLKSCRLFNPNDDGKEEPPTTLLWVQYYLAQHYDKIGQPSIALEYINTAIESTPTLIELFLVKAKIYKHAGNIKEAARWMDEAQALDTADRFINSKCAKYMLKANLIKEAEEMCSKFTREGTSAVENLNEMQCMWFQTECAQAYKAMNKFGEALKKCHEIERHFIEITDDQFDFHTYCMRKITLRSYVDLLKLEDVLRQHPFYFKAARIAIEIYLKLHDNPLTDENKEHEADTANMSDKELKKLRNKQRRAQKKAQIEEEKKNAEKEKQQRNQKKKKDDDDEEIGGPKEELIPEKLAKVETPLEEAIKFLTPLKNLVKNKIETHLFAFEIYFRKEKFLLMLQSVKRAFAIDSSHPWLHECMIRLFNTVCESKDLSDTVRTVLKQEMNRLFGATNPKNFNETFLKRNSDSLPHRLSAAKMVYYLDPSSQKRAIELATTLDESLTNRNLQTCMEVLEALYDGSLGDCKEAAEIYRANCHKLFPYALAFMPPGYEEDMKITVNGDSSAEAEELANEI

SEQ ID NO: 12230 - protein, 529 aa, Homo sapiens
MHTGGETSACKPSSVRLAPSFSFHAAGLQMAGQMPHSHQYSDRRQPNISDQQVSALSYSDQIQQPLTNQVMPDIVMLQRRMPQTFRDPATAPLRKLSVDLIKTYKHINEVYYAKKKRRHQQGQGDDSSHKKERKVYNDGYDDDNYDYIVKNGEKWMDRYEIDSLIGKGSFGQVVKAYDRVEQEWVAIKIIKNKKAFLNQAQIEVRLLELMNKHDTEMKYYIVHLKRHFMFRNHLCLVFEMLSYNLYDLLRNTNFRGVSLNLTRKFAQQMCTALLFLATPELSIIHCDLKPENILLCNPKRSAIKIVDFGSSCQLGQRIYQYIQSRFYRSPEVLLGMPYDLAIDMWSLGCILVEMHTGEPLFSGANEVDQMNKIVEVLGIPPAHILDQAPKARKFFEKLPDGTWNLKKTKDGKREYKPPGTRKLHNILGVETGGPGGRRAGESGHTVADYLKFKDLILRMLDYDPKTRIQPYYALQHSFFKKTADEGTNTSNSVSTSPAMEQSQSSGTTSSTSSSSGASAISCSSWLVRH

SEQ ID NO: 12231 - protein, 414 aa, Homo sapiens
MGVSKLDILYRRLLLTKLFIRGWGRPEDLKRLFEFRKMIGNRERCQNLVSSDYPVHIDKIEEQSDCKILDGHFVSPMAHYVPDIMPIESVIARFQFIVPKEWNSKYRPVCIHLAGTGDHHYWRRRTLMARPMIKEARMASLLLENPYYGCRKPKDQVRSSLKNVSDLFVMGGALVLESAALLHWLEREGYGPLGMTGISMGGHMASLAVSNWPKPMPLIPCLSWSTASGVFTTTDSFKMGQEFVKHFTSSADKLTNLNLVSRTLNLDISNQVVSQKPADCHNSSKTSVSATSEGLLLQDTSKMKRFNQTLSTNKSGYTSRNPQSYHLLSKEQSRNSLRKESLIFMKGVMDECTHVANFSVPVDPSLIIVVQAKEDAYIPRTGVRSLQEIWPGCEIRYLEGGHISAYLFKQGLFR

SEQ ID NO: 12232 - protein, 642 aa, Homo sapiens [sequence omitted]

SEQ ID NO: 12233 - protein, 717 aa, Homo sapiens
MVAERTHKAAATGARGPGELGAPGTVALVAARAERGARLPSPGSCGLLTLALCSLALSLLAHFRTAELQARVLRLEAERGEQQMETAILGRVNQLLDEKWKLHSRRRREAPKTSPGCNCPPGPPGPTGRPGLPGDKGAIGMPGRVGSPGDAGLSIIGPRGPPGQPGTRGFPGFPGPIGLDGKPGHPGPKGDMGLTGPPGQPGPQGQKGEKGQCGEYPHRECLSSMPAALRSSQIIALKLLPLLNSVRLAPPPVIKRRTFQGEQSQASIQGPPGPPGPPGPSGPLGHPGLPGPMGPPGLPGPPGPKGDPGIQGYHGRKGERGMPGMPGKHGAKGAPGIAVAGMKGEPGIPGTKGEKGAEGSPGLPGLLGQKGEKGDAGNSIGGGRGEPGPPGLPGPPGPKGEAGVDGQVGPPGQPGDKGERGAAGEQGPDGPKGSKGEPGKGEMVDYNGNINEALQEIRTLALMGPPGLPGQIGPPGAPGIPGQKGEIGLPGPPGHDGEKGPRGKPGDMGPPGPQGPPGKDGPPGVKGENGHPGSPGEKGEKGETGQAGSPGEKGEAGEKGNPGAEVPGLPGPEGPPGPPGLQGVPGPKGEAGLDGAKGEKGFQGEKGDRGPLGLPGASGLDGRPGPPGTPGPIGVPGPAGPKGERGSKGDPGMTGPTGAAGLPGLHGPPGDKGNRGERGKKGSRGPKGDKGDQGAPGLDAPCPLGEDGLPVQGCWNK

SEQ ID NO: 12234 - protein, 612 aa, Homo sapiens
HSFITPPTTPQLRRHTKLKPPRTPPPPSRKVFQLLPSFPTLTRSKSHESQLGNRIDDVSSMRFDLSHGSPQMVRRDIGLSVTHRFSTKSWLSQVCHVCQKSMIFGVKCKHCRLKCHNKCTKEAPACRISFLPLTRLRRTESVPSDINNPVDRAAEPHFGTLPKALTKKEHPPAMNHLDSSSNPSSTTSSTPSSPAPFPTSSNPSSATTPPNPSPGQRDSRFNFPAAYFIHHRQQFIFPDISAFAHAAPLPEAADGTRLDDQPKADVLEAHEAEAEEPEAGKSEAEDDEDEVDDLPSSRRPWRGPISRKASQTSVYLQEWDIPFEQVELGEPIGQGRWGRVHRGRWHGEVAIRLLEMDGHNQDHLKLFKKEVMNYRQTRHENVVLFMGACMNPPHLAIITSFCKGRTLHSFVRDPKTSLDINKTRQIAQEIIKGMGYLHAKGIVHKDLKSKNVFYDNGKVVITDFGLFGISGVVREGRRENQLKLSHDWLCYLAPEIVREMTPGKDEDQLPFSKAADVYAFGTVWYELQARDWPLKNQAAEASIWQIGSGEGMKRVLTSVSLGKEVSEILSACWAFDLQERPSFSLLMDMLEKLPKLNRRLSHPGHFWKSAEL

SEQ ID NO: 12235 - protein, 323 aa, Homo sapiens
MTEQVIGANSVPGIIAPDNVHVIQPSNPVASGNHLQPSEVTTYPISPKVIHCDTGRANLQNLLVVNQNSAAGVQSQPIGYQRQYPVGTASLQTVPGVIQYTQGTTNLQTWPGDLQNPLNANPGLTHTSNSSQWNTSFASFTSFNPKKFINEEVRTLGAIQILIGLTHIFSAINPVLYYYPFVTWLSGYPLWGGLSYIVSGSLSVWAAKDPSPCVVNSSISFNIISALFAFAGIFIIITDLSLYYVTTYSKAVSGGLLPFALLEFILTCVVSHFGCQATCCRQFENVAVIPTVFSFNPANTTTSPVNATTGPVNAATGPVSATN

SEQ ID NO: 12236 - protein, 762 aa, Homo sapiens
MNEAKVKETLRRCGASGDECGRLQYALTCLRKVTGLGGEHKEDSSWSSLDARRESGSGPSTDTLSAASLPWPPGSSQLGRAGNSAQGPRSISVSALPASDSPTPSFSEGLSDTCIPLHASGRLTPRALHSFITPPTTPQLRRHTKLKPPRTPPPPSRKVFQLLPSFPTLTRSKSHESQLGNRIDDVSSMRFDLSHGSPQMVRRDIGLSVTHRFSTKSWLSQVCHVCQKSMIFGVKCKHCRLKCHNKCTKEAPACRISFLPLTRLRRTESVPSDINNPVDRAAEPHFGTLPKALTKKEHPPAMNHLDSSSNPSSTTSSTPSSPAPFPTSSNPSSATTPPNPSPGQRDSRFNFPAAYFIHHRQQFIFPVPSAGHCWKCLLIAESLKENAFNISAFAHAAPLPEAADGTRLDDQPKADVLEAHEAEAEEPEAGKSEAEDDEDEVDDLPSSRRPWRGPISRKASQTSVYLQEWDIPFEQVELGEPIGQGRWGRVHRGRWHGEVAIRLLEMDGHNQDHLKLFKKEVMNYRQTRHENVVLFMGACMNPPHLAIITSFCKGRTLHSFVRDPKTSLDINKTRQIAQEIIKGMGYLHAKGIVHKDLKSKNVFYDNGKVVITDFGLFGISGVVREGRRENQLKLSHDWLCYLAPEIVREMTPGKDEDQLPFSKAADVYAFGTVWYELQARDWPLKNQAAEASIWQIGSGEGMKRVLTSVSLGKEVSEILSACWAFDLQERPSFSLLMDMLEKLPKLNRRLSHPGHFWKSAEL

SEQ ID NO: 12237 - protein, 552 aa, Homo sapiens
MANPGGGAVCNGKLHNHKKQSNGSQSRNCTKNGIVKEAQQNGKPHFYDKLIVESFEEAPLHVMVFTYMGYGIGTLFGYLRDFLRNWGIEKCNAAVERKEQKDFVPLYQDFENFYTRNLYMRIRDNWNRPICSAPGPLFDLMERVSDDYNWTFRFTGRVIKDVINMGSYNFLGLAAKYDESMRTIKDVLEVYGTGVASTRHEMGTLDKHKELEDLVAKFLNVEAAMVFGMGFATNSMNIPALVGKGCLILSDELNHTSLVLGARLSGATIRIFKHNNTQSLEKLLRDAVIYGQPRTRRAWKKILILVEGVYSMEGSIVHLPQIIALKKKYKAYLYIDEAHSIGAVGPTGRGVTEFFGLDPHEVDVLMGTFTKSFGASGGYIAGRKDLVDYLRVHSHSAVYASSMSPPIAEQIIRSLKLIMGLDGTTQGLQRVQQLAKNTRYFRQRLQEMGFIIYGNENASVVPLLLYMPGKVAAFARHMLEKKIGVVVVGFPATPLAEARARFCVSAAHTREMLDTVLEALDEMGDLLQLKYSRHKKSARPELYDETSFELED

SEQ ID NO: 12238 - protein, 522 aa, Homo sapiens
MVRSGKNGDLHLKQIAYYKRTGEYHSTTLPSERSGIRRAAKKFVFKEKKLFYVGKDRKQNRLVIVSEEEKKKVLRECHENDSGAHHGISRTLTLVESNYYWTSVTNDVKQWVYACQHCQVAKNTVIVAPKQHLLKVENPWSLVTVDLMGPFHTSNRSHVYAIIMTDLFTKWIVILPLCDVSASEVSKAIINIFFLYGPPQKIIMDQRDEFIQQINIELYRLFGIKQIVISHTSGTVNPTESTPNTIKAFLSKHCADHPNNWDDHLSAVSFAFNVTHLEPTKNTPYFQMFSRNPYMPETSDSLHEVDGDNTSMFAKILDAIKEADKIMENKTTSLGQMENNNLDELNKSKIIVKKKPKQLNPFHLKVGHEVLRQRKNWWKDGRFQSEWVGPCVIDYITESGCAVLRDNTGVRLKRPIKMSHLKPYIRESSEQESLYLLQGSVVADHDYIGLPEIPIGAYQANILVEDATIGIVDNELLTSSKDRELLEYRNTKISPLIDDHSSLEKQTFSLLDSSNQVLEYLS

SEQ ID NO: 12239 - protein, 344 aa, Homo sapiens
MANYTLAPEDEYDVLIEGELESDEAEQCDKYDAQALSAQLVPSLCSAVFVIGVLDNLLVVLILVKYKGLKRVENIYLLNLAVSNLCFLLTLPFWAHAGGDPMCKILIGLYFVGLYSETFFNCLLTVQRYLVFLHKGNFFSARRRVPCGIITSVLAWVTAILATLPEFVVYKPQMEDQKYKCAFSRTPFLPADETFWKHFLTLKMNISVLVLPLFIFTFLYVQMRKTLRFREQRYSLFKLVFAIMVVFLLMWAPYNIAFFLSTFKEHFSLSDCKSSYNLDKSVHITKLIATTHCCINPLLYAFLDGTFSKYLCRCFHLRSNTPLQPRGQSAQGTSREEPDHSTEV

SEQ ID NO: 12240 - protein, 281 aa, Homo sapiens
MFSCCFPTSRGCCFRNGGSESLFRQCRRRLIPHPRRLWPFVRRRTQVPQDSPGQALAGQATPEIPSGLPLHIVLVQEEIREPMEAQTHAPGPYADIAALAAPAVEPKPAWEEPPPERALEVEGAPAKDQPSQELPEIMAPTVATGLNAGAENVAGERSGREGVTSTAPASRSHAAPSPGHGGKHGGGDQGIQTGLLYLAGERLLSFAGTTALLLQGLFIVLILVGYISVKVMLKSIKTRLGRRVPAAPPALRRNLLLQAWKCVCNWASRLFAPNVLPRTGS

SEQ ID NO: 12241 - protein, 968 aa, Homo sapiens
MDDSEVESTASILASVKEQEAQFEKLTRALEEERRHVSAQLERVRVSPQDANPLMANGTLTRRHQNGRFVGDADLERQKFSDLKLNGPQDHSHLLYSTIPRMQEPGQIVETYTEEDPEGAMSVVSVETSDDGTTRRTETTVKKVVKTVTTRTVQPVAMGPDGLPVDASSVSNNYIQTLGRDFRKNGNGGPGPYVGQAGTATLPRNFHYPPDGYSRHYEDGYPGGSDNYGSLSRVTRIEERYRPSMEGYRAPSRQDVYGPQPQVRVGGSSVDLHRFHPEPYGLEDDQRSMGYDDLDYGMMSDYGTARRTGTPSDPRRRLRSYEDMIGEEVPSDQYYWAPLAQHERGSLASLDSLRKGGPPPPNWRQPELPEVIAMLGFRLDAVKSNAAAYLQHLCYRNDKVKTDVRKLKGIPVLVGLLDHPKKEVHLGACGALKNISFGRDQDNKIAIKNCDGVPALVRLLRKARDMDLTEVITGTLWNLSSHDSIKMEIVDHALHALTDEVIIPHSGWEREPNEDCKPRHIEWESVLTNTAGCLRNVSSERSEARRKLRECDGLVDALIFIVQAEIGQKDSDSKLVENCVCLLRNLSYQVHREIPQAERYQEAAPNVANNTGPHAASCFGAKKGKDEWFSRGKKPIEDPANDTVDFPKRTSPARGYELLFQPEVVRIYISLLKESKTPAILEASAGAIQNLCAGRWTYGRYIRSALRQEKALSAIADLLTNEHERVVKAASGALRNLAVDARNKELIGKHAIPNLVKNLPGGQQNSSWNFSEDTVISILNTINEVIAENLEAAKKLRETQGIEKLVLINKSGNRSEKEVRAAALVLQTIWGYKELRKPLEKEGWKKSDFQVNLNNASRSQSSHSYDDSTLPLIDRNQKSDKKPDREEIQMSNMGSNTKSLDNNYSTPNERGDHNRTLDRSGDLGDMEPLKGTTPLMQDEGQESLEEELDVLVLDDEGGQVSYPSMQKI

SEQ ID NO: 12242 - protein, 660 aa, Homo sapiens
MSNFEKEHRVQHHDKEISRSRIPRLILRPHMPQQQHKVSPASESPFSEEESREFNPSSSGRSARTVSSNSFCSDDTGCPSSQSVSPVKTPSDAGNSPIGFCPGSDEGFTRKKCTIGMVGEGSIQSSRYKKESKSGLVKPGSEADFSSSSSTGSISAPEVHMSTAGSKRSSSSRNRGPHGRSNGASSHKPGSSPSSPREKDLLSMLCRNQLSPVNIHPSYAPSSPSSSNSGSYKGSDCSPIMRRSGRYMSCGENHGVRPPNPEQYLTPLQQKEVTVRHLKTKLKESERRLHERESEIVELKSQLARMREDWIEEECHRVEAQLALKEARKEIKQLKQVIETMRSSLADKDKGIQKYFVDINIQNKKLESLLQSMEMAHSGSLRDELCLDFPCDSPEKSLTLNPPLDTMADGLSLEEQVTGEGADRELLVGDSIANSTDLFDEIVTATTTESGDLELVHSTPGANVLELLPIVMGQEEGSVVVERAVQTDVVPYSPAISELIQSVLQKLQDPCPSSLASPDESEPDSMESFPESLSALVVDLTPRNPNSAILLSPVETPYANVDAEVHANRLMRELDFAACVEERLDGVIPLARGGVVRQYWSSSFLVDLLAVAAPVVPTVLWAFSTQRGGTDPVYNIGALLRGCCVVALHSLRRTAFRIKT

SEQ ID NO: 12243 - protein, 224 aa, Homo sapiens
MSWKKALRIPGDLRVATVTLMLAMLSSLLAEGRDSPEDFVFQFKGMCYFTNGTERVRLVTRYIYNREEYARFDSDVGVYRAVTPQGRPDAEYWNSQKEVLEGTRAELDTVCRHNYEVAFRGILQRRVEPTVTISPSRTEALNHHNLLVCSVTDFYPGQIKVRWFRNDQEETAGVVSTPLIRNGDWTFQILVMLEMTPQRGDVYTCHVEHPSLQSPITVEWRLLH

SEQ ID NO: 12244 - protein, 1159 aa, Homo sapiens
MSLPQPTPRMAELRKPTSSLTPPEDPDSQPPSSKRLCLEEPGGVFKAGWRLPLVPRLSEAEKVWELSPRPFKGLLVSTNAIFDNSTDSCVEKSVSGKQICNLKCSNLKFQMSSCLQSPPSQSPDSDLRASGRSEAGLHDREAFSVHRSNSSKAGVSQLLPSTSIHDIHGIRNENRKQQFVQGRDNVHKENPFLDVTFYKETKSPFHEIKNRCKANSVVPSNKRENNISSSVLKISKSQNQPSLEIAKPSYFRDSGTISVPQFPMDLNSKMSSVYLKEIAKKKNDKKEAYVRDFTNIYWSQNRPDVKKQKLQNDKKTVEAENIFSKCYENDYPSLSSQNTCKRKDLISSNYCNCSSIQCNVRDSRKNFAILENANWEEAECLDSYVLTRLEKSQNWDCNVRHILRRNRGNCWIINNCKTKCENMKKTEEKWNWLLLLEIDLLSKEDYHCAKVINAYEEQSKLLVREILGSQTALITTVWLNGKGENDNTLQLRYNTTQKVFHVNNPFESFIIEIFYFHKSISGNKKDNSILTCCNILKCKKQIGIIGIQNLITRNMNTNIKNGILSIYLQDSVSEPLDILLKTNIAFLLNNFDSLTRIENDFELEEECIFKCMLYLKYPKNIVENHTAYLVKILTSSRLLEDNMKPMLKKRKLFRTEQVFEKSKKKLINSFSMTTQNTGFPIFETYEKIPLLMDFDDMDEISLIREITCQNMSCPQQVVNVENWAHYNSSTVKAHGNSCPQFIQNNRGYINENFYEVNMHSQDLNMERKQGHNKISNFDCEHIFEDLCNVRQQAIPASHNIIHNEETHTTSITQVLNFWNLLSEIEEKKYDLILKEEVKVTAESLTNSCQVHKDTKIEKEEKDSFFPMDDMFSVQSVSLISKEVNVEENKYVNQNYVTNTNEYESILPEREIANSKDFHRKNDSALYINHQFETGLSEGNDECFQDLAAKYLSTEALTIVKDFEMKRKFDLVLEELRMFHEISRENELLSTVETNNGQENYFGENDAEKVKMEIEKDLKMVVVNKIRASSSFHDTIAGPNMGKSHQSLFKWKTVPNNGEQEVPNESCYPSRSEEELLYSTSEKDCETPLPKRPAFLPDECKEEFNYLLRGGSHFPHGISRVRPLKTCSRPIRIGLSRKARIKQLHPYLKQMCYGNLKENF

SEQ ID NO: 12245 - protein, 261 aa, Homo sapiens
MSWKKALRIPGDLRVATVTLMLAMLSSLLAEGRDSPEDFVFQFKGMCYFTNGTERVRLVTRYIYNREEYARFDSDVGVYRAVTPQGRPDAEYWNSQKEVLEGTRAELDTVCRHNYEVAFRGILQRRVEPTVTISPSRTEALNHHNLLVCSVTDFYPGQIKVRWFRNDQEETAGVVSTPLIRNGDWTFQILVMLEMTPQRGDVYTCHVEHPSLQSPITVEWRAQSESAQSKMLSGVGGFVLGLIFLGLGLIIRQRSQKGLLH

SEQ ID NO: 12246 - protein, 1233 aa, Homo sapiens
MSAPAGSSHPAASARIPPKFGGAAVSGAAAPAGPGAGPAPHQQNGPAQNQMQVPSGYGLHHQNYIAPSGHYSQGPGKMTSLPLDTQCGDYYSALYTVPTQNVTPNTVNQQPGAQQLYSRGPPAPHIVGSTLGSFQGAASSASHLHTSASQPYSSFVNHYNSPAMYSASSSVASQGFPSTCGHYAMSTVSNAAYPSVSYPSLPAGDTYGQMFTSQNAPTVRPVKDNSFSGQNTAISHPSPLPPLPSQQHHQQQSLSGYSTLTWSSPGLPSTQDNLIRNHTGSLAVANNNPTITVADSLSCPVMQNVQPPKSSPVVSTVLSGSSGSSSTRTPPTANHPVEPVTSVTQPSELLQQKGVDSSSTTSSASPMPNSYDALEGGSYPDMLSSSASSPAPDPAPEPDPASAPAPASAPAPVVPQPSKMAKPFGYGYPTLQPGYQNATAPLISGVQPSNPVYSGFQQYPQQYPGVNQLSSSIGGLSLQSSPQPESLRPVNLTQERNILPMTPVWAPVPNLNADLKKLNCSPDSFRCTLTNIPQTQALLNKAKLPLGLLLHPFRDLTQLPVITSNTIVRCRSCRTYINPFVSFIDQRRWKCNLCYRVNDVPEEFMYNPLTRSYGEPHKRPEVQNSTVEFIASSDYMLRPPQPAVYLFVLDVSHNAVEAGYLTILCQSLLENLDKLPGDSRTRIGFMTFDSTIHFYNLQEGLSQPQMLIVSDIDDVFLPTPDSLLVNLYESKELIKDLLNALPNMFTNTRETHSALGPALQAAFKLMSPTGGRVSVFQTQLPSLGAGLLQSREDPNQRSSTKVVQHLGPATDFYKKLALDCSGQQTAVDLFLLSSQYSDLASLACMSKYSAGCIYYYPSFHYTHNPSQAEKLQKDLKRYLTRKIGFEAVMRIRCTKGLSMHTFHGNFFVRSTDLLSLANINPDAGFAVQLSIEESLTDTSLVCFQTALLYTSSKGERRIRVHTLCLPVVSSLADVYAGVDVQAAICLLANMAVDRSVSSSLSDARDALVNAVVDSLSAYGSTVSNLQHSALMAPSSLKLFPLYVLALLKQKAFRTGTSTRLDDRVYAMCQIKSQPLVHLMKMIHPNLYRIDRLTDEGAVHVNDRIVPQPPLQKLSAEKLTREGAFLMDCGSVFYIWVGKGCDNNFIEDVLGYTNFASIPQKMTHLPELDTLSSERARSFITWLRDSRPLSPILHIVKDESPAKAEFFQHLIEDRTEAAFSYYEFLLHVQQQICK

SEQ ID NO: 12247 - protein, 743 aa, Homo sapiens
MIEDSGKRGNTMAERRQLFAEMRAQDLDRIRLSTYRTACKLRFVQKKCNLHLVDIWNVIEALRENALNNLDPNTELNVSRLEAVLSTIFYQLNKRMPTTHQIHVEQSISLLLNFLLAAFDPEGHGKISVFAVKMALATLCGGKIMDKLRYIFSMISDSSGVMVYGRYDQFLREVLKLPTAVFEGPSFGYTEQSARSCFSQQKKVTLNGFLDTLMSDPPPQCLVWLPLLHRLANVENVFHPVECSYCHSESMMGFRYRCQQCHNYQLCQDCFWRGHAGGSHSNQHQMKEYTSWKSPAKKLTNALSKSLSCASSREPLHPMFPDQPEKPLNLAHIVDTWPPRPVTSMNDTLFSHSVPSSGSPFITRSSPPKDSEVEQNKLLARAAPAFLKGKGIQYSLNVADRLADEHVLIGLYVNMLRNNPSCMLESSNRLDEEHRLIARYAARLAAESSSSQPPQQRSAPDISFTIDANKQQRQLIAELENKNREILQEIQRLRLEHEQASQPTPEKAQQNPTLLAELRLLRQRKDELEQRMSALQESRRELMVQLEGLMKLLKTQGAGSPRSSPSHTISRPIPMPIRSASACSTPTHTPQDSLTGVGGDVQEAFAQSSRRNLRNDLLVAADSITNTMSSLVKELNSEVGSETESNVDSEFARTQFEDLVPSPTSEKAFLAQIHARKPGYIHSGATTSTMRGDMVTEDADPYVQPEDENYENDSVRQLENELQMEEYLKQKLQDEAYQVSLQG

SEQ ID NO: 12248 - protein, 690 aa, Homo sapiens
MIEDSGKRGNTMAERRQLFAEMRAQDLDRIRLSTYRTACKLRFVQKKCNLHLVDIWNVIEALRENALNNLDPNTELNVSRLEAVLSTIFYQLNKRMPTTHQIHVEQSISLLLNFLLAAFDPEGHGKISVFAVKMALATLCGGKIMDKLRYIFSMISDSSGVMVYGRYDQFLREVLKLPTAVFEGPSFGYTEQSARSCFSQQKKVTLNGFLDTLMSDPPPQCLVWLPLLHRLANVENVFHPVECSYCHSESMMGFRYRCQQCHNYQLCQDCFWRGHAGGSHSNQHQMKEYTSWKSPAKKLTNALSKSLSCASSREPLHPMFPDQPEKPLNLAHIVPPRPVTSMNDTLFSHSVPSSGSPFITRSMLESSNRLDEEHRLIARYAARLAAESSSSQPPQQRSAPDISFTIDANKQQRQLIAELENKNREILQEIQRLRLEHEQASQPTPEKAQQNPTLLAELRLLRQRKDELEQRMSALQESRRELMVQLEGLMKLLKEEELKQGTQGAGSPRSSPSHTISRPIPMPIRSASACSTPTHTPQDSLTGVGGDVQEAFAQSSRRNLRNDLLVAADSITNTMSSLVKELNSEVGSETESNVDSEFARTQFEDLVPSPTSEKAFLAQIHARKPGYIHSGATTSTMRGDMVTEDADPYVQPEDENYENDSVRQLENELQMEEYLKQKLQDEAYQVSLQG

SEQ ID NO: 12249 - protein, 642 aa, Homo sapiens
MLLKKHAGKGGGREPRSEDPTPAEQHCARTMPPCAVLAALLSVVAVVSCLYLGVKTNDLQARIAALESAKGAPSIHLLPDTLDHLKTMVQEKVERLLAQKSYEHMAKIRIAREAPSECNCPAGPPGKRGKRGRRGESGPPGQPGPQGPPGPKGDKGEQGDQGPRMVFPKINHGFLSADQQLIKRRLIKGDQGQAGPPGPPGPPGPRGPPGDTGKDGPRGMPGVPGEPGKPGEQGLMGPLGPPGQKGSIGAPGIPGMNGQKGEPGLPGAVGQNGIPGPKGEPGEQGEKGDAGENGPKGDTGEKGDPGSSAAGIKGEPGESGRPGQKGEPGLPGLPGLPGIKGEPGFIGPQGEPGLPGLPGTKGERGEAGPPGRGERGEPGAPGPKGKQGESGTRGPKGSKGDRGEKGDSGAQGPRGPPGQKGDQGATEIIDYNGNLHEALQRITTLTVTGPPGPPGPQGLQGPKGEQGSPGIPGMDGEQGLKGSKGDMGDPGMTGEKGGIGLPGLPGANGMKGEKGDSGMPGPQGPSIIGPPGPPGPHGPPGPMGPHGLPGPKGTDGPMGPHGPAGPKGERGEKGAMGEPGPRGPYGLPGKDGEPGLDGFPGPRGEKGDLGEKGEKVTSPSQHVPCLILLLLSALLFSLCDSI

SEQ ID NO: 12250 - protein, 645 aa, Homo sapiens
MLLKKHAGKGGGREPRSEDPTPAEQHCARTMPPCAVLAALLSVVAVVSCLYLGVKTNDLQARIAALESAKGAPSIHLLPDTLDHLKTMVQEKVERLLAQKSYEHMAKIRIAREAPSECNCPAGPPGKRGKRGRRGESGPPGQPGPQGPPGPKGDKGEQGDQGPRGLPGFPTVAALHSNQILTVKGDQGQAGPPGPPGPPGPRGPPGDTGKDGPRGMPGVPGEPGKPGEQGLMGPLGPPGQKGSIGAPGIPGMNGQKGEPGLPGAVGQNGIPGPKGEPGEQGEKGDAGENGPKGDTGEKGDPGSSAAGIKGEPGESGRPGQKGEPGLPGLPGLPGIKGEPGFIGPQGEPGLPGLPGTKGERGEAGPPGRGERGEPGAPGPKGDRGEKGDSGAQGPRGPPGQKGDQGATEIIDYNGNLHEALQGPPGPPGPQGLQGPKGEQGSPGIPGMDGEQGLKGSKGDMGDPGMTGEKGGIGLPGLPGANGMKGEKGDSGMPGPQGPSIIGPPGPPGPHGPPGPMGPHGLPGPKGEPGLNGVKGLKGEPGQKGDRGPLGLPGASGLDGKPGSRGTDGPMGPHGPAGPKGERGEKGAMGEPGPRGPYGLPGFPGPRGEKGDLGEKGEKVTSPSQHVPCLILLLLSALLFSLCDSI

SEQ ID NO: 12251 - protein, 364 aa, Homo sapiens
MGTRGPSAPVDTTPAKTIVVYRNGDPFYVGKKFVLSRRRAATFEALLEQLTEQVDVPFGVRRLFTPTRGHRVLGLDALQAGGKYVAAGRERFKELDYIHIVPRKPAKIRKLKEIKPVVHCDINVPSKWQTYHRISRHINVFTNGRLFIPPAKIIIPKFSLSDWDIVLATIGEKVFPLGGVRKLFTMNGHLLGDSKDLQDNHFYVAVGLETFKYFPYWKSPRVPSEVQQRYANVEKNSQRKKKVDSKGKEPCKYDGIPPKTQDSVYYAKEEKKKTLAEPLVQRGAEGDVYKAPTPSKETQGALDVKEEHNVQLEVPVDQRQAEIVKEDEEIHENTPDFEGNKDKEDARLCEDVERKMAREWKPVD

SEQ ID NO: 12252 - protein, 340 aa, Homo sapiens
MGLGRVLLFLAVAFPFAPPAAAAEPHSLRYNLMVLSQDGSVQSGFLAEGHLDGQPFLRYDRQKRRAKPQGQWAENVLGAKTWDTETEDLTENGQDLRRTLTHIKDQKGVPQSSRAQTLAMNVTNFWKEDAMKTKTHYRAMQADCLQKLQRYLKSGVAIRRTVPPMVNVTCSEVSEGNITVTCRASSFYPRNITLTWRQDGVSLSHNTQQWGDVLPDGNGTYQTWVATRIRQGEEQRFTCYMEHSGNHGTHPVPSGKALVLQSQRTDFPYVSAAMPCFVIIIILCVPCCKKKTSAAEGPELVSLQVLDQHPVGTGDHRDAAQLGFQPLMSATGSTGSTEGT

SEQ ID NO: 12253 - protein, 2298 aa, Homo sapiens
MDPEEQELLNDYRYRSYSSVIEKALRNFESSSEWADLISSLGKLNKALQSNLRYSLLPRRLLISKRLAQCLHPALPSGVHLKALETYEIIFKIVGTKWLAKDLFLYSCGLFPLLAHAAVSVRPVLLTLYEKYFLPLQKLLLPSLQAFIVGLLPGLEEGSEISDRTDALLLRLSLVVGKEVFYTALWGSVLASPSIRLPASVFVVGHINRDAPGREQKYMLGTNHQLTVKSLRASLLDSNVLVQRNNLEIVLFFFPFYTCLDSNERAIPLLRSDIVRILSAATQTLLRRDMSLNRRLYAWLLGSDIKGNTVVPESEISNSYEDQSSYFFEKYSKDLLVEGLAEILHQKFIDADVEERHHAYLKPFRVLISLLDKPEIGPQVVGNLFLEVIRAFYSYCRDALGSDLKLSYTQSGNSLISAIKENRNASEIVKTVNLLITSLSTDFLWDYMTRCFEECFRPVKQRYSVRNSVSPPPTVSELCALLVFLLDVIPLELYSEVQTQYLPQVLGCLVQPLAEDMEALSLPELTHALKTCFKVLSKVQMPPSYLDTESTSGTSSPVKGENGKIILETKAVIPGDEDASFPPLKSEDSGIGLSASSPELSEHLRVPRVSLERDDVWKKGGSMQRTFLCIQELIANFASKNIFGVQLTASGEESKSEEPAGKRDRDGTQSLAANDSSRKNSWEPKPITVPQFKQMLSDLFTARGSPFKTKSSESPSSSPSSPARKNGGEWDVEKVVIDLGGSREERREAFAAACHLLLDCATFPVYLSEEETEQLCATLFQLPGAGDSSFPSWLKSLMTICCCVTDCYLQNVAISTLLEVINHSQSLALVIEDKMKRYKSSGHNPFFGKLQMVTVPPIAPGILKVIAEKTDFYQRVARVLWNQLNKETREHHVTCVELFYRLHCLAPTANICEDIICHALLDPDKGTRLEALFRFSVIWHLTREIQGSRVTSHNRSFDRSLFVVLDSLACTDGAIGAAAQGWLVRALSLGDVARILEPVLLLLLQPKTQRTSIHCLKQENSADDLHRWFNRKKTSFREACAVPEPQESGSEEHLPLSQFTTVDREAIWAEVEKEPEKYPLRGELSEEELPYYVELPDRTAHGAPDSSEHTESADTSSCHTDSENTSSFSSPSHDLQELSNEENCCAPIPMGGRAYPKRSALLAAFQSESFKAGAKLSLVRVDSDKTQASESFSSDEEADLELQALTTSRLLKQQRERQEAVEALFKHILLYLQPYDSRRVLYAFSVLEAVLKTNPKEFIEAVSRTSMDTSSTAHLNLISNLLARHQEALIGQSFYGKLQTQVPNVCPHSLLLELLTYLCLSFLRSYYPCYLKVSHRDILGNRDVQVKSVEVLIRIMMQLVSVAKSSEGKNVEFIHSLLQRCKVQEFVLLSLSASMYTSQKRYGLATAHHGRALPEDSLFEESLINLGQDQIWSEHPLQIELLKLLQVLIVLEHHLGRAHEEAENQPDLSREWQRALNFQQAISALQYVQPHPLTSQGLLVSAVVRGLQPAYGYGMHPAWVSLVTHSLPYFGKSLGWTVTPFVVQICKNLDDLVKQYESESVKLSVSTTSKRENISPDYPLTLLEGLTTISHFCLLEQANQNKKTMAAGDPANLRNARNAILEELPRTVNTMALLWNVLRKEETQKRPVDLLGATKGSSSVYFKTTKTIRQKILDFLNPLTAHLGVQLTAAVAAVWSRKKAQRHSKMKIIPTASASQLTLVDLVCALSTLQTDTLLHLVKEVVKRPPQVKGGDEKSPLVDIPVLQFCYAFLQRLPVPALQENFSSLLGVLKESVQLNLAPPGYFLLLSMLNDFVTRTPNLENKKDQKDLQEITQKILEAVGNIAGSSLEQTSWLSRNLEVKAQPQASLEESDAEEDLYDAAAASAMVSSSAPSVYSVQALSLLAEVLASLLDMVYRSDEKEKAVPLISRLLYYVFPYLRNHSAYNAPSFRAGAQLLSSLSGYAYTKRAWRKEVLELFLDPAFFQMDTSCVHWKSIIDHLLTHEKTMFKDLMNMQSSSLKLFSSFEQKAMLLKRQAFAVFSGELDQYHLYLPLIQERLTDNLRVGQTSIVAAQMFLFFRVLLLRISPQHLTSLWPIMVSELIQTFTQLEEDLKDEDESLRSTNKVNRTKVSVPDANGPSVGEIPQSELILYLSACKFLDTALSFPPDKMPLFQIYRWAFIPEVDTEGPAFLSDVEENHQECKPHTVRILELLKLKFGEISSSDEITMKSEFPLLRQHSVSSIRQLMPFFMTLNGAFKTQRQLPADSPGTPFLDFPVTDSPRILKQLEECIEYDFLEHPEC

SEQ ID NO: 12254 - protein, 457 aa, Homo sapiens
MEQKEGKLSEDGTTVSPAADNPEMSGGGAPAEETKGTAGKAINEGPPTESGKQEKAPAEDGMSAELQGEANGLDEVKVESQREAGGKEDAEAELKKEDGEKEETTVGSQEMTGRKEETKSEPKEAEEKESTLASEKQKAEEKEAKPESGQKADANDRDKPEPKATVEEEDAKTASQEETVVEDEAKAEPKEPDGKEEAKHGAKEEADEPGSPSEEQEQDVEKEPEGGAGVIPSSPEEWPESPTGEGHNLSTDGLGPDCVASGQTSPSASESSPSDVPQSPPESPSSGEKKEKAPERRVSAPARPRGPRAQNRKAIVDKFGGAASGPTALFRNTKAAGAAIGGVKNMLLEWCRAMTKKYEHVDIQNFSSSWSSGMAFCALIHKFFPDAFDYAELDPAKRRHNFTLAFSTAEKLADCAQLLDVDDMVRLAVPDSKCVYTYIQELYRSLVQKGLVKTKKK

SEQ ID NO: 12255 - protein, 1184 aa, Homo sapiens
MEVDTEEKRHRTRSKGVRVPVEPAIQELFSCPTPGCDGSGHVSGKYARHRSVYGCPLAKKRKTQDKQPQEPAPKRKPFAVKADSSSVDECDDSDGTEDMDEKEEDEGEEYSEDNDEPGDEDEEDEEGDREEEEEIEEEDEDDDEDGEDVEDEEEEEEEEEEEEEEEENEDHQMNCHNTRIMQDTEKDDNNNDEYDNYDELVAKSLLNLGKIAEDAAYRARTESEMNSNTSNSLEDDSDKNENLGRKSELSLDLDSDVVRETVDSLKLLAQGHGVVLSENMNDRNYADSMSQQDSRNMNYVMLGKPMNNGLMEKMVEESDEEVCLSSLECLRNQCFDLARKLSETNPQERNPQQNMNIRQHVRPEEDFPGRTPDRNYSDMLNLMRLEEQLSPRSRVFASCAKEDGCHERDDDTTSVNSDRSEEVFDMTKGNLTLLEKAIALETERAKAMREKMAMEAGRRDNMRSYEDQSPRQLPGEDRKPKSSDSHVKKPYYDPSRTEKKESKCPTPGCDGTGHVTGLYPHHRSLSGCPHKDRVPPEILAMHESVLKCPTPGCTGRGHVNSNRNSHRSLSGCPIAAAEKLAKAQEKHQSCDVSKSSQASDRVLRPMCFVKQLEIPQYGYRNNVPTTTPRSNLAKELEKYSKTSFEYNSYDNHTYGKRAIAPKVQTRDISPKGYDDAKRYCKDPSPSSSSTSSYAPSSSSNLSCGGGSSASSTCSKSSFDYTHDMEAAHMAATAILNLSTRCREMPQNLSTKPQDLCATRNPDMEVDENGTLDLSMNKQRPRDSCCPILTPLEPMSPQQQAVMNNRCFQLGEGDCWDLPVDYTKMKPRRIDEDESKDITPEDLDPFQEALEERRYPGEVTIPSPKPKYPQCKESKKDLITLSGCPLADKSIRSMLATSSQELKCPTPGCDGSGHITGNYASHRSLSGCPRAKKSGIRIAQSKEDKEDQEPIRCPVPGCDGQGHITGKYASHRSASGCPLAAKRQKDGYLNGSQFSWKSVKTEGMSCPTPGCDGSGHVSGSFLTHRSLSGCPRATSAMKKAKLSGEQMLTIKQRASNGIENDEEIKQLDEEIKELNESNSQMEADMIKLRTQITTMESNLKTIEEENKVIEQQNESLLHELANLSQSLIHSLANIQLPHMDPINEQNFDAYVTTLTEMYTNQDRYQSPENKALLENIKQAVRGIQV

SEQ ID NO: 12256 - protein, 598 aa, Homo sapiens
MGGCFSKPKPVELKIEVVLPEKERGKEELSASGKGSPRAYQGNGTARHFHTEERLSTPHPYPSPQDCVEAAVCHVKDLENGQMREVELGWGKVLLVKDNGEFHALGHKCPHYGAPLVKGVLSRGRVRCPWHGACFNISTGDLEDFPGLDSLHKFQVKIEKEKVYVRASKQALQLQRRTKVMAKCISPSAGYSSSTNVLIVGAGAAGLVCAETLRQEGFSDRIVLCTLDRHLPYDRPKLSKSLDTQPEQLALRPKEFFRAYGIEVLTEAQVVTVDVRTKKVVFKDGFKLEYSKLLLAPGSSPKTLSCKGKEVENVFTIRTPEDANRVVRLARGRNVVVVGAGFLGMEVAAYLTEKAHSVSVVELEETPFRRFLGERVGRALMKMFENNRVKFYMQTEVSELRGQEGKLKEVVLKSSKVVRADVCVVGIGAVPATGFLRQSGIGLDSRGFIPVNKMMQTNVPGVFAAGDAVTFPLAWRNNRKVNIPHWQMAHAQGRVAAQNMLAQEAEMSTVPYLWTAMFGKSLRYAGYGEGFDDVIIQGDLEELKFVAFYTKGDEVIAVASMNYDPIVSKVAEVLASGRAIRKREVETGDMSWLTGKGS

SEQ ID NO: 12257 - protein, 605 aa, Homo sapiens
MGGCFSKPKPVELKIEVVLPEKERGKEELSASGKGSPRAYQGNGTARHFHTEERLSTPHPYPSPQDCVEAAVCHVKDLENGQMREVELGWGKVLLVKDNGEFHALGHKCPHYGAPLVKGVLSRGRVRCPWHGACFNISTGDLEDFPGLDSLHKFQVKIEKEKVYVRASKQALQLQRRTKVMAKCISPSAGYSSSTNVLIVGAGAAGLVCAETLRQEGFSDRIVLCTLDRHLPYDRPKLSKSLDTQPEQLALRPKEFFRAYGIEVLTEAQVVTVDVRTKKVVFKDGFKLEYSKLLLAPGSSPKTLSCKGKEVENVFTIRTPEDANRVVRLARGRNVVVVGAGFLGMEVAAYLTEKAHSVSVVELEETPFRRFLGERVGRALMKMFENNRVKFYMQTEVSELRGQEGKLKEVVLKSSKVVRADVCVVGIGAVPATGFLRQSGIGLDSRGFIPVNKMMQTNVPGVFAAGDAVTFPLAWRNNRKVNIPHWQMAHAQGRVAAQNMLAQEAEMSTVPYLWTAMFGKSLRYAGYGEGFDDVIIQGDLEELKFVAFYTKGDEVIAVASMNYDPIVSKVAEVLASGRAIRKREVELFVLHSKTGDMSWLTGKGS

SEQ ID NO: 12258 - protein, 291 aa, Homo sapiens
MTENKTVSSSSTRDDQTNIGLTCQEVKALREKAWSRTNEGNAMSQSLVLYGASKENSEGFHESKMTNTEGVNKGIYFSYPCRRHSCAVVNIPAPCVNKMISHIQDVESKIQEHLKRFETSFEEWSRTSSTKDLKEDWSVTTPVKEVKPGEKRDEKCPELKQEMETLLSEAIRLIKSLETDRADAEEALKQQRSRKNMINMKIDSWSVWKLQELPLAVQKEHEAYLSDVIELQWHLEDKANQLQHFEKQKTELEEANAKIQADIDYMNEHGPLLDSKQNQELQDLKNHYKKK

SEQ ID NO: 12259 - protein, 687 aa, Homo sapiens
MEQLNELELLMEKSFWEEAELPAELFQKKVVASFPRTVLSTGMDNRYLVLAVNTVQNKEGNCEKRLVITASQSLENKELCILRNDWCSVPVEPGDIIHLEGDCTSDTWIIDKDFGYLILYPDMLISGTSIASSIRCMRRAVLSETFRSSDPATRQMLIGTVLHEVFQKAINNSFAPEKLQELAFQTIQEIRHLKEMYRLNLSQDEIKQEVEDYLPSFCKWAGDFMHKNTSTDFPQMQLSLPSDNSKDNSTCNIEVVKPMDIEESIWSPRFGLKGKIDVTVGVKIHRGYKTKYKIMPLELKTGKESNSIEHRSQVVLYTLLSQERRADPEAGLLLYLKTGQMYPVPANHLDKRELLKLRNQMAFSLFHRISKSATRQKTQLASLPQIIEEEKTCKYCSQIGNCALYSRAVEQQMDCSSVPIVMLPKIEEETQHLKQTHLEYFSLWCLMLTLESQSKDNKKNHQNIWLMPASEMEKSGSCIGNLIRMEHVKIVCDGQYLHNFQCKHGAIPVTNLMAGDRVIVSGEERSLFALSRGYVKEINMTTVTCLLDRNLSVLPESTLFRLDQEEKNCDIDTPLGNLSKLMENTFVSKKLRDLIIDFREPQFISYLSSVLPHDAKDTVACILKGLNKPQRQAMKKVLLSKDYTLIVGMPGTGKTTTICTLVRFRRFIQLSSNLQSKKFADQSPLNP

SEQ ID NO: 12260 - protein, 457 aa, Homo sapiens
MNQPCNSMEPRVMDDDMLKLAVGDQGPQEEAGQLAKQEGILFKDVLSLQLDFRNILRIDNLWQFENLRKLQLDNNIIEKIEGLENLAHLVWLDLSFNNIETIEGLDTLVNLEDLSLFNNRISKIDSLDALVKLQVLSLGNNRIDNMMNIIYLRRFKCLRTLSLSRNPISEAEDYKMFICAYLPDLMYLDYRRIDDHTKKLAEAKHQYSIDELKHQENLMQAQLEDEQAQREELEKHKTAFVEHLNGSFLFDSMYAEDSEGNNLSYLPGVGELLETYKDKFVIICVNIFEYGLKQQEKRKTELDTFSECVREAIQENQEQGKRKIAKFEEKHLSSLSAIREELELPNIEKMILECSADISELFDALMTLEMQLVEQLEETINMFERNIVDMVGLFIENVQSLMAQCRDLENHHHEKLLEISISTLEKIVEGDLDEDLPNDLRAGRFQKFNYVEASGTF

SEQ ID NO: 12261 - protein, 523 aa, Homo sapiens; identical to SEQ ID NO: 5349

SEQ ID NO: 12262 - protein, 938 aa, Homo sapiens
MVEMMLLPDCCYSDDGPTTEGIDLNDPAIKQDALLLERWILEPVPRQNGDRFIEEKTLLLAVRSFVFFSQLSAWLSVSHGAIPRNILYRISAADVDLQWNFSQTPIEHVFPVPNVSHNVALKVSVQSLPRQSNYPVLTCSIHTNIGLYEKRIQQHKLKTHQHHNPNEAEQCGTNSSQRLCSKQTWTMAPESVLHAKSGPSPEYTAAVKNIKLYPGTGSKSDHGTSQANILGFSGIGDIKSQETSVRTLKSFSMVDSSISNRQSFWQSAGETNPLIGSLIQERQEIIARIAQHLIHCDPSTSHVSGRPFNTQESSSLHSKLFRVSQENENVGKGKEAFSMTFGSPEFSSPEDTNEGKIRLKPETPRSETCISNDFYSHMPVGETNPLIGSLLQERQDVIARIAQHLEHIDPTASHIPRQSFNMHDSSSVASKVFRSSYEDKNLLKKNKDESSVSISHTKCSLLGDISDGKNLVPNKCFTSFKNNSKEKCSLKHQTRNQCQNNPSEIIQSTYQETQNKSSSLSTSSILSQHKENNLDLTSRFKEQEMSNGIDKQYSNCTTIDKQICTNKYKEKIINENYNPKFFGNLQSDDSKKNDSKIKVTVLEMSEYLNKYESMSSNKDSKRPKTCEQNTQLNSIENYLNKDNEGFKCKKSDQLKNEQDKQEDPTNEKSQNYSQRRSIKDCLSTCEQPKNTEVLRTTLKHSNVWRKHNFHSLDGTSTRAFHPQTGLPLLSSPVPQRKTQSGCFDLDSSLLHLKSFSSRSPRPCLNIEDDPDIHEKPFLSSSAPPITSLSLLGNFEESVLNYRFDPLGIVDGFTAEVGASGAFCPTHLTLPVEVSFYSVSDDNAPSPYMGVITLESLGKRGYRVPPSGTIQVTLFNPNKTVVKMFVVIYDLRDMPANHQTFLRQRTFSVPVKQEVKRSVNKENIRHTEERLLRYLIHLR

SEQ ID NO: 12263 - protein, 875 aa, Homo sapiens
MDPAPSLGCSLKDVKWSSVAVPLDLLVSTYRLPQIARLDNGECVEGLRENDYLLIHSCRQWTTITAHSLEEGHYVIGPKIEIPVHYAGQFKLLEQDRDIKEPVQYFNSVEEVAKAFPERVYVMEDITFNVKVASGECNEDTEVYNITLCTGDELTLMGQAEILYAKTFKEKSRLNTIFKKIGKLNSISKLGKGKMPCLICMNHRTNESISLPFQCKGRFSTRSPLELQMQEGEHTIRNIVEKTRLPVNVTVPSPPPRNPYDLHFIREGHRYKFVNIQTKTVVVCCVLRNNKILPMHFPLHLTVPKFSLPEHLVKGESWPETLVHHWLGICQEQFDIDEYSRAVRDVKTDWNEECKSPKKGRCSGHNHVPNSLSYARDELTQSFHRLSVCVYGNNLHGNSEVNLHGCRDLGGDWAPFPHDILPYQDSGDSGSDYLFPEASEESAGIPGKSELPYEELWLEEGKPSHQPLTRSLSEKNRCDQFRGSVRSKCATSPLPIPGTLGAAVKSSDTALPPPPVPPKSEAVREECRLLNAPPVPPRSAKPLSTSPSIPPRTVKPARQQTRSPSPTLSYYSSGLHNIVTKTDTNPSESTPVSCYPCNRVKTDSVDLKSPFGSPSAEAVSSRLSWPNHYSGASESQTRSDFLLDPSRSYSYPRQKTPGTPKRNCPAPFDFDGCELLASPTSPVTAEFSSSVSGCPKSASYSLESTDVKSLAAGVTKQSTSCPALPPRAPKLVEEKVASETSPLPLKIDGAEEDPKSGSPDLSEDQYFVKKGMQDIFSASYPFSSPLHLQLAPRSCGDGSPWQPPADLSGLSIEEVSKSLRFIGLSEDVISFFVTEKIDGNLLVQLTEEILSEDFKLSKLQVKKIMQFINGWRPKI

SEQ ID NO: 12264 - protein, 355 aa, Homo sapiens
MDQFPESVTENFEYDDLAEACYIGDIVVFGTVFLSIFYSVIFAIGLVGNLLVVFALTNSKKPKSVTDIYLLNLALSDLLFVATLPFWTHYLINEKGLHNAMCKFTTAFFFIGFFGSIFFITVISIDRYLAIVLAANSMNNRTVQHGVTISLGVWAAAILVAAPQFMFTKQKENECLGDYPEVLQEIWPVLRNVETNFLGFLLPLLIMSYCYFRIIQTLFSCKNHKKAKAIKLILLVVIVFFLFWTPYNVMIFLETLKLYDFFPSCDMRKDLRLALSVTETVAFSHCCLNPLIYAFAGEKFRRYLYHLYGKCLAVLCGRSVHVDFSSSESQRSRHGSVLSSNFTYHTSDGDALLLL

SEQ ID NO: 12265 - protein, 585 aa, Homo sapiens
GAPAYRVLMEQLTSVSEELDVRKEEVLILRSQLVSQKEAIQPKNTMTDSTILLEDVQKMKDKGEIAQAYIGLKETNRLLESQLQSQKRSHENEAEALRGEIQSLKEENNRQQQLLAQNLQLPPEARIEASLQHEITRLTNENLDLMEQLEKQDKTVRKLKKQLKVFAKKIGELEVGQMENISPGQIIDEPIRPVNIPRKEKDFQGMLEYKKEDEQKLVKNLILELKPRGVAVNLIPGLPAYILFMCVRHADYLNDDQKVRSLLTSTINSIKKVLKKRGDDFETVSFWLSNTCRFLHCLKQYSGEEGFMKHNTSRQNEHCLTNFDLAEYRQVLSDLAIQIYQQLVRVLENILQPMIVSGMLEHETIQGVSGVKPTGLRKRTSSIADEGTYTLDSILRQLNSFHSVMCQHGMDPELIKQVVKQMFYIIGAITLNNLLLRKDMCSWSKGMQIRYNVSQLEEWLRDKNLMNSGAKETLEPLIQAAQLLQVKKKTDDDAEAICSMCNALTTAQIVKVLNLYTPVNEFEERVSVSFIRTIQMRLRDRKDSPQLLMDAKHIFPVTFPFNPSSLALETIQIPASLGLGFISRV

SEQ ID NO: 12266 - protein, 1855 aa, Homo sapiens
MAASELYTKFARVWIPDPEEVWKSAELLKDYKPGDKVLLLHLEEGKDLEYHLDPKTKELPHLRNPDILVGENDLTALSYLHEPAVLHNLRVRFIDSKLIYTYCGIVLVAINPYEQLPIYGEDIINAYSGQNMGDMDPHIFAVAEEAYKQMARDERNQSIIVSGESGAGKTVSAKYAMRYFATVSGSASEANVEEKVLASNPIMESIGNAKTTRNDNSSRFGKYIEIGFDKRYRIIGANMRTYLLEKSRVVFQAEEERNYHIFYQLCASAKLPEFKMLRLGNADNFNYTKQGGSPVIEGVDDAKEMAHTRQACTLLGISESHQMGIFRILAGILHLGNVGFTSRDADSCTIPPKHEPLCIFCELMGVDYEEMCHWLCHRKLATATETYIKPISKLQATNARDALAKHIYAKLFNWIVDNVNQALHSAVKQHSFIGVLDIYGFETFEINSFEQFCINYANEKLQQQFNMHVFKLEQEEYMKEQIPWTLIDFYDNQPCINLIESKLGILDLLDEECKMPKGTDDTWAQKLYNTHLNKCALFEKPRLSNKAFIIQHFADKVEYQCEGFLEKNKDTVFEEQIKVLKSSKFKMLPELFQDDEKAISPTSATSSGRTPLTRTPAKPTKGRPGQMAKEHKKTVGHQFRNSLHLLMETLNATTPHYVRCIKPNDFKFPFTFDEKRAVQQLRACGVLETIRISAAGFPSRWTYQEFFSRYRVLMKQKDVLSDRKQTCKNVLEKLILDKDKYQFGKTKIFFRAGQVAYLEKLRADKLRAACIRIQKTIRGWLLRKKYLRMRKAAITMQRYVRGYQARCYAKFLRRTKAATIIQKYWRMYVVRRRYKIRRAATIVLQSYLRGFLARNRYRKILREHKAVIIQKRVRGWLARTHYKRSMHAIIYLQCCFRRMMAKRELKKLKIEARSVERYKKLHIGMENKIMQLQRKVDEQNKDYKCLVEKLTNLEGIYNSETEKLRSDLERLQLSEEEAKVATGRVLSLQEEIAKLRKDLEQTRSEKKCIEEHADRYKQETEQLVSNLKEENTLLKQEKEALNHRIVQQAKEMTETMEKKLVEETKQLELDLNDERLRYQNLLNEFSRLEERYDDLKEEMTLMVHVPKPGHKRTDSTHSSNESEYIFSSEIAEMEDIPSRTEEPSEKKVPLDMSLFLKLQKRVTELEQEKQVMQDELDRKEEQVLRSKAKEEERPQIRGAELEYESLKRQELESENKKLKNELNELRKALSEKSAPEVTAPGAPAYRVLMEQLTSVSEELDVRKEEVLILRSQLVSQKEAIQPKDDKNTMTDSTILLEDVQKMKDKGEIAQAYIGLKETNRSSALDYHELNEDGELWLVYEGLKQANRLLESQLQSQKRSHENEAEALRGEIQSLKEENNRQQQLLAQNLQLPPEARIEASLQHEITRLTNENLDLMEQLEKQDKTVRKLKKQLKVFAKKIGELEVGQMENISPGQIIDEPIRPVNIPRKEKDFQGMLEYKKEDEQKLVKNLILELKPRGVAVNLIPGLPAYILFMCVRHADYLNDDQKVRSLLTSTINSIKKVLKKRGDDFETVSFWLSNTCRFLHCLKQYSGEEGFMKHNTSRQNEHCLTNFDLAEYRQVLSDLAIQIYQQLVRVLENILQPMIVSGMLEHETIQGVSGVKPTGLRKRTSSIADEGTYTLDSILRQLNSFHSVMCQHGMDPELIKQVVKQMFYIIGAITLNNLLLRKDMCSWSKGMQIRYNVSQLEEWLRDKNLMNSGAKETLEPLIQAAQLLQVKKKTDDDAEAICSMCNALTTAQIVKVLNLYTPVNEFEERVSVSFIRTIQMRLRDRKDSPQLLMDAKHIFPVTFPFNPSSLALETIQIPASLGLGFISRV

SEQ ID NO: 12267 - protein, 1025 aa, Homo sapiens
MSVWSAGLLRSARRRRRGRTDGRRFLLRRAVPGHLGLARARVERAWLAAGLLKVPLRTPWAGYVHVHVKMDLLYGLVWLLTVLLEGISGQGVYAPPTVRIVHSGLACNIEEERYSERVYTIREGETLELTCLVTGHPRPQIRWTKTAGSASDRFQDSSVFNETLRITNIQRHQGGRYYCKAENGLGSPAIKSIRVDVYYLDDPVVTVHQSIGEAKEQFYYERTVFLRCVANSNPPVRYSWRRGQEVLLQGSDKGVEIYEPFFTQGETKILKLKNLRPQDYANYSCIASVRNVCNIPDKMVSFRLSNKTASPSIKLLVDDPIVVNPGEAITLVCVTTGGEPAPSLTWVRSFGTLPEKTVLNGGTLTIPAITSDDAGTYSCIANNNVGNPAKKSTNIIVRALKKGRFWITPDPYHKDDNIQIGREVKISCQVEAVPSEELTFSWFKNGRPLRSSERMVITQTDPDVSPGTTNLDIIDLKFTDFGTYTCVASLKGGGISDISIDVNISSSTVPPNLTVPQEKSPLVTREGDTIELQCQVTGKPKPIILWSRADKEVAMPDGSMQMESYDGTLRIVNVSREMSGMYRCQTSQYNGFNVKPREALVQLIVQYPPAVEPAFLEIRQGQDRSVTMSCRVLRAYPIRVLTYEWRLGNKLLRTGQFDSQEYTEYAVKSLSNENYGVYNCSIINEAGAGRCSFLVTGKAYAPEFYYDTYNPVWQNRHRVYSYSLQWTQMNPDAVDRIVAYRLGIRQAGQQRWWEQEIKINGNIQKGELITYNLTELIKPEAYEVRLTPLTKFGEGDSTIRVIKYSAPVNPHLREFHCGFEDGNICLFTQDDTDNFDWTKQSTATRNTKYTPNTGPNADRSGSKEGFYMYIETSRPRLEGEKARLLSPVFSIAPKNPYGPTNTAYCFSFFYHMYGQHIGVLNVYLRLKGQTTIENPLWSSSGNKGQRWNEAHVNIYPITSFQLIFEGIRGPGIEGDIAIDDVSIAEGECAKQDLATKNSVDGAVGILVHIWLFPIIVLISILSPRR

SEQ ID NO: 12268 - protein, 1855 aa, Homo sapiens
MAASELYTKFARVWIPDPEEVWKSAELLKDYKPGDKVLLLHLEEGKDLEYHLDPKTKELPHLRNPDILVGENDLTALSYLHEPAVLHNLRVRFIDSKLIYTYCGIVLVAINPYEQLPIYGEDIINAYSGQNMGDMDPHIFAVAEEAYKQMARDERNQSIIVSGESGAGKTVSAKYAMRYFATVSGSASEANVEEKVLASNPIMESIGNAKTTRNDNSSRFGKYIEIGFDKRYRIIGANMRTYLLEKSRVVFQAEEERNYHIFYQLCASAKLPEFKMLRLGNADNFNYTKQGGSPVIEGVDDAKEMAHTRQACTLLGISESHQMGIFRILAGILHLGNVGFTSRDADSCTIPPKHEPLCIFCELMGVDYEEMCHWLCHRKLATATETYIKPISKLQATNARDALAKHIYAKLFNWIVDNVNQALHSAVKQHSFIGVLDIYGFETFEINSFEQFCINYANEKLQQQFNMHVFKLEQEEYMKEQIPWTLIDFYDNQPCINLIESKLGILDLLDEECKMPKGTDDTWAQKLYNTHLNKCALFEKPRLSNKAFIIQHFADKVEYQCEGFLEKNKDTVFEEQIKVLKSSKFKMLPELFQDDEKAISPTSATSSGRTPLTRTPAKPTKGRPGQMAKEHKKTVGHQFRNSLHLLMETLNATTPHYVRCIKPNDFKFPFTFDEKRAVQQLRACGVLETIRISAAGFPSRWTYQEFFSRYRVLMKQKDVLSDRKQTCKNVLEKLILDKDKYQFGKTKIFFRAGQVAYLEKLRADKLRAACIRIQKTIRGWLLRKKYLRMRKAAITMQRYVRGYQARCYAKFLRRTKAATIIQKYWRMYVVRRRYKIRRAATIVLQSYLRGFLARNRYRKILREHKAVIIQKRVRGWLARTHYKRSMHAIIYLQCCFRRMMAKRELKKLKIEARSVERYKKLHIGMENKIMQLQRKVDEQNKDYKCLVEKLTNLEGIYNSETEKLRSDLERLQLSEEEAKVATGRVLSLQEEIAKLRKDLEQTRSEKKCIEEHADRYKQETEQLVSNLKEENTLLKQEKEALNHRIVQQAKEMTETMEKKLVEETKQLELDLNDERLRYQNLLNEFSRLEERYDDLKEEMTLMVHVPKPGHKRTDSTHSSNESEYIFSSEIAEMEDIPSRTEEPSEKKVPLDMSLFLKLQKRVTELEQEKQVMQDELDRKEEQVLRSKAKEEERPQIRGAELEYESLKRQELESENKKLKNELNELRKALSEKSAPEVTAPGAPAYRVLMEQLTSVSEELDVRKEEVLILRSQLVSQKEAIQPKPSQNTMTDSTILLEDVQKMKDKGEIAQAYIGLKETNRSSALDYHELNEDGELWLVYEGLKQANRLLESQLQSQKRSHENEAEALRGEIQSLKEENNRQQQLLAQNLQLPPEARIEASLQHEITRLTNENLDLMEQLEKQDKTVRKLKKQLKVFAKKIGELEVGQMENISPGQIIDEPIRPVNIPRKEKDFQGMLEYKKEDEQKLVKNLILELKPRGVAVNLIPGLPAYILFMCVRHADYLNDDQKVRSLLTSTINSIKKVLKKRGDDFETVSFWLSNTCRFLHCLKQYSGEEGFMKHNTSRQNEHCLTNFDLAEYRQVLSDLAIQIYQQLVRVLENILQPMIVSGMLEHETIQGVSGVKPTGLRKRTSSIADEGTYTLDSILRQLNSFHSVMCQHGMDPELIKQVVKQMFYIIGAITLNNLLLRKDMCSWSKGMQIRYNVSQLEEWLRDKNLMNSGAKETLEPLIQAAQLLQVKKKTDDDAEAICSMCNALTTAQIVKVLNLYTPVNEFEERVSVSFIRTIQMRLRDRKDSPQLLMDAKHIFPVTFPFNPSSLALETIQIPASLGLGFISRV

SEQ ID NO: 12269 - protein, 389 aa, Homo sapiens
MRIPVDASTSRRFTPPSTALSPGKMSEALPLGAPDAGAALAGKLRSGDRSMVEVLADHPGELVRTDSPNFLCSVLPTHWRCNKTLPIAFKVVALGDVPDGTLVTVMAGNDENYSAELRNATAAMKNQVARFNDLRFVGRSGRGKSFTLTITVFTNPPQVATYHRAIKITVDGPREPRNTRQIQPSPPWSYDQSYQYLGSIASPSVHPATPISPGRASGMTTLSAELSSRLSTAPDLTAFSDPRQFPALPSISDPRMHYPGAFTYSPTPVTSGIGIGMSAMGSATRYHTYLPPPYPGSSQAQGGPFQASSPSYHLYYGASAGSYQFSMVGGERSPPRILPPCTNASTGSALLNPSLPNQSDVVEAEGSHSNSPTNMAPSARLEEAVWRPY

SEQ ID NO: 12270 - protein, 545 aa, Homo sapiens
MEELQDDYEDMMEENLEQEEYEDPDIPESQMEEPAAHDTEATATDYHTTSHPGTHKVYVELQELVMDEKNQELRWMEAARWVQLEENLGENGAWGRPHLSHLTFWSLLELRRVFTKGTVLLDLQETSLAGVANQLLDRFIFEDQIRPQDREELLRALLLKHSHAGELEALGGVKPAVLTRSGDPSQPLLPQHSSLETQLFCEQGDGGTEGHSPSGILEKIPPDSEATLVLVGRADFLEQPVLGFVRLQEAAELEAVELPDTYTQKLSVPDGFKVSNSSARGWVIHPLGLRSEFPIWMMFASALPALLVFILIFLESQITTLIVSKPERKMVKGSGFHLDLLLVVGMGGVAALFGMPWLSATTVRSVTHANALTVMGKASTPGAAAQIQEVKEQRISGLLVAVLVGLSILMEPILSRIPLAVLFGIFLYMGVTSLSGIQLFDRILLLFKPPKYHPDVPYVKRVKTWRMHLFTGIQIICLAVLWVVKSTPASLALPFVLILTVPLRRVLLPLIFRNVELQCLDADDAKATFDEEEGRDEYDEVAMPV

SEQ ID NO: 12271 - protein, 1274 aa, Homo sapiens
MPEPGKKPVSAFSKKPRSVEVAAGSPAVFEAETERAGVKVRWQRGGSDISASNKYGLATEGTRHTLTVREVGPADQGSYAVIAGSSKVKFDLKVIEAEKAEPMLAPAPAPAEATGAPGEAPAPAAELGESAPSPKGSSSAALNGPTPGAPDDPIGLFVMRPQDGEVTVGGSITFSARVAGASLLKPPVVKWFKGKWVDLSSKVGQHLQLHDSYDRASKVYLFELHITDAQPAFTGSYRCEVSTKDKFDCSNFNLTVHEAMGTGDLDLLSAFRRTSLAGGGRRISDSHEDTGILDFSSLLKKSSSFRTPRDSKLEAPAEEDVWEILRQAPPSEYERIAFQYGVTDLRGMLKRLKGMRRDEKKSTAFQKKLEPAYQVSKGHKIRLTVELADHDAEVKWLKNGQEIQMSGSKYIFESIGAKRTLTISQCSLADDAAYQCVVGGEKCSTELFVKEPPVLITRPLEDQLVMVGQRVEFECEVSEEGAQVKWLKDGVELTREETFKYRFKKDGQRHHLIINEAMLEDAGHYALCTSGGQALAELIVQEKKLEVYQSIADLMVGAKDQAVFKCEVSDENVRGVWLKNGKELVPDSRIKVSHIGRVHKLTIDDVTPADEADYSFVPEGFACNLSAKLHFMEVKIDFVPRQEPPKIHLDCPGRIPDTIVVVAGNKLRLDVPISGDPAPTVIWQKAITQGNKAPARPAPDAPEDTGDSDEWVFDKKLLCETEGRVRVETTKDRSIFTVEGAEKEDEGVYTVTVKNPVGEDQVNLTVKVIDVPDAPAAPKISNVGEDSCTVQWEPPAYDGGQPILGYILERKKKKSYRWMRLNFDLIQELSHEARRMIEGVVYEMRVYAVNAIGMSRPSPASQPFMPIGPPSEPTHLAVEDVSDTTVSLKWRPPERVGAGGLDGYSVEYCPEGCSEWVAALQGLTEHTSILVKDLPTGARLLFRVRAHNMAGPGAPVTTTEPVTVQEILQRPRLQLPRHLRQTIQKKVGEPVNLLIPFQGKPRPQVTWTKEGQPLAGEEVSIRNSPTDTILFIRAARRVHSGTYQVTVRIENMEDKATLVLQVVDKPSPPQDLRVTDAWGLNVALEWKPPQDVGNTELWGYTVQKADKKTMEWFTVLEHYRRTHCVVPELIIGNGYYFRVFSQNMVGFSDRAATTKEPVFIPRPGITYEPPNYKALDFSEAPSFTQPLVNRSVIAGYTAMLCCAVRGSPKPKISWFKNGLDLGEDARFRMFSKQGVLTLEIRKPCPFDGGIYVCRATNLQGEARCECRLEVRVPQ

SEQ ID NO: 12272 - protein, 828 aa, Homo sapiens
MDPPRPALLALLALPALLLLLLAGARAEEEMLENVSLVCPKDATRFKHLRKYTYNYEAESSSGVPGTADSRSATRINCKVELEVPQLCSFILKTSQCTLKEVYGFNPEGKALLKKTKNSEEFAAAMSRYELKLAIPEGKQVFLYPEKDEPTYILNIKRGIISALLVPPETEEAKQVLFLDTVYGNCSTHFTVKTRKGNVATEISTERDLGQCDRFKPIRTGISPLALIKGMTRPLSTLISSSQSCQYTLDAKRKHVAEAICKEQHLFLPFSYKNKYGMVAQVTQTLKLEDTPKINSRFFGEGTKKMGLAFESTKSTSPPKQAEAVLKTLQELKKLTISEQNIQRANLFNKLVTELRGLSDEAVTSLLPQLIEVSSPITLQALVQCGQPQCSTHILQWLKRVHANPLLIDVVTYLVALIPEPSAQQLREIFNMARDQRSRATLYALSHAVNNYHKTNPTGTQELLDIANYLMEQIQDDCTGDEDYTYLILRVIGNMGQTMEQLTPELKSSILKCVQSTKPSLMIQKAAIQALRKMEPKDKDQEVLLQTFLDDASPGDKRLAAYLMLMRSPSQADINKIVQILPWEQNEQVKNFVASHIANILNSEELDIQDLKKLVKEALKESQLPTVMDFRKFSRNYQLYKSVSLPSLDPASAKIEGNLIFDPNNYLPKESMLKTTLTAFGFASADLIEIGLEGKGFEPTLEALFGKQGFFPDSVNKALYWVNGQVPDGVSKVLVDHFGYTKDDKHEQDMVNGIMLSVEKLIKDLKSKEVPEARAYLRILGEELGFASLHDLQLLGKLLLMDRPDSLTIPAAQARKDACTFFRDGGLP

SEQ ID NO: 12273 - protein, 2540 aa, Homo sapiens
MAVETRAELVGKRFLCVAVGDEARSERWESGRGWRSWRAGVIRAVSHRDSRNPDLAVYVEFDDLEWDKREWVKVYEDFSTFLVEYHLIWAKRNDPSQTQGSKSKQIQWPALTFKPLVERNIPSSVTAVEFLVDKQLDFLTEDSAFQPYQDDIDSLNPVLRDNPQLHEEVKVWVKEQKVQEIFMQGPYSLNGYRVRVYRQDSATQWFTGIITHHDLFTRTMIVMNDQVLEPQNVDPSMVQMTFLDDVVHSLLKGENIGITSRRRSRANQNVNAVHSHYTRAQANSPRPAMNSQAAVPKQNTHQQQQQRSIRPNKRKGSDSSIPDEEKMKEEKYDYISRGENPKGKNKHLMNKRRKPEEDEKKLNMKRLRTDNVSDFSESSDSENSNKRIIDNSSEQKPENELKNKNTSKINGEEGKPHNNEKAGEETLKNSQPPWDQIQEDKKHEEAEKRKSVDTQLQEDMIIHSSEQSTVSDHNSNDLLPQECNMDKTHTMELLPKEKFVSRPPTPKCVIDITNDTNLEKVAQENSSTFGLQTLQKMDPNVSDSKHSIANAKFLETAKKDSDQSWVSDVVKVDLTQSSVTNASSGNDHLNMEKEKYVSYISPLSAVSVMEDKLHKRSPPPETIKSKLNTSVDTHKIKSSPSPEVVKPKITHSPDSVKSKATYVNSQATGERRLANKIEHELSRCSFHPIPTRSSTLETTKSPLIIDKNEHFTVYRDPALIGSETGANHISPFLSQHPFPLHSSSHRTCLNPGTHHPALTPAPHLLAGSSSQTPLPTINTHPLTSGPHHAVHHPHLLPTVLPGVPTASLLGGHPRLESAHASSLSHLALAHQQQQQLLQHQSPHLLGQAHPSASYNQLGLYPIIWQYPNGTHAYSGLGLPSSKWVHPENAVNAEASLRRNSPSPWLHQPTPVTSADGIGLLSHIPVRPSSAEPHRPLKITAHSSPPLTKTLVDHHKEELERKAFMEPLRSVASTSAKNDLDLNRSQTGKDCHLHRHFVDPVLNQLQRPPQETGERLNKYKEEHRRILQESIDVAPFTTKIKGLEGERENYSRVASSSSSPKSHIIKQDMDVERSVSDLYKMKHSVPQSLPQSNYFTTLSNSVVNEPPRSYPSKEVSNIYGDKQSNALAAAAANPQTLTSFITSLSKPPPLIKHQPESEGLVGKIPEHLPHQIASHSVTTFRNDCRSPTHLTVSSTNTLRSMPALHRAPVFHPPIHHSLERKEGSYSSLSPPTLTPVMPVNAGGKVQESQKPPTLIPEPKDSQANFKSSSEQSLTEMWRPNNNLSKEKTEWHVEKSSGKLQAAMASVIVRPSSSTKTDSMPAMQLASKDRVSERSSAGAHKTDCLKLAEAGETGRIILPNVNSDSVHTKSEKNFQAVSQGSVPSSVMSAVNTMCNTKTDVITSAADTTSVSSWGGSEVISSLSNTILASTSSECVSSKSVSQPVAQKQECKVSTTAPVTLASSKTGSVVQPSSGFSGTTDFIHLKKHKAALAAAQYKSSNASETEPNAIKNQTLSASLPLDSTVICSTINKANSVGNGQASQTSQPNYHTKLKKAWLTRHSEEDKNTNKMENSGNSVSEIIKPCSVNLIASTSSDIQNSVDSKIIVDKYVKDDKVNRRKAKRTYESGSESGDSDESESKSEQRTKRQPKPTYKKKQNDLQKRKGEIEEDLKPNGVLSRSAKERSKLKLQSNSNTGIPRSVLKDWRKVKKLKQTGESFLQDDSCCEIGPNLQKCRECRLIRSKKGEEPAHSPVFCRFYYFRRLSFSKNGVVRIDGFSSPDQYDDEAMSLWTHENFEDDELDIETSKYILDIIGDKFCQLVTSEKTALSWVKKDAKIAWKRAVRGVREMCDACEATLFNIHWVCQKCGFVVCLDCYKAKERKSSRDKELYAWMKCVKGQPHDHKHLMPTQIIPGSVLTDLLDAMHTLREKYGIKSHCHCTNKQNLQVGNFPTMNGVSQVLQNVLNHSNKISLCMPESQQQNTPPKSEKNGGSSPESDVGTDNKLTPPESQSPLHWLADLAEQKAREEKKENKELTLENQIKEEREQDNSESPNGRTSPLVSQNNEQGSTLRDLLTTTAGKLRVGSTDAGIAFAPVYSMGAPSSKSGRTMPNILDDIIASVVENKIPPSKTSKINVKPELKEEPEESIISAVDENNKLYSDIPHSWICEKHILWLKDYKNSSNWKLFKECWKQGQPAVVSGVHKKMNISLWKAESISLDFGDHQADLLNCKDSIISNANVKEFWDGFEEVSKRQKNKSGETVVLKLKDWPSGEDFKTMMPARYEDLLKSLPLPEYCNPEGKFNLASHLPGFFVRPDLGPRLCSAYGVVAAKDHDIGTTNLHIEVSDVVNILVYVGIAKGNGILSKAGILKKFEEEDLDDILRKRLKDSSEIPGALWHIYAGKDVDKIREFLQKISKEQGLEVLPEHDPIRDQSWYVNKKLRQRLLEEYGVRTCTLIQFLGDAIVLPAGALHQVQNFHSCIQVTEDFVSPEHLVESFHLTQELRLLKEEINYDDKLQVKNILYHAVKEMVRALKIHEDEVEDMEEN

SEQ ID NO: 12274 - protein, 368 aa, Homo sapiens
MEGLVFLNALATRLLFLLHSLVGVWRVTEVKKEPRYWLLALLNLLLFLETALTLKFKRGRGYKWFSPAIFLYLISIVPSLWLLELHHETQYCSIQAEGTSQNTSRKEDFNQTLTSNEQTSRADDLIETAKVFVNNLSTVCEKVWTLGLHQTFLLMLIIGRWLLPIGGGITRDQLSQLLLMFVGTAADILEFTSETLEEQNVRNSPALVYAILVIWTWSMLQFPLDLAVQNVVCPVSVTERGFPSLFFCQYSADLWNIGISVFIQDGPFLVVRLILMTYFKVINQMLVFFAAKNFLVVVLQLYRLVVLALAVRASLRSQSEGLKGEHGCRAQTSESGPSQRDWQNESKEGLAIPLRGSPVTSDDSHHTP

SEQ ID NO: 12275 - protein, 1735 aa, Homo sapiens
MNFLSTAESRTAQAAASGTTLLPQFRAPSWQTGMHSSAATELFATGPLPSTGTLPPSLSAYQHPTTFSNRNFATTSPLVLQDSTFNTTSNGILSHHDPLLQIKTSQGTVPTALAFERLGSSVLSNSIPPQSSTYRSAQESAPHLLQPQFSLLPSALGGSQQTPQAYSSTLFTSSTASIERALLRECSVIKHHQRPSGTQSIQAQLTGSQHSLHSYLSNSSVVNFQETTRQSSLSCSPIGDSTQVSNGGLQQKTSQVSVELAQSYSSAIPSSGYPPSTTKIKSCSTEQPLTSTKTPKPQSIIPPVQTLSYSKPLHNQSSVISGQAQIYSTAQLPSLLSVSQSQNYGLVQPHNVPSIVHSQVYRSSKVEKLPPLYKTLTFSGSSQTVTPENQTLNYSSNQQEVLSSVTNENYPAQTRDLSSVSQSQSYSSGHSQGLSPVSQTQVSYSSQSQVLSVVSLSESYASGESLTLTAPSLSYSSASRAQNLPDSSPTQNYISMHSSQNVQTQESSSPQSQKFLPAVQSSSFASSTHCQTLQNNITSPDPKSYAERKLDSDVYPSSKQEDGFPMQELQVLQPQASLESSTQRLSDGEINAQESTYKVSKADDRYSQSVIRSNSRLEDQVIGVALQASKKEESVVGSVTQLNQQIGQVNNAATLDLKNSTNLIQTPQIRLNTKDLKQQHPLILKVHESKVQEQHDQIINASSQIQIPNHALGHGHQASLPNTQVLLDSACDLQILQQSILQAGLGQVKASLQAQRVQSPQQIVHPFLQMEGHVIQSNGDHSQQQLHPQNSEVMKMDLSESSKPLQQHLTTKGHFSETNQHDSKNQFVSLGSMCFPEAVLLSDERNILSNVDDILAATAAACGVTPTDFSKSTSNETMQAVEDGDSKSHFQQSLDVRHVTSDFNSMTATVGKPQNINDTSLNGNQVTVNLSPVPALQSKMTLDQQHIETPGQNIPTKVTSAVVGPSHEVQEQSSGPFKKQSATNLESEEDSEAPVDSTLNNNRNQEFVSSSRSISGENATSESEFTLGGDDSGVSMNPARSALALLAMAQSGDAVSVKIEEENQDLMHFNLQKKRAKGKGQVKEEDNSNQKQLKRPAQGKRQNPRGTDIYLPYTPPSSESCHDGYQHQEKMRQKIKEVEEKQPEVKTGFIASFLDFLKSGPKQQFSTLAVRMPNRTRRPGTQMVRTFCPPPLPKPSSTTPTPLVSETGGNSPSDKVDNELKNLEHLSSFSSDEDDPGYSQDAYKSVSTPLTTLDATSDKKKKTEALQVATTSPTANTTGTATTSSTTVGAVKQEPLHSTSYAVNILENISSSESSKPIELDGLPSDQFAKGQDTVAIEGFTDEEDTESGGEGQYRERDEFVVKIEDIETFKEALKTGKEPPAIWKVQKALLQKFVPEIRDGQREFAATNSYLGYFGDAKSKYKRIYVKFIENANKKEYVRVCSKKPRNKPSQTIRTVQAKPSSSSKTSDPLASKTTTTKAPSVKPKVKQPKVKAEPPPKKRKKWKEEFSSSQSDSSPEIHTSSSDDEEFEPPAPFVTRFLNTRAMKETFKSYMELLVSIALDPDTMQALEKSNDELLLPHMKKIDGMLNDNRKRLLLNLHLDQSFKNALESFPELTIITRDSKAKSGGTAISKIKMNGKAYNKKTLRTSKTTTKSAQEFAVDPEKIQLYSLYHSLHHYKYHVYLICKDEISSVQKKNEDLGQEEIVQLCMKNVKWVEDLFEKFGELLNHVQQKCS

SEQ ID NO: 12276 - protein, 633 aa, Homo sapiens
MALDGIRMPDGCYADGTWELSVHVTDLNRDVTLRVTGEVHIGGVMLKLVEKLDVKKDWSDHALWWEKKRTWLLKTHWTLDKYGIQADAKLQFTPQHKLLRLQLPNMKYVKVKVNFSDRVFKAVSDICKTFNIRHPEELSLLKKPRDPTKKKKKKLDDQSEDEALELEGPLITPGSGSIYSSPGLYSKTMTPTYDAHDGSPLSPTSAWFGDSALSEGNPGILAVSQPITSPEILAKMFKPQALLDKAKINQGWLDSSRSLMEQDVKENEALLLRFKYYSFFDLNPKYDAIRINQLYEQAKWAILLEEIECTEEEMMMFAALQYHINKLSIMTSENHLNNSDKEVDEVDAALSDLEITLEGGKTSTILGDITSIPELADYIKVFKPKKLTLKGYKQYWCTFKDTSISCYKSKEESSGTPAHQMNLRGCEVTPDVNISGQKFNIKLLIPVAEGMNEIWLRCDNEKQYAHWMAACRLASKGKTMADSSYNLEVQNILSFLKMQHLNPDPQLIPEQITTDITPECLVSPRYLKKYKNKQPGYIRDLITARILEAHQNVAQMSLIEAKMRFIQAWQSLPEFGITHFIARFQGGKKEELIGIAYNRLIRMDASTGDAIKTWRFSNMKQWNVNWEIKMVNS

SEQ ID NO: 12277 - protein, 401 aa, Homo sapiens
MEAGPPGSARPAEPGPCLSGQRGADHTASASLQSVAGTEPGRHPQAVAAVLPAGGCGERMGVPTPKQFCPILERPLISYTLQALERVCWIKDIVVAVTGENMEVMKSIIQKYQHKRISLVEAGVTRHRSIFNGLKALAEDQINSKLSKPEVVIIHDAVRPFVEEGVLLKVVTAAKEHGCSDYDLEFGTECLQLALKYCCTKAKLVEGSPDLWKVTYKRDLYAAESIIKERISQEICVVMDTEEDNKHVGHLLEEVLKSELNHVKVTSEALGHAGRHLQQIILDQCYNFVCVNVTTSDFQETQKLLSMLEESSLCILYPVVVVSVHFLDFKLVPPSQKMENLMQIREFAKEVKERNILLYGLLISYPQDDQKLQESLRQGAIIIASLIKERNSGLIGQLLIA

SEQ ID NO: 12278 - protein, 804 aa, Homo sapiens [sequence omitted]

SEQ ID NO: 12279 - protein, 2610 aa, Homo sapiens
MADVDPDTLLEWLQMGQGDERDMQLIALEQLCMLLLMSDNVDRCFETCPPRTFLPALCKIFLDESAPDNVLEVTARAITYYLDVSAECTRRIVGVDGAIKALCNRLVVVELNNRTSRDLAEQCVKVLELICTRESGAVFEAGGLNCVLTFIRDSGHLVHKDTLHSAMAVVSRLCGKMEPQDSSLEICVESLSSLLKHEDHQVSDGALRCFASLADRFTRRGVDPAPLAKHGLTEELLSRMAAAGGTVSGPSSACKPGRSTTGAPSTTADSKLSNQVSTIVSLLSTLCRGSPVVTHDLLRSELPDSIESALQGDERCVLDTMRLVDLLLVLLFEGRKALPKSSAGSTGRIPGLRRLDSSGERSHRQLIDCIRSKDTDALIDAIDTGAFEVNFMDDVGQTLLNWASAFGTQEMVEFLCERGADVNRGQRSSSLHYAACFGRPQVAKTLLRHGANPDLRDEDGKTPLDKARERGHSEVVAILQSPGDWMCPVNKGDDKKKKDTNKDEEECNEPKGDPEMAPIYLKRLLPVFAQTFQQTMLPSIRKASLALIRKMIHFCSEALLKEVCDSDVGHNLPTILVEITATVLDQEDDDDGHLLALQIIRDLVDKGGDIFLDQLARLGVISKVSTLAGPSSDDENEEESKPEKEDEPQEDAKELQQGKPYHWRDWSIIRGRDCLYIWSDAAALELSNGSNGWFRFILDGKLATMYSSGSPEGGSDSSESRSEFLEKLQRARGQVKPSTSSQPILSAPGPTKLTVGNWSLTCLKEGEIAIHNSDGQQATILKEDLPGFVFESNRGTKHSFTAETSLGSEFVTGWTGKRGRKLKSKLEKTKQKVRTMARDLYDDHFKAVESMPRGVVVTLRNIATQLESSWELHTNRQCIESENTWRDLMKTALENLIVLLKDENTISPYEMCSSGLVQALLTVLNNSMDLDMKQDCSQLVERINVFKTAFSENEDDESRPAVALIRKLIAVLESIERLPLHLYDTPGSTYNLQILTRRLRFRLERAPGETALIDRTGRMLKMEPLATVESLEQYLLKMVAKQWYDFDRSSFVFVRKLREGQNFIFRHQHDFDENGIIYWIGTNAKTAYEWVNPAAYGLVVVTSSEGRNLPYGRLEDILSRDNSALNCHSNDDKNAWFAIDLGLWVIPSAYTLRHARGYGRSALRNWVFQVSKDGQNWTSLYTHVDDCSLNEPGSTATWPLDPPKDEKQGWRHVRIKQMGKNASGQTHYLSLSGFELYGTVNGVCEDQLGKAAKEAEANLRRQRRLVRSQVLKYMVPGARVIRGLDWKWRDQDGSPQGEGTVTGELHNGWIDVTWDAGGSNSYRMGAEGKFDLKLAPGYDPDTVASPKPVSSTVSGTTQSWSSLVKNNCPDKTSAAAGSSSRKGSSSSVCSVASSSDISLGSTKTERRSEIVMEHSIVSGADVHEPIVVLSSAENVPQTEVGSSSSASTSTLTAETGSENAERKLGPDSSVRTPGESSAISMGIVSVSSPDVSSVSELTNKEAASQRPLSSSASNRLSVSSLLAAGAPMSSSASVPNLSSRETSSLESFVRRVANIARTNATNNMNLSRSSSDNNTNTLGRNVMSTATSPLMGAQSFPNLTTPGTTSTVTMSTSSVTSSSNVATATTVLSVGQSLSNTLTTSLTSTSSESDTGQEAEYSLYDFLDSCRASTLLAELDDDEDLPEPDEEDDENEDDNQEDQEYEEVMILRRPSLQRRAGSRSDVTHHAVTSQLPQVPAGAGSRPIGEQEEEEYETKGGRRRTWDDDYVLKRQFSALVPAFDPRPGRTNVQQTTDLEIPPPGTPHSELLEEVECTPSPRLALTLKVTGLGTTREVELPLTNFRSTIFYYVQKLLQLSCNGNVKSDKLRRIWEPTYTIMYREMKDSDKEKENGKMGCWSIEHVEQYLGTDELPKNDLITYLQKNADAAFLRHWKLTGTNKSIRKNRNCSQLIAAYKDFCEHGTKSGLNQGAISTLQSSDILNLTKEQPQAKAGNGQNSCGVEDVLQLLRILYIVASDPYSRISQEDGDEQPQFTFPPDEFTSKKITTKILQQIEEPLALASGALPDWCEQLTSKCPFLIPFETRQLYFTCTAFGASRAIVWLQNRREATVERTRTTSSVRRDDPGEFRVGRLKHERVKVPRGESLMEWAENVMQIHADRKSVLEVEFLGEEGTGLGPTLEFYALVAAEFQRTDLGAWLCDDNFPDDESRHVDLGGGLKPPGYYVQRSCGLFTAPFPQDSDELERITKLFHFLGIFLAKCIQDNRLVDLPISKPFFKLMCMGDIKSNMSKLIYESRGDRDLHCTESQSEASTEEGHDSLSVGSFEEDSKSEFILDPPKPKPPAWFNGILTWEDFELVNPHRARFLKEIKDLAIKRRQILSNKGLSEDEKNTKLQELVLKNPSGSGPPLSIEDLGLNFQFCPSSRIYGFTAVDLKPSGEDEMITMDNAEEYVDLMFDFCMHTGIQKQMEAFRDGFNKVFPMEKLSSFSHEEVQMILCGNQSPSWAAEDIINYTEPKLGYTRDSPGFLRFVRVLCGMSSDERKAFLQFTTGCSTLPPGGLANLHPRLTVVRKVDATDASYPSVNTCVHYLKLPEYSSEEIMRERLLAATMEKGFHLN

SEQ ID NO: 12280 - protein, 1654 aa, Homo sapiens
MSLDFGSVALPVQNEDEEYDEEDYEREKELQQLLTDLPHDMLDDDLSSPELQYSDCSEDGTDGQPHHPEQLEMSWNEQMLPKSQSVNGYNEIQSLYAGEKCGNVWEENRSKTEDRHPVYHPEEGGDEGGSGYSPPSKCEQTDLYHLPENFRPYTNGQKQEFNNQATNVIKFSDPQWNHFQGPSCQGLEPYNKVTYKPYQSSAQNNGSPAQEITGSDTFEGLQQQFLGANENSAENMQIIQLQVLNKAKERQLENLIEKLNESERQIRYLNHQLVIIKDEKDGLTLSLRESQKLFQNGKEREIQLEAQIKALETQIQALKVNEEQMIKKSRTTEMALESLKQQLVDLHHSESLQRAREQHESIVMGLTKKYEEQVLSLQKNLDATVTALKEQEDICSRLKDHVKQLERNQEAIKLEKTEIINKLTRSLEESQKQCAHLLQSGSVQEVAQLQFQLQQAQKAHAMSANMNKALQEELTELKDEISLYESAAKLGIHPSDSEGELNIELTESYVDLGIKKVNWKKSKVTSIVQEEDPNEELSKDEFILKLKAEVQRLLGSNSMKRHLVSQLQNDLKDCHKKIEDLHQVKKDEKSIEVETKTDTSEKPKNQLWPESSTSDVVRDDILLLKNEIQVLQQQNQELKETEGKLRNTNQDLCNQMRQMVQDFDHDKQEAVDRCERTYQQHHEAMKTQIRESLLAKHALEKQQLFEAYERTHLQLRSELDKLNKEVTAVQECYLEVCREKDNLELTLRKTTEKEQQTQEKIKEKLIQQLEKEWQSKLDQTIKAMKKKTLDCGSQTDQVTTSDVISKKEMAIMIEEQKCTIQQNLEQEKDIAIKGAMKKLEIELELKHCENITKQVEIAVQNAHQRWLGELPELAEYQALVKAEQKKWEEQHEVSVNKRISFAVSEAKEKWKSELENMRKNILPGKELEEKIHSLQKELELKNEEVPVVIRAELAKARSEWNKEKQEEIHRIQEQNEQDYRQFLDDHRNKINEVLAAAKEDFMKQKTELLLQKETELQTCLDQSRREWTMQEAKRIQLEIYQYEEDILTVLGVLLSDTQKEHISDSEDKQLLEIMSTCSSKWMSVQYFEKLKGCIQKAFQDTLPLLVENADPEWKKRNMAELSKDSASQGTGQGDPGPAAGHHAQPLALQATEAEAEENNKVVEELIEENNDMKNKLEELQTLCKTPPRSLSAGAIENACLPCSGGALEELRGQYIKAVKKIKCDMLRYIQESKERAAEMVKAEVLRERQETARKMRKYYLICLQQILQDDGKEGAEKKIMNAASKLATMAKLLETPISSKSQSKTTQSALPLTSEMLIAVKKSKRNDVNQKIPCCIESKSNSVNTITRTLCEQAPKRRAACNLQRLLENSEHQSIKHVGSKETHLEFQFGDGSCKHLNSLPRNVSPEFVPCEGEGGFGLHKKKDLLSDNGSESLPHSAAYPFLGTLGNKPSPRCTPGPSESGCMHITFRDSNERLGLKVYKCNPLMESENAASEKSQGLDVQEPPVKDGGDLSDCLGWPSSSATLSFDSREASFVHGRPQGTLEIPSESVKSKQFSPSGYLSDTEESNMICQTMKCQRYQTPYLSEETTYLEPGKISVNCGHPSRHKADRLKSDFKKLSSTLPSSVCQQPSRKLIVPLSSQQDSGFDSPFVNLD

SEQ ID NO: 12281 - protein, 1020 aa, Homo sapiens
MAQFPTPFGGSLDIWAITVEERAKHDQQFHSLKPISGFITGDQARNFFFQSGLPQPVLAQIWALADMNNDGRMDQVEFSIAMKLIKLKLQGYQLPSALPPVMKQQPVAISSAPAFGMGGIASMPPLTAVAPVPMGSIPVVGMSPTLVSSVPTAAVPPLANGAPPVIQPLPAFAHPAATLPKSSSFSRSGPGSQLNTKLQKAQSFDVASVPPVAEWAVPQSSRLKYRQLFNSHDKTMSGHLTGPQARTILMQSSLPQAQLASIWNLSDIDQDGKLTAEEFILAMHLIDVAMSGQPLPPVLPPEYIPPSFRRVRSGSGISVISSTSVDQRLPEEPVLEDEQQQLEKKLPVTFEDKKRENFERGNLELEKRRQALLEQQRKEQERLAQLERAEQERKERERQEQERKRQLELEKQLEKQRELERQREEERRKEIERREAAKRELERQRQLEWERNRRQELLNQRNKEQEDIVVLKAKKKTLEFELEALNDKKHQLEGKLQDIRCRLTTQRQEIESTNKSRELRIAEITHLQQQLQESQQMLGRLIPEKQILNDQLKQVQQNSLHRDSLVTLKRALEAKELARQHLRDQLDEVEKETRSKLQEIDIFNNQLKELREIHNKQQLQKQKSMEAERLKQKEQERKIIELEKQKEEAQRRAQERDKQWLEHVQQEDEHQRPRKLHEEEKLKREESVKKKDGEEKGKQEAQDKLGRLFHQHQEPAKPAVQAPWSTAEKGPLTISAQENVKVVYYRALYPFESRSHDEITIQPGDIVMVDESQTGEPGWLGGELKGKTGWFPANYAEKIPENEVPAPVKPVTDSTSAPAPKLALRETPAPLAVTSSEPSTTPNNWADFSSTWPTSTNEKPETDNWDAWAAQPSLTVPSAGQLRQRSAFTPATATGSSPSPVLGQPDFLLHPSMRLGHMQPRIVLLFPDPLQCSTSRLLPMLRPRPGVPFLRSPSCQSPSHPSRPISDAAPSVKFTLMPPGRIHPCFLFIPAVNSRNSFLVYFILPGGTLGCFYLCLPHYL

SEQ ID NO: 12282 - protein, 1253 aa, Homo sapiens
MPRLSGKSVRVYDEEVEEPVLKAEAEKTEQEKTREQKEVDLIPKVQEAVNYGLQVLDSAFEQLDIKAGNSDSEEDDANGRVELILEPKDLYIDRPLPYLIGSKLFMEQEDVGLGELSSEEGSVGSDRGSIVDTEEEKEEEESDEDFAHHSDNEQNRHTTQMSDEEEDDDGCDLFADSEKEEEDIEDIEENTRPKRSRPTSFADELAARIKGDAVGRVDEEPTTLPSGEAKPRKTLKEKKERRTPSDDEEDNLFAPPKLTDEDFSPFGSGGGLFSGGKGLFDDEDEESDLFTEAPQDRQAGASVKEESSSSKPGKKIPAGAVSVFLGDTDVFGAASVPSMKEPQKPEQPTPRKSPYGPPPTGLFDDDDGDDDDDFFSAPHSKPSKTGKVQSTADIFGDEEGDLFKEKAVASPEATVSQTDENKARAEKKVTLSSSKNLKPSSETKTQKGLFSDEEDSEDLFSSQSASKLKGASLLPGKLPTLVSLFDDEDEEDNLFGGTAAKKQTLCLQAQREEKAKASELSKKKASALLFSSDEEDQWNIPASQTHLASDSRSKGEPRDSGTLQSQEAKAVKKTSLFEEDEEDDLFAIAKDSQKKTQRVSLLFEDDVDSGGSLFGSPPTSVPPATKKKETVSEAPPLLFSDEEEKEAQLGVKSVDKKVESAKESLKFGRTDVAESEKEGLLTRSAQETVKHSDLFSSSSPWDKGTKPRTKTVLSLFDEEEDKMEDQNIIQAPQKEVGKGRDPDAHPKSTGVFQDEELLFSHKLQKDNDPDVDLFAGTKKTKLLEPSVGSLFGDDEDDDLFSSAKSQPLVQEKKRVVKKDHSVDSFKNQKHPESIQGSKEKGIWKPETPQDSSGLAPFKTKEPSTRIGKIQANLAINPAALLPTAASQISEVKPVLPELAFPSSEHRRSHGLESVPVLPGSGEAGVSFDLPAQADTLHSANKSRVKMRGKRRPQTRAARRLAAQESSETEDMSVPRGPIAQWADGAISPNGHRPQLRAASGEDSTEEALAAAAAPWEGGPVPGVDRSPFAKSLGHSRGEADLFDSGDIFSTGTGSQSVERTKPKAKIAENPANPPVGGKAKSPMFPALGEASSDDDLFQSAKPKPAKKTNPFPLLEDEDDLFTDQKVKKNETKSNSQQDVILTTQDIFEDDIFATEAIKPSQKTREKEKTLESNLFDDNIDIFADLTVKPKEKSKKKVEAKSIFDDDMDDIFSSGIQAKTTKPKSRSAQAAPEPRFEHKVSNIFDDPLNAFGGQ

SEQ ID NO: 12283 - protein, 1144 aa, Homo sapiens
MAQFPTPFGGSLDIWAITVEERAKHDQQFHSLKPISGFITGDQARNFFFQSGLPQPVLAQIWALADMNNDGRMDQVEFSIAMKLIKLKLQGYQLPSALPPVMKQQPVAISSAPAFGMGGIASMPPLTAVAPVPMGSIPVVGMSPTLVSSVPTAAVPPLANGAPPVIQPLPAFAHPAATLPKSSSFSRSGPGSQLNTKLQKAQSFDVASVPPVAEWAVPQSSRLKYRQLFNSHDKTMSGHLTGPQARTILMQSSLPQAQLASIWNLSDIDQDGKLTAEEFILAMHLIDVAMSGQPLPPVLPPEYIPPSFRRVRSGSGISVISSTSVDQRLPEEPVLEDEQQQLEKKLPVTFEDKKRENFERGNLELEKRRQALLEQQRKEQERLAQLERAEQERKERERQEQERKRQLELEKQLEKQRELERQREEERRKEIERREAAKRELERQRQLEWERNRRQELLNQRNKEQEDIVVLKAKKKTLEFELEALNDKKHQLEGKLQDIRCRLTTQRQEIESTNKSRELRIAEITHLQQQLQESQQMLGRLIPEKQILNDQLKQVQQNSLHRDSLVTLKRALEAKELARQHLRDQLDEVEKETRSKLQEIDIFNNQLKELREIHNKQQLQKQKSMEAERLKQKEQERKIIELEKQKEEAQRRAQERDKQWLEHVQQEDEHQRPRKLHEEEKLKREESVKKKDGEEKGKQEAQDKLGRLFHQHQEPAKPAVQAPWSTAEKGPLTISAQENVKVVYYRALYPFESRSHDEITIQPGDIVMVDESQTGEPGWLGGELKGKTGWFPANYAEKIPENEVPAPVKPVTDSTSAPAPKLALRETPAPLAVTSSEPSTTPNNWADFSSTWPTSTNEKPETDNWDAWAAQPSLTVPSAGQLRQRSAFTPATATGSSPSPVLGQGEKVEGLQAQALYPWRAKKDNHLNFNKNDVITVLEQQDMWWFGEVQGQKGWFPKSYVKLISGPIRKSTSMDSGSSESPASLKRVASPAAKPVVSGEEIAQVIASYTATGPEQLTLAPGQLILIRKKNPGGWWEGELQARGKKRQIGWFPANYVKLLSPGTSKITPTEPPKSTALAAVCQVIGMYDYTAQNDDELAFNKGQIINVLNKEDPDWWKGEVNGQVGLFPSNYVKLTTDMDPSQQ

SEQ ID NO: 12284 - protein, 1215 aa, Homo sapiens
MAQFPTPFGGSLDIWAITVEERAKHDQQFHSLKPISGFITGDQARNFFFQSGLPQPVLAQIWALADMNNDGRMDQVEFSIAMKLIKLKLQGYQLPSALPPVMKQQPVAISSAPAFGMGGIASMPPLTAVAPVPMGSIPVVGMSPTLVSSVPTAAVPPLANGAPPVIQPLPAFAHPAATLPKSSSFSRSGPGSQLNTKLQKAQSFDVASVPPVAEWAVPQSSRLKYRQLFNSHDKTMSGHLTGPQARTILMQSSLPQAQLASIWNLSDIDQDGKLTAEEFILAMHLIDVAMSGQPLPPVLPPEYIPPSFRRVRSGSGISVISSTSVDQRLPEEPVLEDEQQQLEKKLPVTFEDKKRENFERGNLELEKRRQALLEQQRKEQERLAQLERAEQERKERERQEQERKRQLELEKQLEKQRELERQREEERRKEIERREAAKRELERQRQLEWERNRRQELLNQRNKEQEDIVVLKAKKKTLEFELEALNDKKHQLEGKLQDIRCRLTTQRQEIESTNKSRELRIAEITHLQQQLQESQQMLGRLIPEKQILNDQLKQVQQNSLHRDSLVTLKRALEAKELARQHLRDQLDEVEKETRSKLQEIDIFNNQLKELREIHNKQQLQKQKSMEAERLKQKEQERKIIELEKQKEEAQRRAQERDKQWLEHVQQEDEHQRPRKLHEEEKLKREESVKKKDGEEKGKQEAQDKLGRLFHQHQEPAKPAVQAPWSTAEKGPLTISAQENVKVVYYRALYPFESRSHDEITIQPGDIVMVDESQTGEPGWLGGELKGKTGWFPANYAEKIPENEVPAPVKPVTDSTSAPAPKLALRETPAPLAVTSSEPSTTPNNWADFSSTWPTSTNEKPETDNWDAWAAQPSLTVPSAGQLRQRSAFTPATATGSSPSPVLGQGEKVEGLQAQALYPWRAKKDNHLNFNKNDVITVLEQQDMWWFGEVQGQKGWFPKSYVKLISGPIRKSTSMDSGSSESPASLKRVASPAAKPVVSGEEFIAMYTYESSEQGDLTFQQGDVILVTKKDGDWWTGTVGDKAGVFPSNYVRLKDSEGSGTAGKTGSLGKKPEIAQVIASYTATGPEQLTLAPGQLILIRKKNPGGWWEGELQARGKKRQIGWFPANYVKLLSPGTSKITPTEPPKSTALAAVCQVIGMYDYTAQNDDELAFNKGQIINVLNKEDPDWWKGEVNGQVGLFPSNYVKLTTDMDPSQQ

SEQ ID NO: 12285 - protein, 1178 aa, Homo sapiens
MAQFPTPFGGSLDIWAITVEERAKHDQQFHSLKPISGFITGDQARNFFFQSGLPQPVLAQIWALADMNNDGRMDQVEFSIAMKLIKLKLQGYQLPSALPPVMKQQPVAISSAPAFAAVPPLANGAPPVIQPLPAFAHPAATLPKSSSFSRSGPGSQLNTKLQKAQSFDVASVPPVAEWAVPQSSRLKYRQLFNSHDKTMSGHLTGPQARTILMQSSLPQAQLASIWNLSDIDQDGKLTAEEFILAMHLIDVAMSGQPLPPVLPPEYIPPSFRRVRSGSGISVISSTSVDQRLPEEPVLEDEQQQLEKKLPVTFEDKKRENFERGNLELEKRRQALLEQQRKEQERLAQLERAEQERKERERQEQERKRQLELEKQLEKQRELERQREEERRKEIERREAAKRELERQRQLEWERNRRQELLNQRNKEQEDIVVLKAKKKTLEFELEALNDKKHQLEGKLQDIRCRLTTQRQEIESTNKSRELRIAEITHLQQQLQESQQMLGRLIPEKQILNDQLKQVQQNSLHRDSLVTLKRALEAKELARQHLRDQLDEVEKETRSKLQEIDIFNNQLKELREIHNKQQLQKQKSMEAERLKQKEQERKIIELEKQKEEAQRRAQERDKQWLEHVQQEDEHQRPRKLHEEEKLKREESVKKKDGEEKGKQEAQDKLGRLFHQHQEPAKPAVQAPWSTAEKGPLTISAQENVKVVYYRALYPFESRSHDEITIQPGDIVMVDESQTGEPGWLGGELKGKTGWFPANYAEKIPENEVPAPVKPVTDSTSAPAPKLALRETPAPLAVTSSEPSTTPNNWADFSSTWPTSTNEKPETDNWDAWAAQPSLTVPSAGQLRQRSAFTPATATGSSPSPVLGQGEKVEGLQAQALYPWRAKKDNHLNFNKNDVITVLEQQDMWWFGEVQGQKGWFPKSYVKLISGPIRKSTSMDSGSSESPASLKRVASPAAKPVVSGEEFIAMYTYESSEQGDLTFQQGDVILVTKKDGDWWTGTVGDKAGVFPSNYVRLKDSEGSGTAGKTGSLGKKPEIAQVIASYTATGPEQLTLAPGQLILIRKKNPGGWWEGELQARGKKRQIGWFPANYVKLLSPGTSKITPTEPPKSTALAAVCQVIGMYDYTAQNDDELAFNKGQIINVLNKEDPDWWKGEVNGQVGLFPSNYVKLTTDMDPSQQ

SEQ ID NO: 12286 - protein, 1149 aa, Homo sapiens
MAQFPTPFGGSLDIWAITVEERAKHDQQFHSLKPISGFITGDQARNFFFQSGLPQPVLAQIWALADMNNDGRMDQVEFSIAMKLIKLKLQGYQLPSALPPVMKQQPVAISSAPAFGMGGIASMPPLTAVAPVPMGSIPVVGMSPTLVSSVPTAAVPPLANGAPPVIQPLPAFAHPAATLPKSSSFSRSGPGSQLNTKLQKAQSFDVASVPPVAEWAVPQSSRLKYRQLFNSHDKTMSGHLTGPQARTILMQSSLPQAQLASIWNLSDIDQDGKLTAEEFILAMHLIDVAMSGQPLPPVLPPEYIPPSFRRVRSGSGISVISSTSVDQRLPEEPVLEDEQQQLEKKLPVTFEDKKRENFERGNLELEKRRQALLEQQRKEQERLAQLERAEQERKERERQEQERKRQLELEKQLEKQRELERQREEERRKEIERREAAKRELERQRQLEWERNRRQELLNQRNKEQEDIVVLKAKKKTLEFELEALNDKKHQLEGKLQDIRCRLTTQRQEIESTNKSRELRIAEITHLQQQLQESQQMLGRLIPEKQILNDQLKQVQQNSLHRDSLVTLKRALEAKELARQHLRDQLDEVEKETRSKLQEIDIFNNQLKELREIHNKQQLQKQKSMEAERLKQKEQERKIIELEKQKEEAQRRAQERDKQWLEHVQQEDEHQRPRKLHEEEKLKREESVKKKDGEEKGKQEAQDKLGRLFHQHQEPAKPAVQAPWSTAEKGPLTISAQENVKVVYYRALYPFESRSHDEITIQPGDIVMVKGEWVDESQTGEPGWLGGELKGKTGWFPANYAEKIPENEVPAPVKPVTDSTSAPAPKLALRETPAPLAVTSSEPSTTPNNWADFSSTWPTSTNEKPETDNWDAWAAQPSLTVPSAGQLRQRSAFTPATATGSSPSPVLGQGEKVEGLQAQALYPWRAKKDNHLNFNKNDVITVLEQQDMWWFGEVQGQKGWFPKSYVKLISGPIRKSTSMDSGSSESPASLKRVASPAAKPVVSGEEIAQVIASYTATGPEQLTLAPGQLILIRKKNPGGWWEGELQARGKKRQIGWFPANYVKLLSPGTSKITPTEPPKSTALAAVCQVIGMYDYTAQNDDELAFNKGQIINVLNKEDPDWWKGEVNGQVGLFPSNYVKLTTDMDPSQQ

SEQ ID NO: 12287 - protein, 374 aa, Homo sapiens
MLQDLSASVFFPPCSQHRTLAQVPDNDEQFVPDYQAESLAFHGLPLKIKKEPHSPCSEISSACSQEQPFKFSYGEKCLYNVRFRRQLSEPCNSFPPLPTMPREGRPMYQRQMSEPNIPFPPQGFKQEYHDPVYEHNTMVGSAASQSFPPPLMIKQEPRDFAYDSEVPSCHSIYMRQEGFLAHPSRTEGCMFEKGPRQFYDDTCVVPEKFDGDIKQEPGMYREGPTYQRRGSLQLWQFLVALLDDPSNSHFIAWTGRGMEFKLIEPEEVARRWGIQKNRPAMNYDKLSRSLRYYYEKGIMQKVAGERYVYKFVCDPEALFSMAFPDNQRPLLKTDMERHINEEDTVPLSHFDESMAYMPEGGCCNPHPYNEGYVY

SEQ ID NO: 12288 - protein, 1513 aa, Homo sapiens
MEPRSMEYFCAQVQQKDVGGRLQVGQELLLYLGAPGAISDLEEDLGRLGKTVDALTGWVGSSNYRVSLMGLEILSAFVDRLSTRFKSYVAMVIVALIDRMGDAKDKVRDEAQTLILKLMDQVAPPMYIWEQLASGFKHKNFRSREGVCLCLIETLNIFGAQPLVISKLIPHLCILFGDSNSQVRDAAILAIVEIYRHVGEKVRMDLYKRGIPPARLEMIFAKFDEVQSSGGMILSVCKDKSFDDEESVDGNRPSSAASAFKVPAPKTSGNPANSARKPGSAGGPKVGGASKEGGAGAVDEDDFIKAFTDVPSIQIYSSRELEETLNKIREILSDDKHDWDQRANALKKIRSLLVAGAAQYDCFFQHLRLLDGALKLSAKDLRSQVVREACITVAHLSTVLGNKFDHGAEAIVPTLFNLVPNSAKVMATSGCAAIRFIIRHTHVPRLIPLITSNCTSKSVPVRRRSFEFLDLLLQEWQTHSLERHAAVLVETIKKGIHDADAEARVEARKTYMGLRNHFPGEAETLYNSLEPSYQKSLQTYLKSSGSVASLPQSDRSSSSSQESLNRPFSSKWSTANPSTVAGRVSAGSSKASSLPGSLQRSRSDIDVNAAAGAKAHHAAGQSVRSGRLGAGALNAGSYASLEDTSDKLDGTASEDGRVRAKLSAPLAGMGNAKADSRGRSRTKMVSQSQPGSRSGSPGRVLTTTALSTVSSGVQRVLVNSASAQKRSKIPRSQGCSREASPSRLSVARSSRIPRPSVSQGCSREASRESSRDTSPVRSFQPLGPGYGISQSSRLSSSVSAMRVLNTGSDVEEAVADALLLGDIRTKKKPARRRYESYGMHSDDDANSDASSACSERSYSSRNGSIPTYMRQTEDVAEVLNRCASSNWSERKEGLLGLQNLLKNQRTLSRVELKRLCEIFTRMFADPHGKVFSMFLETLVDFIQVHKDDLQDWLFVLLTQLLKKMGADLLGSVQAKVQKALDVTRESFPNDLQFNILMRFTVDQTQTPSLKVKVAILKYIETLAKQMDPGDFINSSETRLAVSRVITWTTEPKSSDVRKAAQSVLISLFELNTPEFTMLLGALPKTFQDGATKLLHNHLRNTGNGTQSSMGSPLTRPTPRSPANWSSPLTSPTNTSQNTLSPSAFDYDTENMNSEDIYSSLRGVTEAIQNFSFRSQEDMNEPLKRDSKKDDGDSMCGGPGMSDPRAGGDATDSSQTALDNKASLLHSMPTHSSPRSRDYNPYNYSDSISPFNKSALKEAMFDDDADQFPDDLSLDHSDLVAELLKELSNHNERVEERKIALYELMKLTQEESFSVWDEHFKTILLLLLETLGDKEPTIRALALKVLREILRHQPARFKNYAELTVMKTLEAHKDPHKEVVRSAEEAASVLATSISPEQCIKVLCPIIQTADYPINLAAIKMQTKVIERVSKETLNLLLPEIMPGLIQGYDNSESSVRKACVFCLVAVHAVIGDELKPHLSQLTGSKMKLLNLYIKRAQTGSGGADPTTDVSGQS

SEQ ID NO: 12289 - protein, 995 aa, Homo sapiens
MKLDVNFQRKKGDDSDEEDLCISNKWTFQRTSRRWSRVDDLYTLLPRGDRNGSPGGTGMRNTTSSESVLTDLSEPEVCSIHSESSGGSDSRSQPGQCCTDNPVMLDAPLVSSSLPQPPRDVLNHPFHPKNEKPTRARAKSFLKRMETLRGKGAHGRHKGSGRTGGLVISGPMLQQEPESFKAMQCIQIPNGDLQNSPPPACRKGLPCSGKSSGESSPSEHSSSGVSTPCLKERKCHEANKRGGMYLEDLDVLAGTALPDAGDQSRMHEFHSQENLVVHIPKDHKPGTFPKALSIESLSPTDSSNGVNWRTGSISLGREQVPGAREPRLMASCHRASRVSIYDNVPGSHLYASTGDLLDLEKDDLFPHLDDILQHVNGLQEVVDDWSKDVLPELQTHDTLVGEPGLSTFPSPNQITLDFEGNSVSEGRTTPSDVERDVTSLNESEPPGVRDRRDSGVGASLTRPNRRLRWNSFQLSHQPRPAPASPHISSQTASQLSLLQRFSLLRLTAIMEKHSMSNKHGWTWSVPKFMKRMKVPDYKDKAVFGVPLIVHVQRTGQPLPQSIQQALRYLRSNCLDQVGLFRKSGVKSRIHALRQMNENFPENVNYEDQSAYDVADMVKQFFRDLPEPLFTNKLSETFLHIYQYVSKEQRLQAVQAAILLLADENREVLQTLLCFLNDVVNLVEENQMTPMNLAVCLAPSLFHLNLLKKESSPRVIQKKYATGKPDQKDLNENLAAAQGLAHMIMECDRLFEVPHELVAQSRNSYVEAEIHVPTLEELGTQLEESGATFHTYLNHLIQGLQKEAKEKFKGWVTCSSTDNTDLAFKKVGDGNPLKLWKASVEVEAPPSVVLNRVLRERHLWDEDFVQWKVVETLDRQTEIYQYVLNSMAPHPSRDFVVLRTWKTDLPKGMCTLVSLSVEHEEAQLLGGVRAVVMDSQYLIEPCGSGKSRLTHICRIDLKGHSPEWYSKGFGHLCAAEVARIRNSFQPLIAEGPETKI

SEQ ID NO: 12290 - protein, 1716 aa, Homo sapiens
MAQFPTPFGGSLDIWAITVEERAKHDQQFHSLKPISGFITGDQARNFFFQSGLPQPVLAQIWALADMNNDGRMDQVEFSIAMKLIKLKLQGYQLPSALPPVMKQQPVAISSAPAFGMGGIASMPPLTAVAPVPMGSIPVVGMSPTLVSSVPTAAVPPLANGAPPVIQPLPAFAHPAATLPKSSSFSRSGPGSQLNTKLQKAQSFDVASVPPVAEWAVPQSSRLKYRQLFNSHDKTMSGHLTGPQARTILMQSSLPQAQLASIWNLSDIDQDGKLTAEEFILAMHLIDVAMSGQPLPPVLPPEYIPPSFRRVRSGSGISVISSTSVDQRLPEEPVLEDEQQQLEKKLPVTFEDKKRENFERGNLELEKRRQALLEQQRKEQERLAQLERAEQERKERERQEQERKRQLELEKQLEKQRELERQREEERRKEIERREAAKRELERQRQLEWERNRRQELLNQRNKEQEDIVVLKAKKKTLEFELEALNDKKHQLEGKLQDIRCRLTTQRQEIESTNKSRELRIAEITHLQQQLQESQQMLGRLIPEKQILNDQLKQVQQNSLHRDSLVTLKRALEAKELARQHLRDQLDEVEKETRSKLQEIDIFNNQLKELREIHNKQQLQKQKSMEAERLKQKEQERKIIELEKQKEEAQRRAQERDKQWLEHVQQEDEHQRPRKLHEEEKLKREESVKKKDGEEKGKQEAQDKLGRLFHQHQEPAKPAVQAPWSTAEKGPLTISAQENVKVVYYRALYPFESRSHDEITIQPGDIVMVDESQTGEPGWLGGELKGKTGWFPANYAEKIPENEVPAPVKPVTDSTSAPAPKLALRETPAPLAVTSSEPSTTPNNWADFSSTWPTSTNEKPETDNWDAWAAQPSLTVPSAGQLRQRSAFTPATATGSSPSPVLGQGEKVEGLQAQALYPWRAKKDNHLNFNKNDVITVLEQQDMWWFGEVQGQKGWFPKSYVKLISGPIRKSTSMDSGSSESPASLKRVASPAAKPVVSGEEFIAMYTYESSEQGDLTFQQGDVILVTKKDGDWWTGTVGDKAGVFPSNYVRLKDSEGSGTAGKTGSLGKKPEIAQVIASYTATGPEQLTLAPGQLILIRKKNPGGWWEGELQARGKKRQIGWFPANYVKLLSPGTSKITPTEPPKSTALAAVCQVIGMYDYTAQNDDELAFNKGQIINVLNKEDPDWWKGEVNGQVGLFPSNYVKLTTDMDPSQQWCSDLHLLDMLTPTERKRQGYIHELIVTEENYVNDLQLVTEIFQKPLMESELLTEKEVAMIFVNWKELIMCNIKLLKALRVRKKMSGEKMPVKMIGDILSAQLPHMQPYIRFCSRQLNGAALIQQKTDEAPDFKEFVKRLAMDPRCKGMPLSSFILKPMQRVTRYPLIIKNILENTPENHPDHSHLKHALEKAEELCSQVNEGVREKENSDRLEWIQAHVQCEGLSEQLVFNSVTNCLGPRKFLHSGKLYKAKSNKELYGFLFNDFLLLTQITKPLGSSGTDKVFSPKSNLQYKMYKTPIFLNEVLVKLPTDPSGDEPIFHISHIDRVYTLRAESINERTAWVQKIKAASELYIETEKKKREKAYLVRSQRATGIGRLMVNVVEGIELKPCRSHGKSNPYCEVTMGSQCHITKTIQDTLNPKWNSNCQFFIRDLEQEVLCITVFERDQFSPDDFLGRTEIRVADIKKDQGSKGPVTKCLLLHEVPTGEIVVRLDLQLFDEP

SEQ ID NO: 12291 - protein, 875 aa, Homo sapiens
MFLLRRYVCIFTEKLKNQAELYVFLSVKFSNCNGKRKVQYESSEPADFKVDEDGMVYAVRSFPLSSEHAKFLIYAQDKETQEKWQVAVKLSLKPTLTEESVKESAEVEEIVFPRQFSKHSGHLQRQKRDWVIPPINLPENSRGPFPQELVRIRSDRDKNLSLRYSVTGPGADQPPTGIFIINPISGQLSVTKPLDREQIARFHLRAHAVDINGNQVENPIDIVINVIDMNDNRPEFLHQVWNGTVPEGSKPGTYVMTVTAIDADDPNALNGMLRYRIVSQAPSTPSPNMFTINNETGDIITVAAGLDREKVQQYTLIIQATDMEGNPTYGLSNTATAVITVTDVNDNPPEFTAMTFYGEVPENRVDIIVANLTVTDKDQPHTPAWNAVYRISGGDPTGRFAIQTDPNSNDGLVTVVKPIDFETNRMFVLTVAAENQVPLAKGIQHPPQSTATVSVTVIDVNENPYFAPNPKIIRQEEGLHAGTMLTTFTAQDPDRYMQQNIRYTKLSDPANWLKIDPVNGQITTIAVLDRESPNVKNNIYNATFLASDNGIPPMSGTGTLQIYLLDINDNAPQVLPQEAETCETPDPNSINITALDYDIDPNAGPFAFDLPLSPVTIKRNWTITRLNGDFAQLNLKIKFLEAGIYEVPIIITDSGNPPKSNISILRVKVCQCDSNGDCTDVDRIVGAGLGTGAIIAILLCIIILLILVLMFVVWMKRRDKERQAKQLLIDPEDDVRDNILKYDEEGGGEEDQDYDLSQLQQPDTVEPDAIKPVGIRRMDERPIHAEPQYPVRSAAPHPGDIGDFINEGLKAADNDPTAPPYDSLLVFDYEGSGSTAGSLSSLNSSSSGGEQDYDYLNDWGPRFKKLADMYGGGDD

SEQ ID NO: 12292 - protein, 2925 aa, Homo sapiens
MGVLASALCWLLCVWLPWGEQAAESLRVQRLGERVVDSGRSGARGMRNVKGMRNGPAQTRVSSSSSHQEATLAMGDKATVVGGQQAEAPDSVAMSSWERRLHRAKCAPSYLFSCFNGGECVHPAFCDCRRFNATGPRCQMVYNAGPERDSICRAWGQHHVETFDGLYYYLSGKGSYTLVGRHEPEGQSFSIQVHNDPQCGSSPYTCSRAVSLFFVGEQEIHLAKEVTHGGMRVQLPHVMGSARLQQLAGYVIVRHQSAFTLAWDGASAVYIKMSPELLGWTHGLCGNNNADPKDDLVTSSGKLTDDVVEFVHSWQEQAPNQPPGPTTSSLPRPPCLQQNPGTMQGVYEQCEALLRPPFDACHAYVSPLPFTASCTSDLCQSMGDVATWCRALAEYARACAQAGRPLQGWRTQLRQCTVHCKEKAFTYNECIACCPASCHPRASCVDSEIACVDGCYCPNGLIFEDGGCVAPAECPCEFHGTLYPPGSVVKEDCNTCTCTSGKWECSTAVCPAECSVTGDIHFTTFDGRRYTFPATCQYILAKSRSSGTFTVTLQNAPCGLNQDGACVQSVSVILHQDPRRQVTLTQAGDVLLFDQYKIIPPYTDDAFEIRRLSSVFLRVRTNVGVRVLYDREGLRLYLQVDQRWVEDTVGLCGTFNGNTQDDFLSPVGVPESTPQLFGNSWKTLSACSPLVSGSPLDPCDVHLQAASYSVQACSVLTGEMFAPCSAFLSPVPYFEQCRRDACRCGQPCLCATLAHYAHLCRRHGLPVDFRARLPACALSCEASKEYSPCVAPCGRTCQDLASPEACGVDGGDDLSRDECVEGCACPPDTYLDTQADLCVPRNQCSCHFQGVDYPPGDSDIPSLGHCHCKDGVMSCDSRAPAAACPAGQVFVNCSDLHTDLELSRERTCEQQLLNLSVSARGPCLSGCACPQGLLRHGDACFLPEECPCTWKGKEYFPGDQVMSPCHTCVCQRGSFQCTLHPCASTCTAYGDRHYRTFDGLPFDFVGACKVHLVKSTSDVSFSVIVENVNCYSSGMICRKFISINVGNSLIVFDDDSGNPSPESFLDDKQEVHTWRVGFFTLVHFPQEHITLLWDQRTTVHVQAGPQWQGQLAGLCGNFDLKTINEMRTPENLELTNPQEFGSSWAAVECPDTLDPRDMCVLNPLREPFAKKECSILLSEVFEICHPVVDVTWFYSNCLTDTCGCSQGGDCECFCASVSAYAHQCCQHGVAVDWRTPRLCPYDCDFFNKVLGKGPYQLSSLAAGGALVGMKAVGDDIVLVRTEDVAPADIVSFLLTAALYKAKAHDPDVVSLEAADRPNFFLHVTANGSLELAKWQGRDTFQQHASFLLHRGTRQAGLVALESLAKPSSFLYVSGAVLALRLYEHTEVFRRGTLFRLLDAKPSGAAYPICEWRYDACASPCFQTCRDPRAASCRDVPRVEGCVPVCPTPQVLDEVTQRCVYLEDCVEPAVWVPTEALGNETLPPSQGLPTPSDEEPQLSQESPRTPTHRPALTPAAPLTTALNPPVTATEEPVVSPGPTQTTLQQPLELTASQLPAGPTESPASKGVTASLLAIPHTPESSSLPVALQTPTPGMVSGAMETTRVTVIFAGSPNITVSSRSPPAPRFPLMTKAVTVRGHGSLPVRTTPPQPSLTASPSSRPVASPGAISRSPTSSGSHKAVLTPAVTKVISRTGVPQPTQAQSASSPSTPLTVAGTAAEQVPVSPLATRSLEIVLSTEKGEAGHSQPMGSPASPQPHPLPSAPPRPAQHTTMATRSPALPPETPAAASLSTATDGLAATPFMSLESTRPSQLLSGLPPDTSLPLAKVGTSAPVATPGPKASVITTPLQPQATTLPAQTLSPVLPFTPAAMTQAHPPTHIAPPAAGTAPGLLLGATLPTSGVLPVAEGTASMVSVVPRKSTTGKVAILSKQVSLPTSMYGSAEGGPTELTPATSHPLTPLVAEPEGAQAGTALPVPTSYALSRVSARTAPQDSMLVLLPQLAEAHGTSAGPHLAAEPVDEATTEPSGRSAPALSIVEGLAEALATTTEANTSTTCVPIAEQDCVRHICLEGQLIRVNQSQHCPQGAAPPRCGILGLAVRVGGDRCCPLWECACRCSIFPDLSFVTFDGSHVALFKEAIYILSQSPDEMLTVHVLDCKSANLGHLNWPPFCLVMLNMTHLAHQVTIDRFNRKVTVDLQPVWPPVSRYGFRIEDTGHMYMILTPSDIQIQWLHSSGLMIVEASKTSKAQGHGLCGICDGDAANDLTLKDGSVVGGAEDPAPFLDSWQVPSSLTSVGQTRFRPDSCATTDCSPCLRMVSNRTFSACHRFVPPESFCELWIRDTKYVQQPCVALTVYVAMCHKFHVCIEWRRSDYCPFLCSSDSTYQACVTACEPPKTCQDGILGPLDPEHCQVLGEGCVCSEGTILHRRHSALCIPEAKCACTDSMGVPRALGETWNSSLSGCCQHQCQAPDTIVPVDLGCPSPRPESCLRFGEVALLLPTKDPCCLGTVCVCNQTLCEGLAPTCRPGHRLLTHFQEDSCCPSYSCECDPDLCEAELVPSCRQDQILITGRLGDSCCTSYFCACGDCPDSIPECQEGEALTVHRNTTELCCPLYQCVCENFRCPQVQCGLGTALVEVWSPDRCCPYKSCECDCDTIPVPRCHLWEKSQLDEEFMHSVENVCGCAKYECVKAPVCLSRELGVMQPGQTVVELSADGVCHTSRCTTVLDPLTNFYQINTTSVLCDIHCEANQEYEHPRDLAACCGSCRNVSCLFTFPNGTTSLFLPGASWIADCARHHCSSTPLGAVLVRSPISCPPLNETECAKVGGSVVPSLEGCCRTCKEDGRSCKKVTIRMTIRKNECRSSTPVNLVSCDGRCPSASIYNYNINTYARFCKCCREVGLQRRSVQLFCATNATWVPYTVQEPTDCACQWS

SEQ ID NO: 12293 - protein, 752 aa, Homo sapiens
MSYGEIEEFCLVRIVMALCSALMTIFTIKMGTAKQAIDQGRSPVIIDNTNIQAWEMKPYVEVAIGKGYRVEFHEPETWWKFDPEELEKRNKHGVSRKKIAQMLDRYEYQMSISIVMNSVEPSHKSTQRPPPPQGRQRERVLKKTGHRLSKTKQKRNRKRNKKQNSQNRIMEENSLEFLSDLTPGDQDPSQSEEEDIEKTRRESEYPFIDGLQNEVGDFVTGYKEKRWKNKDPKDSFQNVMSIVELDNTPKNYLSKEGDNLFVSLLLRPNEISVTCPILTQNLSCVTTDDCSGMKVEKHIRNRHTIALDTQDLSAETSCLFMKKREIVDKNLSHEPILCHQHGIRMSDKVLREEQVYTTKINHWAFFTTNLSDEDLQLGSDRQPYFGSWPAGPHKFICEQRPKKDRACKLAGPDSRGQWIQMIFTSVAASEPGNNPEILTDKLLIGNEDFSPPPETMDSFIETNLFRSCLPQPDIPKNALESTKNKKRRKKRIFNLVPNFDLLGQSRIGVKEREKCDLLTKNHGLKITLGEEKDRISERNSEEENKQKLMTFDHHPLWFYLDIIKATPLNIDGQRYSHCLSFNRLRCSASLYKNYIPSFVLHNLSSIWKPSFTNKKLFLTFESQTRVGNKLNDAGFISPEILHSHPDTSCSLGVTSDFHFLNERFDRKLKRWEEPKELPAEDSQDLTSTDYRSLELPLSQGFAFQLVKLFGSPGVPMESLLPDDYVVPLDWKTLKMIYLQWKMSVEKRQKKIG

SEQ ID NO: 12294 - protein, 2913 aa, Homo sapiens
MGVLASALCWLLCVWLPWGEQAAESLRVQRLAAAPVLWGSAEPQPEPAGQPSSSHQEATLAMGDKATVVGGQQAEAPDSVAMSSWERRLHRAKCAPSYLFSCFNGGECVHPAFCDCRRFNATGPRCQMVYNAGPERDSICRAWGQHHVETFDGLYYYLSGKGSYTLVGRHEPEGQSFSIQVHNDPQCGSSPYTCSRAVSLFFVGEQEIHLAKEVTHGGMRVQLPHVMGSARLQQLAGYVIVRHQSAFTLAWDGASAVYIKMSPELLGWTHGLCGNNNADPKDDLVTSSGKLTDDVVEFVHSWQEQAPNQPPGPTTSSLPRPPCLQQNPGTMQGVYEQCEALLRPPFDACHAYVSPLPFTASCTSDLCQSMGDVATWCRALAEYARACAQAGRPLQGWRTQLRQCTVHCKEKAFTYNECIACCPASCHPRASCVDSEIACVDGCYCPNGLIFEDGGCVAPAECPCEFHGTLYPPGSVVKEDCNTCTCTSGKWECSTAVCPAECSVTGDIHFTTFDGRRYTFPATCQYILAKSRSSGTFTVTLQNAPCGLNQDGACVQSVSVILHQDPRRQVTLTQAGDVLLFDQYKIIPPYTDDAFEIRRLSSVFLRVRTNVGVRVLYDREGLRLYLQVDQRWVEDTVGLCGTFNGNTQDDFLSPVGVPESTPQLFGNSWKTLSACSPLVSGSPLDPCDVHLQAASYSVQACSVLTGEMFAPCSAFLSPVPYFEQCRRDACRCGQPCLCATLAHYAHLCRRHGLPVDFRARLPACALSCEASKEYSPCVAPCGRTCQDLASPEACGVDGGDDLSRDECVEGCACPPDTYLDTQADLCVPRNQCSCHFQGVDYPPGDSDIPSLGHCHCKDGVMSCDSRAPAAACPAGQVFVNCSDLHTDLELSRERTCEQQLLNLSVSARGPCLSGCACPQGLLRHGDACFLPEECPCTWKGKEYFPGDQVMSPCHTCVCQRGSFQCTLHPCASTCTAYGDRHYRTFDGLPFDFVGACKVHLVKSTSDVSFSVIVENVNCYSSGMICRKFISINVGNSLIVFDDDSGNPSPESFLDDKQEVHTWRVGFFTLVHFPQEHITLLWDQRTTVHVQAGPQWQGQLAGLCGNFDLKTINEMRTPENLELTNPQEFGSSWAAVECPDTLDPRDMCVLNPLREPFAKKECSILLSEVFEICHPVVDVTWFYSNCLTDTCGCSQGGDCECFCASVSAYAHQCCQHGVAVDWRTPRLCPYDCDFFNKVLGKGPYQLSSLAAGGALVGMKAVGDDIVLVRTEDVAPADIVSFLLTAALYKAKAHDPDVVSLEAADRPNFFLHVTANGSLELAKWQGRDTFQQHASFLLHRGTRQAGLVALESLAKPSSFLYVSGAVLALRLYEHTEVFRRGTLFRLLDAKPSGAAYPICEWRYDACASPCFQTCRDPRAASCRDVPRVEGCVPVCPTPQVLDEVTQRCVYLEDCVEPAVWVPTEALGNETLPPSQGLPTPSDEEPQLSQESPRTPTHRPALTPAAPLTTALNPPVTATEEPVVSPGPTQTTLQQPLELTASQLPAGPTESPASKGVTASLLAIPHTPESSSLPVALQTPTPGMVSGAMETTRVTVIFAGSPNITVSSRSPPAPRFPLMTKAVTVRGHGSLPVRTTPPQPSLTASPSSRPVASPGAISRSPTSSGSHKAVLTPAVTKVISRTGVPQPTQAQSASSPSTPLTVAGTAAEQVPVSPLATRSLEIVLSTEKGEAGHSQPMGSPASPQPHPLPSAPPRPAQHTTMATRSPALPPETPAAASLSTATDGLAATPFMSLESTRPSQLLSGLPPDTSLPLAKVGTSAPVATPGPKASVITTPLQPQATTLPAQTLSPVLPFTPAAMTQAHPPTHIAPPAAGTAPGLLLGATLPTSGVLPVAEGTASMVSVVPRKSTTGKVAILSKQVSLPTSMYGSAEGGPTELTPATSHPLTPLVAEPEGAQAGTALPVPTSYALSRVSARTAPQDSMLVLLPQLAEAHGTSAGPHLAAEPVDEATTEPSGRSAPALSIVEGLAEALATTTEANTSTTCVPIAEQDCVRHICLEGQLIRVNQSQHCPQGAAPPRCGILGLAVRVGGDRCCPLWECACRCSIFPDLSFVTFDGSHVALFKEAIYILSQSPDEMLTVHVLDCKSANLGHLNWPPFCLVMLNMTHLAHQVTIDRFNRKVTVDLQPVWPPVSRYGFRIEDTGHMYMILTPSDIQIQWLHSSGLMIVEASKTSKAQGHGLCGICDGDAANDLTLKDGSVVGGAEDPAPFLDSWQVPSSLTSVGQTRFRPDSCATTDCSPCLRMVSNRTFSACHRFVPPESFCELWIRDTKYVQQPCVALTVYVAMCHKFHVCIEWRRSDYCPFLCSSDSTYQACVTACEPPKTCQDGILGPLDPEHCQVLGEGCVCSEGTILHRRHSALCIPEAKCACTDSMGVPRALGETWNSSLSGCCQHQCQAPDTIVPVDLGCPSPRPESCLRFGEVALLLPTKDPCCLGTVCVCNQTLCEGLAPTCRPGHRLLTHFQEDSCCPSYSCECDPDLCEAELVPSCRQDQILITGRLGDSCCTSYFCACGDCPDSIPECQEGEALTVHRNTTELCCPLYQCVCENFRCPQVQCGLGTALVEVWSPDRCCPYKSCECDCDTIPVPRCHLWEKSQLDEEFMHSVENVCGCAKYECVKAPVCLSRELGVMQPGQTVVELSADGVCHTSRCTTVLDPLTNFYQINTTSVLCDIHCEANQEYEHPRDLAACCGSCRNVSCLFTFPNGTTSLFLPGASWIADCARHHCSSTPLGAVLVRSPISCPPLNETECAKVGGSVVPSLEGCCRTCKEDGRSCKKVTIRMTIRKNECRSSTPVNLVSCDGRCPSASIYNYNINTYARFCKCCREVGLQRRSVQLFCATNATWVPYTVQEPTDCACQWS

SEQ ID NO: 12295 - protein, 647 aa, Homo sapiens
MFEIDYSRDSFLKDGQPFRYISGSIHYSRVPRFYWKDRLLKMKMAGLNAIQTYVPWNFHEPWPGQYQFSEDHDVEYFLRLAHELGLLVILRPGPYICAEWEMGGLPAWLLEKESILLRSSDPDYLAAVDKWLGVLLPKMKPLLYQNGGPVITVQVENEYGSYFACDFDYLRFLQKRFRHHLGDDVVLFTTDGAHKTFLKCGALQGLYTTVDFGTGSNITDAFLSQRKCEPKGPLINSEFYTGWLDHWGQPHSTIKTEAVASSLYDILARGASVNLYMFIGGTNFAYWNGANSPYAAQPTSYDYDAPLSEAGDLTEKYFALRNIIQKFEKVPEGPIPPSTPKFAYGKVTLEKLKTVGAALDILCPSGPIKSLYPLTFIQVKQHYGFVLYRTTLPQDCSNPAPLSSPLNGVHDRAYVAVDGIPQGVLERNNVITLNITGKAGATLDLLVENMGRVNYGAYINDFKGLVSNLTLSSNILTDWTIFPLDTEDAVCSHLGGWGHRDSGHHDEAWAHNSSNYTLPAFYMGNFSIPSGIPDLPQDTFIQFPGWTKGQVWINGFNLGRYWPARGPQLTLFVPQHILMTSAPNTITVLELEWAPCSSDDPELCAVTFVDRPVIGSSVTYDHPSKPVEKRLMPPPPQKNKDSWLDHV

SEQ ID NO: 12296 - protein, 1215 aa, Homo sapiens
MSFFFKAIHDLMMFSGPQILKLLIKFVNDTKAPDWQGYFYTVLLFVTACLQTLVLHQYFHICFVSGMRIKTAVIGAVYRKALVITNSARKSSTVGEIVNLMSVDAQRFMDLATYINMIWSAPLQVILALYLLWLNLGPSVLAGVAVMVLMVPVNAVMAMKTKTYQVAHMKSKDNRIKLMNEILNGIKVLKLYAWELAFKDKVLAIRQEELKVLKKSAYLSAVGTFTWVCTPFLVALCTFAVYVTIDENNILDAQTAFVSLALFNILRFPLNILPMVISSIVQASVSLKRLRIFLSHEELEPDSIERRPVKDGGGTNSITVRNATFTWARSDPPTLNGITFSIPEGALVAVVGQVGCGKSSLLSALLAEMDKVEGHVAIKGSVAYVPQQAWIQNDSLRENILFGCQLEEPYYRSVIQACALLPDLEILPSGDRTEIGEKGVNLSGGQKQRVSLARAVYSNADIYLFDDPLSAVDAHVGKHIFENVIGPKGMLKNKTRILVTHSMSYLPQVDVIIVMSGGKISEMGSYQELLARDGAFAEFLRTYASTEQEQDAEENGSTVMDEEEAGVTGVSGPGKEAKQMENGMLVTDSAGKQLQRQLSSSSSYSGDISRHHNSTAELQKAEAKKEETWKLMEADKAQTGQVKLSVYWDYMKAIGLFISFLSIFLFMCNHVSALASNYWLSLWTDDPIVNGTQEHTKVRLSVYGALGISQGIAVFGYSMAVSIGGILASRCLHVDLLHSILRSPMSFFERTPSGNLVNRFSKELDTVDSMIPEVIKMFMGSLFNVIGACIVILLATPIAAIIIPPLGLIYFFVQRFYVASSRQLKRLESVSRSPVYSHFNETLLGVSVIRAFEEQERFIHQSDLKVDENQKAYYPSIVANRWLAVRLECVGNCIVLFAALFAVISRHSLSAGLVGLSVSYSLQVTTYLNWLVRMSSEMETNIVAVERLKEYSETEKEAPWQIQETAPPSSWPQVGRVEFRNYCLRYREDLDFVLRHINVTINGGEKVGIVGRTGAGKSSLTLGLFRINESAEGEIIIDGINIAKIGLHDLRFKITIIPQDPVLFSGSLRMNLDPFSQYSDEEVWTSLELAHLKDFVSALPDKLDHECAEGGENLSVGQRQLVCLARALLRKTKILVLDEATAAVDLETDDLIQSTIRTQFEDCTVLTIAHRLNTIMDYTRVIVLDKGEIQEYGAPSDLLQQRGLFYSMAKDAGLV

SEQ ID NO: 12297 - protein, 1531 aa, Homo sapiens
MALRGFCSADGSDPLWDWNVTWNTSNPDFTKCFQNTVLVWVPCFYLWACFPFYFLYLSRHDRGYIQMTPLNKTKTALGFLLWIVCWADLFYSFWERSRGIFLAPVFLVSPTLLGITMLLATFLIQLERRKGVQSSGIMLTFWLVALVCALAILRSKIMTALKEDAQVDLFRDITFYVYFSLLLIQLVLSCFSDRSPLFSETIHDPNPCPESSASFLSRITFWWITGLIVRGYRQPLEGSDLWSLNKEDTSEQVVPVLVKNWKKECAKTRKQPVKVVYSSKDPAQPKESSKVDANEEVEALIVKSPQKEWNPSLFKVLYKTFGPYFLMSFFFKAIHDLMMFSGPQILKLLIKFVNDTKAPDWQGYFYTVLLFVTACLQTLVLHQYFHICFVSGMRIKTAVIGAVYRKALVITNSARKSSTVGEIVNLMSVDAQRFMDLATYINMIWSAPLQVILALYLLWLNLGPSVLAGVAVMVLMVPVNAVMAMKTKTYQVAHMKSKDNRIKLMNEILNGIKVLKLYAWELAFKDKVLAIRQEELKVLKKSAYLSAVGTFTWVCTPFLVALCTFAVYVTIDENNILDAQTAFVSLALFNILRFPLNILPMVISSIVQASVSLKRLRIFLSHEELEPDSIERRPVKDGGGTNSITVRNATFTWARSDPPTLNGITFSIPEGALVAVVGQVGCGKSSLLSALLAEMDKVEGHVAIKGSVAYVPQQAWIQNDSLRENILFGCQLEEPYYRSVIQACALLPDLEILPSGDRTEIGEKGVNLSGGQKQRVSLARAVYSNADIYLFDDPLSAVDAHVGKHIFENVIGPKGMLKNKTRILVTHSMSYLPQVDVIIVMSGGKISEMGSYQELLARDGAFAEFLRTYASTEQEQDAEENGVTGVSGPGKEAKQMENGMLVTDSAGKQLQRQLSSSSSYSGDISRHHNSTAELQKAEAKKEETWKLMEADKAQTGQVKLSVYWDYMKAIGLFISFLSIFLFMCNHVSALASNYWLSLWTDDPIVNGTQEHTKVRLSVYGALGISQGIAVFGYSMAVSIGGILASRCLHVDLLHSILRSPMSFFERTPSGNLVNRFSKELDTVDSMIPEVIKMFMGSLFNVIGACIVILLATPIAAIIIPPLGLIYFFVQRFYVASSRQLKRLESVSRSPVYSHFNETLLGVSVIRAFEEQERFIHQSDLKVDENQKAYYPSIVANRWLAVRLECVGNCIVLFAALFAVISRHSLSAGLVGLSVSYSLQVTTYLNWLVRMSSEMETNIVAVERLKEYSETEKEAPWQIQETAPPSSWPQVGRVEFRNYCLRYREDLDFVLRHINVTINGGEKVGIVGRTGAGKSSLTLGLFRINESAEGEIIIDGINIAKIGLHDLRFKITIIPQDPVLFSGSLRMNLDPFSQYSDEEVWTSLELAHLKDFVSALPDKLDHECAEGGENLSVGQRQLVCLARALLRKTKILVLDEATAAVDLETDDLIQSTIRTQFEDCTVLTIAHRLNTIMDYTRVIVLDKGEIQEYGAPSDLLQQRGLFYSMAKDAGLV

SEQ ID NO: 12298 - protein, 580 aa, Homo sapiens
MKIFFRYQTFRFIWLTKPPGRRLHKDHQLWTPLTLADFEAINRCNRPLPKNFNFAADVLDQWSQKEKTGERPANPALWWVNGKGDEVKWSFRELGSLSRKAANVLTKPCGLQRGDRLAVILPRIPEWWLVNVACIRTGIIFMPGTIQLTAKDILYRLRASKAKCIVASEEVAPAVESIVLECPDLKTKLLVSPQSWNGWLSFQELFQFASEEHSCVETGSQEPMTIYFTSGTTGFPKMAQHSQSSLGIGFTLCGRYWLDLKSSDIIWNMSDTGWVKAAIGSVFSSWLCGACVFVHRMAQFDTDTFLDTLTTYPITTLCSPPTVYRMLVQKDLKRYKFKSLRHCLTGGEPLNPEVLEQWRVQTGLELYEGYGQTEVGMICANQKGQEIKPGSMGKGMLPYDVQIIDENGNVLPPGKEGEIALRLKPTRPFCFFSKYVDNPQKTAATIRGDFYVTGDRGVMDSDGYFWFVGRADDVIISSGYRIGPFEVESALIEHPAVVESAVVSSPDQIRGEVVKAFVVLAAPFKSYNPEKLTLELQDHVKKSTAPYKYPRKVEFVQELPKTITGKIKRNVLRDQEWRGR

SEQ ID NO: 12299 - protein, 1244 aa, Homo sapiens
MSRRKQAKPRSLKDPNCKLEDKTEDGEALDCKKRPEDGEELEDEAVHSCDSCLQVFESLSDITEHKINQCQLTDGVDVEDDPTCSWPASSPSSKDQTSPSHGEGCDFGEEEGGPGLPYPCQFCDKSFSRLSYLKHHEQSHSDKLPFKCTYCSRLFKHKRSRDRHIKLHTGDKKYHCSECDAAFSRSDHLKIHLKTHTSNKPYKCAICRRGFLSSSSLHGHMQVHERNKDGSQSGSRMEDWKMKDTQKCSQCEEGFDFPEDLQKHIAECHPECSPNEDRAALQCVYCHELFVEETSLMNHMEQVHSGEKKNSCSICSESFHTVEELYSHMDSHQQPESCNHSNSPSLVTVGYTSVSSTTPDSNLSVDSSTMVEAAPPIPKSRGRKRAAQQTPDMTGPSSKQAKVTYSCIYCNKQLFSSLAVLQIHLKTMHLDKPEQAHICQYCLEVLPSLYNLNEHLKQVHEAQDPGLIVSAMPAIVYQCNFCSEVVNDLNTLQEHIRCSHGFANPAAKDSNAFFCPHCYMGFLTDSSLEEHIRQVHCDLSGSRFGSPVLGTPKEPVVEVYSCSYCTNSPIFNSVLKLNKHIKENHKNIPLALNYIHNGKKSRALSPLSPVAIEQTSLKMMQAVGGAPARPTGEYICNQCGAKYTSLDSFQTHLKTHLDTVLPKLTCPQCNKEFPNQESLLKHVTIHFMITSTYYICESCDKQFTSVDDLQKHLLDMHTFVFFRCTLCQEVFDSKVSIQLHLAVKHSNEKKVYRCTSCNWDFRNETDLQLHVKHNHLENQGKVHKCIFCGESFGTEVELQCHITTHSKKYNCKFCSKAFHAIILLEKHLREKHCVFETKTPNCGTNGASEQVQKEEVELQTLLTNSQESHNSHDGSEEDVDTSEPMYGCDICGAAYTMETLLQNHQLRDHNIRPGESAIVKKKAELIKGNYKCNVCSRTFFSENGLREHMQTHLGPVKHYMCPICGERFPSLLTLTEHKVTHSKSLDTGNCRICKMPLQSEEEFLEHCQMHPDLRNSLTGFRCVVCMQTVTSTLELKIHGTFHMQKTGNGSAVQTTGRGQHVQKLYKCASCLKEFRSKQDLVKLDINGLPYGLCAGCVNLSKSASPGINVPPGTNRPGLGQNENLSAIEGKGKVGGLKTRCSSCNVKFESESELQNHIQTIHRELVPDSNSTQLKTPQVSPMPRISPSQSDEDIVFSMTEETSAHANTTEIWNLSIASPRRPINASSVRWFSTMNGIFRFMLQIT

SEQ ID NO: 12300 - protein, 1125 aa, Homo sapiens
MWNRYFVFYLLLLSAFTSQTVSGQRKKGPKSNLLARKSDVQGSICFIDIVFIVDSSESSKIALFDKQKDFVDSLSDKIFQLTPGRSLEYDIKLAALQFSSSVQIDPPFSSWKDLQTFKQKVKSMNLIGQGTFSYYAISNATRLLKREGRKDGVKVVLLMTDGIDHPKNPDVQSISEDARISGISFITIALSTVVNEAKLRLISGDSSSEPTLLLSDPTLVDKIQDRLDILFEKKCERKICECEKGDPGDPGPPGTHGNPGIKGERGPKGNPGNAQKGEAGERGPGGIPGYKGDKGERGECGKPGIKGDKGSPGPYGPKGPRGIQGITGPPGDPGPKGFQGNKGEPGPPGPYGSPGAPGIGQQGIKGERGQEGRPGAPGPIGVGEPGQPGPRGPEGVPGERGLPGEGFPGPKGEKGSEGPTGPQGLQGLSIKGEKGDIGPVGPQGPMGIPGIGSQGEQGIQGPIGPPGPQGPAGQGLPGSKGEVGQMGPTGPRGPVGIGVQGPKGEPGSIGLPGQPGVPGEDGAAGKKGEAGLPGARGPEGPPGKGQPGPKGDEGKKGSKGNQGQRGLPGPEGPKGEPGIMGPFGMPGTSIPGPPGPKGDRGGPGIPGFKGEPGLSIRGPKGVQGPRGPVGAPGLKGDGYPGVPGPRGLPGPPGPMGLRGVGDTGAKGEPGVRGPPGPSGPRGVGTQGPKGDTGQKGLPGPPGPPGYGSQGIKGEQGPQGFPGPKGTMGHGLPGQKGEHGERGDVGKKGDKGEIGEPGSPGKQGLQGPKGDLGLTKEEIIKLITEICGCGPKCKETPLELVFVIDSSESVGPENFQIIKNFVKTMADRVALDLATARIGIINYSHKVEKVANLKQFSSKDDFKLAVDNMQYLGEGTYTATALQAANDMFEDARPGVKKVALVITDGQTDSRDKEKLTEVVKNASDTNVEIFVIGVVKKNDPNFEIFHKEMNLIATDPEHVYQFDDFFTLQDTLKQKLFQKICEDFDSYLVQIFGSSSPQPGFGMSGEELSESTPEPQKEISESLSVTRDQDEDDKAPEPTWADDLPATTSSEATTTPRPLLSTPVDGAEDPRCLEALKPGNCGEYVVRWYYDKQVNSCARFWFSGCNGSGNRFNSEKECQETCIQG

SEQ ID NO: 12301 - protein, 1053 aa, Homo sapiens
MAFLKLRDQPSLVQAIFNGDPDEVRALIFKKEDVNFQDNEKRTPLHAAAYLGDAEIIELLILSGARVNAKDSKWLTPLHRAVASCSEEAVQVLLKHSADVNARDKNWQTPLHIAAANKAVKCAEALVPLLSNVNVSDRAGRTALHHAAFSGHGEMVKLLLSRGANINAFDKKDRRAIHWAAYMGHIEVVKLLVSHGAEVTCKDKKSYTPLHAAASSGMISVVKYLLDLGVDMNEPNAYGNTPLHVACYNGQDVVVNELIDCGAIVNQKNEKGFTPLHFAAASTHGALCLELLVGNGADVNMKSKDGKTPLHMTALHGRFSRSQTIIQSGAVIDCEDKNGNTPLHIAARYGHELLINTLITSGADTAKRGIHGMFPLHLAALSGFSDCCRKLLSSGFDIDTPDDFGRTCLHAAAAGGNLECLNLLLNTGADFNKKDKFGRSPLHYAAANCNYQCLFALVGSGASVNDLDERGCTPLHYAATSDTDGKCLEYLLRNDANPGIRDKQGYNAVHYSAAYGHRLCLQLIASETPLDVLMETSGTDMLSDSDNRATISPLHLAAYHGHHQALEVLVQSLLDLDVRNSSGRTPLDLAAFKGHVECVDVLINQGASILVKDYILKRTPIHAAATNGHSECLRLLIGNAEPQNAVDIQDGNGQTPLMLSVLNGHTDCVYSLLNKGANVDAKDKWGRTALHRGAVTGHEECVDALLQHGAKCLLRDSRGRTPIHLSAACGHIGVLGALLQSAASMDANPATADNHGYTALHWACYNGHETCVELLLEQEVFQKTEGNAFSPLHCAVINDNEGAAEMLIDTLGASIVNATDSKGRTPLHAAAFTDHVECLQLLLSHNAQVNSVDSTGKTPLMMAAENGQTNTVEMLVSSASAELTLQDNSKNTALHLACSKGHETSALLILEKITDRNLINATNAALQTPLHVAARNGLTMVVQELLGKGASVLAVDENGYTPALACAPNKDVADCLALILATMMPVSSSSPLSSLTFNAINRYTNTSKTVSFEALPIMRNEPSSYCSFNNIGGEQEYLYTDVDELNDSDSETY

SEQ ID NO: 12302 - protein, 1375 aa, Homo sapiens
MVPGEENQLVPKEDVFWRCRQNIFDEMKKKFLQIENAAEEPRVLCIIQDTTNSKTVNERITLNLPASTPVRKLFEDVANKVGYINGTFDLVWGNGINTADMAPLDHTSDKSLLDANFEPGKKNFLHLTDKDGEQPQILLEDSSAGEDSVHDRFIGPLPREGSGGSTSDYVSQSYSYSSILNKSETGYVGLVNQAMTCYLNSLLQTLFMTPEFRNALYKWEFEESEEDPVTSIPYQLQRLFVLLQTSKKRAIETTDVTRSFGWDSSEAWQQHDVQELCRVMFDALEQKWKQTEQADLINELYQGKLKDYVRCLECGYEGWRIDTYLDIPLVIRPYGSSQAFASVEEALHAFIQPEILDGPNQYFCERCKKKCDARKGLRFLHFPYLLTLQLKRFDFDYTTMHRIKLNDRMTFPEELDMSTFIDVEDEKSPQTESCTDSGAENEGSCHSDQMSNDFSNDDGVDEGICLETNSGTEKISKSGLEKNSLIYELFSVMVHSGSAAGGHYYACIKSFSDEQWYSFNDQHVSRITQEDIKKTHGGSSGSRGYYSSAFASSTNAYMLIYRLKDPARNAKFLEVDEYPEHIKNLVQKERELEEQEKRQREIERNTCKIKLFCLHPTKQVMMENKLEVHKDKTLKEAVEMAYKMMDLEEVIPLDCCRLVKYDEFHDYLERSYEGEEDTPMGLLLGGVKSTYMFDLLLETRKPDQVFQSYKPGEVMVKVHVVDLKAESVAAPITVRAYLNQTVTEFKQLISKAIHLPAETMRIVLERCYNDLRLLSVSSKTLKAEGFFRSNKVFVESSETLDYQMAFADSHLWKLLDRHANTIRLFVLLPEQSPVSYSKRTAYQKAGGDSGNVDDDCERVKGPVGSLKSVEAILEESTEKLKSLSLQQQQDGDNGDSSKSTETSDFENIESPLNERDSSASVDNRELEQHIQTSDPENFQSEERSDSDVNNDRSTSSVDSDILSSSHSSDTLCNADNAQIPLANGLDSHSITSSRRTKANEGKKETWDTAEEDSGTDSEYDESGKSRGEMQYMYFKAEPYAADEGSGEGHKWLMVHVDKRITLAAFKQHLEPFVGVLSSHFKVFRVYASNQEFESVRLNETLSSFSDDNKITIRLGRALKKGEYRVKVYQLLVNEQEPCKFLLDAVFAKGMTVRQSKEELIPQLREQCGLELSIDRFRLRKKTWKNPGTVFLDYHIYEEDINISSNWEVFLEVLDGVEKMKSMSQLAVLSRRWKPSEMKLDPFQEVVLESSSVDELREKLSEISGIPLDDIEFAKGRGTFPCDISVLDIHQDLDWNPKVSTLNVWPLYICDDGAVIFYRDKTEELMELTDEQRNELMKKESSRLQKTGHRVTYSPRKEKALKIYLDGAPNKDLTQD

SEQ ID NO: 12303 - protein, 1562 aa, Homo sapiens
MAAGSGGSGGSGGGPGPGPGGGGGPSGSGSGPGSNGGLGSGGELHPRTGRLVSLSACGRTARRQQPGQEFNHGLVLSREPLRDGRVFTVRIDRKVNSWSGSIEIGVTALDPSVLDFPSSATGLKGGSWVVSGCSVLRDGRSVLEEYGQDLDQLGEGDRVGVERTVAGELRLWVNGRDCGVAATGLPPRVWAVVDLYGKCTQITVLPPEPGFSPPTPIPTPPLEPLAPTEDSALAEQGTSADEAFMVSPAQARPETFPNSLESHNDFANMELSEVVSNTILSAYNGGLLNVNLSSPPAGEGLGSSGAATSPILTSNDALLFHEKCGTLIKLSNNNKTAERRRPLDEFNNGVVMTNRPLRDNEMFEIRIDKLVDKWSGSIEIGVTTHNPNSLEYPATMTNLQSGTIMMSGCGILTNGKGTRREYCEFSLDELQEGDHIGLTRKSNSALHFFINGIDQGVATPLTPPVVYGVVDLYGMAVKVTIVHNNNHSDRLRRNNAILRALSPEGALRRAAPAAQAEPERLLFHPNCGQKAAITHEGRTALRPHATDDFNHGVVLSSRALRDGEVFQVRIDKMVDKWAGSIEIGVTTHNPAYLQLPSTMTNLRSGTWMMTGNGVMHNGTTILDEYGHNLDRLKAGDTVGVVRREDGTLHFFVNGMTQGPAAWNVPPGVYAVVDLYGQAAQATIVDDVEVAPVPEPLPEGNNQVSPSSPSSGAGGSDLRFHQLHGSNAVITNGGRTALRHNCRSEFNDAIVISNRALRDGELFEIVIQKMVDRWSGSIEAGVTAIRPEDLEFPNTMTDIDYDTWMLSGTAIMQDGNTMRNNYGCDLDALGTGARIGMMRTAKGDLHYFINGQDQGAACSGLPPGKEVYAVVDLYGQCVQVSITNATGPMDNSLATSNTATEKSFPLHSPVAGVAHRFHSTCGKNVTLEEDGTRAVRAAGYAHGLVFSTKELRAEEVFEVKVEELDEKWAGSLRLGLTTLAPGEMGPGAGGGGPGLPPSLPELRTKTTWMVSSCEVRRDGQLQRMNYGRNLERLGVGSRVGVRRGADDTMHILVDGEDMGPAATGIAKNVWAVLDLYGPVRGVSIVSSTRLEESEGTQPPSPSSDTGSEGEEDDEGEEHGLGGQNEVGIIPTTLEFLENHGKNILLSNGNRTATRVASYNQGIVVINQPLVPQLLVQVRIDFLNRQWTSSLVLGVITCAPERLNFPASACALKRAAWLLRGRGVFHNGLKICEKFGPNLDTCPEGTILGLRLDSSGGLHLHVNGVDQGVAVPDVPQPCHALVDLYGQCEQVTIVNPEPGAASGKSAGTQGDMEKADMVDGIKESVCWGPPPAASPLKSCEYHALCSRFQELLLLPEDYFMPPPKRSLCYCESCRKLRGDEAHRRRGEPPREYALPFGWCRFNLRVNPRLEAGTLTKKWHMAYHGSNVAAVRRVLDRGELGAGTASILSCRPLKGEPGVGFEEPGENCAPPREEQPPPVLLSPSLQYAGAETLASKVQFRDPKSQRTHQAQVAFQVCVRPGSYTPGPPSAALGEPPDPHFSPAELEWVTKEKGATLLCALLVRVE

SEQ ID NO: 12304 - protein, 1512 aa, Homo sapiens
MAAAAGNRASSSGFPGARATSPEAGGGGGALKASSAPAAAAGLLREAGSGGRERADWRRRQLRKVRSVELDQLPEQPLFLAASPPASSTSPSPEPADAAGSGTGFQPVAVPPPHGAASRGGAHLTESVAAPDSGASSPAAAEPGEKRAPAAEPSPAAAPAGREMENKETLKGLHKMDDRPEERMIREKLKATCMPAWKHEWLERRNRRGPVVVKPIPVKGDGSEMNHLAAESPGEVQASAASPASKGRRSPSPGNSPSGRTVKSESPGVRRKRVSPVPFQSGRITPPRRAPSPDGFSPYSPEETNRRVNKVMRARLYLLQQIGPNSFLIGGDSPDNKYRVFIGPQNCSCARGTFCIHLLFVMLRVFQLEPSDPMLWRKTLKNFEVESLFQKYHSRRSSRIKAPSRNTIQKFVSRMSNSHTLSSSSTSTSSSENSIKDEEEQMCPICLLGMLDEESLTVCEDGCRNKLHHHCMSIWAEECRRNREPLICPLCRSKWRSHDFYSHELSSPVDSPSSLRAAQQQTVQQQPLAGSRRNQESNFNLTHYGTQQIPPAYKDLAEPWIQVFGMELVGCLFSRNWNVREMALRRLSHDVSGALLLANGESTGNSGGSSGSSPSGGATSGSSQTSISGDVVEACCSVLSMVCADPVYKVYVAALKTLRAMLVYTPCHSLAERIKLQRLLQPVVDTILVKCADANSRTSQLSISTLLELCKGQAGELAVGREILKAGSIGIGGVDYVLNCILGNQTESNNWQELLGRLCLIDRLLLEFPAEFYPHIVSTDVSQAEPVEIRYKKLLSLLTFALQSIDNSHSMVGKLSRRIYLSSARMVTTVPHVFSKLLEMLSVSSSTHFTRMRRRLMAIADEVEIAEAIQLGVEDTLDGQQDSFLQASVPNNYLETTENSSPECTVHLEKTGKGLCATKLSASSEDISERLASISVGPSSSTTTTTTTTEQPKPMVQTKGRPHSQCLNSSPLSHHSQLMFPALSTPSSSTPSVPAGTATDVSKHRLQGFIPCRIPSASPQTQRKFSLQFHRNCPENKDSDKLSPVFTQSRPLPSSNIHRPKPSRPTPGNTSKQGDPSKNSMTLDLNSSSKCDDSFGCSSNSSNAVIPSDETVFTPVEEKCRLDVNTELNSSIEDLLEASMPSSDTTVTFKSEVAVLSPEKAENDDTYKDDVNHNQKCKEKMEAEEEEALAIAMAMSASQDALPIVPQLQVENGEDIIIIQQDTPETLPGHTKAKQPYREDTEWLKGQQIGLGAFSSCYQAQDVGTGTLMAVKQVTYVRNTSSEQEEVVEALREEIRMMSHLNHPNIIRMLGATCEKSNYNLFIEWMAGGSVAHLLSKYGAFKESVVINYTEQLLRGLSYLHENQIIHRDVKGANLLIDSTGQRLRIADFGAAARLASKGTGAGEFQGQLLGTIAFMAPEVLRGQQYGRSCDVWSVGCAIIEMACAKPPWNAEKHSNHLALIFKIASATTAPSIPSHLSPGLRDVALRCLELQPQDRPPSRELLKHPVFRTTW

SEQ ID NO: 12305 - protein, 764 aa, Homo sapiens
MSQRPRAPRSALWLLAPPLLRWAPPLLTVLHSDLFQALLDILDYYEASLSESQKYRYQDEDTPPLEHSPAHLPNQANSPPVIVNTDTLEAPGYVNGTEGEMEYEEITLERGNSGLGFSIAGGTDNPHIGDDPSIFITKIIPGGAAAQDGRLRVNDSILFVNEVDVREVTHSAAVEALKEAGSIVRLYVMRRKPPAEKVMEIKLIKGPKGLGFSIAGGVGNQHIPGDNSIYVTKIIEGGAAHKDGRLQIGDKILAVNSVGLEDVMHEDAVAALKNTYDVVYLKVAKPSNAYLSDSYAPPDITTSYSQHLDNEISHSSYLGTDYPTAMTPTSPRRYSPVAKDLLGEEDIPREPRRIVIHRGSTGLGFNIVGGEDGEGIFISFILAGGPADLSGELRKGDQILSVNGVDLRNASHEQAAIALKNAGQTVTIIAQYKPEEYSRFEAKIHDLREQLMNSSLGSGTASLRSNPKRGFYIRALFDYDKTKDCGFLSQALSFRFGDVLHVIDASDEEWWQARRVHSDSETDDIGFIPSKRRVERREWSRLKAKDWGSSSGSQGREDSVLSYETVTQMEVHYARPIIILGPTKDRANDDLLSEFPDKFGSCVPHTTRPKREYEIDGRDYHFVSSREKMEKDIQAHKFIEAGQYNSHLYGTSVQSVREVAEQGKHCILDVSANAVRRLQAAHLHPIAIFIRPRSLENVLEINKRITEEQARKAFDRATKLEQEFTECFSAIVEGDSFEEIYHKVKRVIEDLSGPYIWVPARERL

SEQ ID NO: 12306 - protein, 3277 aa, Homo sapiens
MAAAARPRGRALGPVLPPTPLLLLVLRVLPACGATARDPGAAAGLSLHPTYFNLAEAARIWATATCGERGPGEGRPQPELYCKLVGGPTAPGSGHTIQGQFCDYCNSEDPRKAHPVTNAIDGSERWWQSPPLSSGTQYNRVNLTLDLGQLFHVAYILIKFANSPRPDLWVLERSVDFGSTYSPWQYFAHSKVDCLKEFGREANMAVTRDDDVLCVTEYSRIVPLENGEVVVSLINGRPGAKNFTFSHTLREFTKATNIRLRFLRTNTLLGHLISKAQRDPTVTRRYYYSIKDISIGGQCVCNGHAEVCNINNPEKLFRCECQHHTCGETCDRCCTGYNQRRWRPAAWEQSHECEACNCHGHASNCYYDPDVERQQASLNTQGIYAGGGVCINCQHNTAGVNCEQCAKGYYRPYGVPVDAPDGCIPCSCDPEHADGCEQGSGRCHCKPNFHGDNCEKCAIGYYNFPFCLRIPIFPVSTPSSEDPVAGDIKGCDCNLEGVLPEICDAHGRCLCRPGVEGPRCDTCRSGFYSFPICQACWCSALGSYQMPCSSVTGQCECRPGVTGQRCDRCLSGAYDFPHCQGSSSACDPAGTINSNLGYCQCKLHVEGPTCSRCKLLYWNLDKENPSGCSECKCHKAGTVSGTGECRQGDGDCHCKSHVGGDSCDTCEDGYFALEKSNYFGCQGCQCDIGGALSSMCSGPSGVCQCREHVVGKVCQRPENNYYFPDLHHMKYEIEDGSTPNGRDLRFGFDPLAFPEFSWRGYAQMTSVQNDVRITLNVGKSSGSLFRVILRYVNPGTEAVSGHITIYPSWGAAQSKEIIFLPSKEPAFVTVPGNGFADPFSITPGIWVACIKAEGVLLDYLVLLPRDYYEASVLQLPVTEPCAYAGPPQENCLLYQHLPVTRFPCTLACEARHFLLDGEPRPVAVRQPTPAHPVMVDLSGREVELHLRLRIPQVGHYVVVVEYSTEAAQLFVVDVNVKSSGSVLAGQVNIYSCNYSVLCRSAVIDHMSRIAMYELLADADIQLKGHMARFLLHQVCIIPIEEFSAEYVRPQVHCIASYGRFVNQSATCVSLAHETPPTALILDVLSGRPFPHLPQQSSPSVDVLPGVTLKAPQNQVTLRGRVPHLGRYVFVIHFYQAAHPTFPAQVSVDGGWPRAGSFHASFCPHVLGCRDQVIAEGQIEFDISEPEVAATVKVPEGKSLVLVRVLVVPAENYDYQILHKKSMDKSLEFITNCGKNSFYLDPQTASRFCKNSARSLVAFYHKGALPCECHPTGATGPHCSPEGGQCPCQPNVIGRQCTRCATGHYGFPRCKPCSCGRRLCEEMTGQCRCPPRTVRPQCEVCETHSFSFHPMAGCEGCNCSRRGTIEAAMPECDRDSGQCRCKPRITGRQCDRCASGFYRFPECVPCNCNRDGTEPGVCDPGTGACLCKENVEGTECNVCREGSFHLDPANLKGCTSCFCFGVNNQCHSSHKRRTKFVDMLGWHLETADRVDIPVSFNPGSNSMVADLQELPATIHSASWVAPTSYLGDKVSSYGGYLTYQAKSFGLPGDMVLLEKKPDVQLTGQHMSIIYEETNTPRPDRLHHGRVHVVEGNFRHASSRAPVSREELMTVLSRLADVRIQGLYFTETQRLTLSEVGLEEASDTGSGRIALAVEICACPPAYAGDSCQGCSPGYYRDHKGLYTGRCVPCNCNGHSNQCQDGSGICVNCQHNTAGEHCERCQEGYYGNAVHGSCRACPCPHTNSFATGCVVNGGDVRCSCKAGYTGTQCERCAPGYFGNPQKFGGSCQPCSCNSNGQLGSCHPLTGDCINQEPKDSSPAEECDDCDSCVMTLLNDLATMGEQLRLVKSQLQGLSASAGLLEQMRHMETQAKDLRNQLLNYRSAISNHGSKIEGLERELTDLNQEFETLQEKAQVNSRKAQTLNNNVNRATQSAKELDVKIKNVIRNVHMLNRIRTWQKTHQGENNGLANSIRDSLNEYEAKLSDLRARLQEAAAQAKQANGLNQENERALGAIQRQVKEINSLQSDFTKYLTTADSSLLQTNIALQLMEKSQKEYEKLAASLNEARQELSDKVRELSRSAGKTSLVEEAEKHARSLQELAKQLEEIKRNASGDELVRCAVDAATAYENILNAIKAAEDAANRAASASESALQTVIKEDLPRKAKTLSSNSDKLLNEAKMTQKKLKQEVSPALNNLQQTLNIVTVQKEVIDTNLTTLRDGLHGIQRGDIDAMISSAKSMVRKANDITDEVLDGLNPIQTDVERIKDTYGRTQNEDFKKALTDADNSVNKLTNKLPDLWRKIESINQQLLPLGNISDNMDRIRELIQQARDAASKVAVPMRFNGKSGVEVRLPNDLEDLKGYTSLSLFLQRPNSRENGGTENMFVMYLGNKDASRDYIGMAVVDGQLTCVYNLGDREAELQVDQILTKSETKEAVMDRVKFQRIYQFARLNYTKGATSSKPETPGVYDMDGRNSNTLLNLDPENVVFYVGGYPPDFKLPSRLSFPPYKGCIELDDLNENVLSLYNFKKTFNLNTTEVEPCRRRKEESDKNYFEGTGYARVPTQPHAPIPTFGQTIQTTVDRGLLFFAENGDRFISLNIEDGKLMVRYKLNSELPKERGVGDAINNGRDHSIQIKIGKLQKRMWINVDVQNTIIDGEVFDFSTYYLGGIPIAIRERFNISTPAFRGCMKNLKKTSGVVRLNDTVGVTKKCSEDWKLVRSASFSRGGQLSFTDLGLPPTDHLQASFGFQTFQPSGILLDHQTWTRNLQVTLEDGYIELSTSDSGGPIFKSPQTYMDGLLHYVSVISDNSGLRLLIDDQLLRNSKRLKHISSSRQSLRLGGSNFEGCISNVFVQRLSLSPEVLDLTSNSLKRDVSLGGCSLNKPPFLMLLKGSTRFNKTKTFRINQLLQDTPVASPRSVKVWQDACSPLPKTQANHGALQFGDIPTSHLLFKLPQELLKPRSQFAVDMQTTSSRGLVFHTGTKNSFMALYLSKGRLVFALGTDGKKLRIKSKEKCNDGKWHTVVFGHDGEKGRLVVDGLRAREGSLPGNSTISIRAPVYLGSPPSGKPKSLPTNSFVGCLKNFQLDSKPLYTPSSSFGVSSCLGGPLEKGIYFSEEGGHVVLAHSVLLGPEFKLVFSIRPRSLTGILIHIGSQPGKHLCVYLEAGKVTASMDSGAGGTSTSVTPKQSLCDGQWHSVAVTIKQHILHLELDTDSSYTAGQIPFPPASTQEPLHLGGAPANLTTLRIPVWKSFFGCLRNIHVNHIPVPVTEALEVQGPVSLNGCPDQ

SEQ ID NO: 12307 - protein, 868 aa, Homo sapiens
MSLQASEGCPGLGTNVFVPQSPQTDEEGSRSGRSFSEFEDTQDLDTPGLPPFCPMAPWGSEEGLSPCHLLTVRVIRMKNVRQADMLSQTDCFVSLWLPTASQKKLRTRTISNCPNPEWNESFNFQIQSRVKNVLELSVCDEDTVTPDDHLLTVLYDLTKLCFRKKTHVKFPLNPQGMEELEVEFLLEESPSPPETLVTNGVLVSRQVSCLEVHAQSRRRRKREKMKDLLVMVNESFENTQRVRPCLEPCCPTSACFQTAACFHYPKYFQSQVHVEVPKSHWSCGLCCRSRKKGPISQPLDCLSDGQVMTLPVGESYELHMKSTPCPETLDVRLGFSLCPAELEFLQKRKVVVAKALKQVLQLEEDLQEDEVPLIAIMATGGGTRSMTSMYGHLLGLQKLNLLDCASYITGLSGATWTMATLYRDPDWSSKNLEPAIFEARRHVVKDKLPSLFPDQLRKFQEELRQRSQEGYRVTFTDFWGLLIETCLGDERNECKLSDQRAALSCGQNPLPIYLTINVKDDVSNQDFREWFEFSPYEVGLQKYGAFIPSELFGSEFFMGRLVKRIPESRICYMLGLWSSIFSLNLLDAWNLSHTSEEFFHRWTREKVQDIEDEPILPEIPKCDANILETTVVIPGSWLSNSFREILTHRSFVSEFHNFLSGLQLHTNYLQNGQFSRWKDTVLDGFPNQLTESANHLCLLDTAFFVNSSYPPLLRPERKADLIIHLNYCAGSQTKPLKQTCEYCTVQNIPFPKYELPDENENLKECYLMENPQEPDAPIVTFFPLINDTFRKYKAPGVERSPEELEQGQVDIYGPKTPYATKELTYTEATFDKLVKLSEYNILNNKDTLLQALRLAVEKKKRLKGQCPS

SEQ ID NO: 12308 - protein, 2968 aa, Homo sapiens
MDGRDFGPQRSVHGPPPPLLSGLAMDSHRVGAATAGRLPASGLPGPLPPGKYMAGLNLHPHPGEAFLGSFVASGMGPSASSHGSPVPLPSDLSFRSPTPSNLPMVQLWAAHAHEGFSHLPSGLYPSYLHLNHLEPPSSGSPLLSQLGQPSIFDTQKGQGPGGDGFYLPTAGAPGSLHSHAPSARTPGGGHSSGAPAKGSSSRDGPAKERAGRGGEPPPLFGKKDPRARGEEASGPRGVVDLTQEARAEGRQDRGPPRLAERLSPFLAESKTKNAALQPSVLTMCNGGAGDVGLPALVAEAGRGGAKEAARQDEGARLLRRTETLLPGPRPCPSPLPPPPAPPKGPPAPPAATPAGVYTVFREQGREHRVVAPTFVPSVEAFDERPGPIQIASQARDARAREREAGRPGVLQAPPGSPRPLDRPEGLREKNSVIRSLKRPPPADAPTVRATRASPDPRAYVPAKELLKPEADPRPCERAPRGPAGPAAQQAAKLFGLEPGRPPPTGPEHKWKPFELGNFAATQMAVLAAQHHHSRAEEEAAVVAASSSKKAYLDPGAVLPRSAATCGRPVADMHSAAHGSGEASAMQSLIKYSGSFARDAVAVRPGGCGKKSPFGGLGTMKPEPAPTSAGASRAQARLPHSGGPAAGGGRQLKRDPERPESAKAFGREGSGAQGEAEVRHPPVGIAVAVARQKDSGGSGRLGPGLVDQERSLSLSNVKGHGRADEDCVDDRARHREERLLGARLDRDQEKLLRESKELADLARLHPTSCAPNGLNPNLMVTGGPALAGSGRWSADPAAHLATHPWLPRSGNASMWLAGHPYGLGPPSLHQGMAPAFPPGLGGSLPSAYQFVRDPQSGQLVVIPSDHLPHFAELMERATVPPLWPALYPPGRSPLHHAQQLQLFSQQHFLRQQEFLYLQQQAAQALELQRSAQLVQERLKAQEHRAEMEEKGSKRGLEAAGKAGLATAGPGLLPRKPPGLAAGPAGTYGKAVSPPPSPRASPVAALKAKVIQKLEDVSKPPAYAYPATPSSHPTSPPPASPPPTPGITRKEEAPENVVEKKDLELEKEAPSPFQALFSDIPPRYPFQALPPHYGRPYPFLLQPTAAADADGLAPDVPLPADGPERLALSPEDKPIRLSPSKITEPLREGPEEEPLAEREVKAEVEDMDEGPTELPPLESPLPLPAAEAMATPSPAGGCGGGLLEAQALSATGQSCAEPSECPDFVEGPEPRVDSPGRTEPCTAALDLGVQLTPETLVEAKEEPVEVPVAVPVVEAVPEEGLAQVAPSESQPTLEMSDCDVPAGEGQCPSLEPQEAVPVLGSTCFLEEASSDQFLPSLEDPLAGMNALAAAAELPQARPLPSPGAAGAQALEKLEAAESLVLEQSFLHGITLLSEIAELELERRSQEMGGAERALVARPSLESLLAAGSHMLREVLDGPVVDPLKNLRLPRELKPNKKYSWMRKKEERMYAMKSSLEDMDALELDFRMRLAEVQRQYKEKQRELVKLQRRRDSEDRREEPHRSLARRGPGRPRKRTHAPSALSPPRKRGKSGHSSGKLSSKSLLTSDDYELGAGIRKRHKGSEEEHDALIGMGKARGRNQTWDEHEASSDFISQLKIKKKKMASDQEQLASKLDKALSLTKQDKLKSPFKFSDSAGGKSKTSGGCGRYLTPYDSLLGKNRKALAKGLGLSLKSSREGKHKRAAKTRKMEVGFKARGQPKSAHSPFASEVSSYSYNTDSEEDEEFLKDEWPAQGPSSSKLTPSLLCSMVAKNSKAAGGPKLTKRGLAAPRTLKPKPATSRKQPFCLLLREAEARSSFSDSSEESFDQDESSEEEDEEEELEEEDEASGGGYRLGARERALSPGLEESGLGLLARFAASALPSPTVGPSLSVVQLEAKQKARKKEERQSLLGTEFEYTDSESEVKVRKRSPAGLLRPKKGLGEPGPSLAAPTPGARGPDPSSPDKAKLAVEKGRKARKLRGPKEPGFEAGPEASDDDLWTRRRSERIFLHDASAAAPAPVSTAPATKTSRCAKGGPLSPRKDAGRAKDRKDPRKKKKGKEAGPGAGLPPPRAPALPSEARAPHASSLTAAKRSKAKAKGKEVKKENRGKGGAVSKLMESMAAEEDFEPNQDSSFSEDEHLPRGGAVERPLTPAPRSCIIDKDELKDGLRVLIPMDDKLLYAGHVQTVHSPDIYRVVVEGERGNRPHIYCLEQLLQEAIIDVRPASTRFLPQGTRIAAYWSQQYRCLYPGTVVRGLLDLEDDGDLITVEFDDGDTGRIPLSHIRLLPPDYKIQCAEPSPALLVPSAKRRSRKTSKDTGEGKDGGTAGSEEPGAKARGRGRKPSAKAKGGRAATLEEGNPTDEVPSTPLALEPSSTPGSKKSPPEPVDKRAKAPKARPAPPQPSPAPPAFTSCPAPEPFAELPAPATSLAPAPLITMPATRPKPKKARAAEESGAKGPRRPGEEAELLVKLDHEGVTSPKSKKAKEALLLREDPGAGGWQEPKSLLSLGSYPPAAGSSEPKAPWPKATDGDLAQEPGPGLTFEDSGNPKSPDKAQAEQDGAEESESSSSSSSGSSSSSSSSSSSGSETEGEEEGDKNGDGGCGTGGRNCSAASSRAASPASSSSSSSSSSSSSSSSSSSSSSSSSSSSSSSSSSSSSSSSSSSSSSSSSSSSSSSSSSTTDEDSSCSSDDEAAPAPTAGPSAQAALPTKATKQAGKARPSAHSPGKKTPAPQPQAPPPQPTQPLQPKAQAGAKSRPKKREGVHLPTTKELAKRQRLPSVENRPKIAAFLPARQLWKWFGKPTQRRGMKGKARKLFYKAIVRGKEMIRIGDCAVFLSAGRPNLPYIGRIQSMWESWGNNMVVRVKWFYHPEETSPGKQFHQGQHWDQKSSRSLPAALRVSSQRKDFMERALYQSSHVDENDVQTVSHKCLVVGLEQYEQMLKTKKYQDSEGLYYLAGTYEPTTGMIFSTDGVPVLC

SEQ ID NO: 12309 - protein, 1585 aa, Homo sapiens
MTLSTEESIEMFGDINLTLGMLNKEDIVNKEDIYSHLTSVIQNTDILDDAIVQRLIYYASKDMRDNNMLREIRMLAGEVLVSLAAHDFNSVMYEVQSNFRILELPDEFVVLALAELATSYVSQSIPFMMMTLLTMQTMLRLAEDERMKGTFCIALEKFSKAIYKYVNHWRDFPYPRLDANRLSDKIFMLFWYIMEKWAPLASPMQTLSIVKAHGPTVSLLLHREDFRGYALGQVPWLLNQYKDKEIDFHVTQSLKQILTAAVLYDIGLPRSLRRSIFINLLQQICRAPEPPVKENEMKASSCFLILAHSNPGELMEFFDEQVRSNNEAIRVGILTLLRLAVNADEPRLRDHIISIERTVKIVMGDLSTKVRNSVLLLIQTMCEKSYIEAREGWPLIDYVFSQFATLNRNLEKPVKTNFHENEKEEESVRETSLEVLKTLDPLVIGMPQVLWPRILTFVVPAEYTEALEPLFSIIRILIMAEEKKQHSAKESTALVVSTGAVKLPSPQQLLARLLVISMPASLGELRGAGAIGLLKILPEIIHPKLVDLWKTRLPELLQPLEGKNISTVLWETMLLQLLKESLWKISDVAWTIQLTQDFKQQMGSYSNNSTEKKFLWKALGTTLACCQDSDFVNSQIKEFLTAPNQLGDQRQGITSILGYCAENHLDIVLKVLKTFQNQEKFFMNRCKSLFSGKKSLTKTDVMVIYGAVALHAPKKQLLSRLNQDIISQVLSLHGQCSQVLGMSVMNKDMDLQMSFTRSITEIGIAVQDAEDQGFQFSYKEMLIGYMLDFIRDEPLDSLASPIRWKALIAIRYLSKLKPQLSLQDHLNILEENIRRLLPLPPLENLKSEGQTDKDKEHIQFLYERSMDALGKLLKTMMWDNVNAEDCQEMFNLLQMWLVSQKEWERERAFQITAKVLTNDIEAPENFKIGSLLGLLAPHSCDTLPTIRQAAASSTIGLFYIKGIHLEVERLQGLQEGLESDDVQVQIKISSKIAKIVSKFIPNEEILMFLEEMLDGLESLNPTCTKACGIWMITVLKQQGAALEDQLLEILGTIYHHMPVLRQKEESFQFILEAISQIASFHMDTVVVNLLQKPLPFDRDTKTLWKALAEKPASSGKLLQALIDKLETELEDDIARVEAISVACAMYEVISMGTSVTGLYPELFTLLLKLVSCTLGQKMLTCPWSHRRHVMQQGEQQQIPDPCRLSTATLKCLQAQAMREGLAKESDEGDNLWTLLSSPSTHHIGVCSLARSMAVWQHGVILDIMEQLLSSLTSSSENYRITGAAFFSELMKEPILWKHGNLRNVLILMDQSAWDSNATLRQMAIRGLGNTASGAPHKVKKHKQLMLESIIRGLYHLARTEVVCESLKALKKILELLTDRDVSFYFKEIVLQTRTFFEDEQDDVRLTAIFLFEDLAPLTGRRWKIFFAEEIKKSLISFLLHLWDPNPKIGVACRDVLMVCIPFLGLQELYGVLDRLLDQDLPRARDFYRQFCVKLAKKNQEILWILHTHSFTFFTSTWEVIRSAAVKLTDAVVLNLTSQYVELLDREQLTTRLQALRQDPCISVQRAAEAALQTLLRRCKETSIPL

SEQ ID NO: 12310 - protein, 248 aa, Homo sapiens
MKLTFFLGLLALISCFTPSESQRFSRRPYLPGQLPPPPLYRPRWVPPSPPPPYDSRLNSPLSLPFVPGRVPPSSFSRFSQAVILSQLFPLESIRQPRLFPGYPNLHFPLRPYYVGPIRILKPPFPPIPFFLAIYLPISNPEPQINITTADTTITTNPPTTATATTSTSTKPTMTISSSTVPISSTPEPATSISAATPAASTENTTQILANRPHTVLLNATVQVTTSNQTILSSPAFKSFWQKLFAIFG

SEQ ID NO: 12311 - protein, 1075 aa, Homo sapiens
MFYGTHFIMSPPTKSKLKRQSQLLSSMLSRTLSYKYRDLDSTFSSLGASDDPAELSTQLSAPGVLKVFGDSVCTGTHYKSVLATGTSSARELVKEALERYALDPRQAGQYVLCDVVGQAGDAGQRWQARCFRVFGDSEKPLLIQELWKPREGLSRRFELRKRSDVEELAAKEVDTITAGINAQARRLQRSRAKGTPTPALGDARSSPPPRLRRTVSETSLSPVNALPAAAQGPEEPGPDAMRYSLYQSPHLLLLQGYSQQHDSLVYVLNRDRHTVGQRTPSSKPSISLSAPDILPLHCTIRRQPLPDSGQAAGRLVLEPIPGAHISVNFSEVGHRTVVLHHGDLLSLGLYYLLLFKDPAQAQPLPARALARLRAVPQSCRLCGAALGARGAASPTQAALPRRQQLLLEFEPHLEDTLLQRIMTLIEPGGDDHKLTPAFLLCLCIQHSATHFQPGTFGQLLLKIARLIRETVWEKTKELAEKQAQLQEPISLASCAMADLVPDLQPILFWMSNSIELLYFIQQKCPLYMQSMEEQLDITGSKESLFSCTLTASEEAMAVLEEVVLYAFQQCVYYVSKSLYICLPALLECPPFQTERRESWSSAPELPEELRRVVSVYQAALDLLRQLQVHPEVASQMLAYLFFFSGTLLLNQLLDRGPSLSCFHWPRGVQACARLQQLLEWMRSAGFGAAGEHFFQKLSCTLNLLATPRAQLIQMSWTALRAAFPALSPAQLHRLLTHYQLASAMGPMSTWEPGAQDSPEAFRSEDVLESYENPPPIVLPSDGFQVDLEANCLDDSIYQHLLYVRHFLWGLRSRASPGSPGRPGSGASQPVCPEGMHHVVLDGHLEAPSCPLAPRDPGPAAREVAPERTLPLRGAPWAQAPPGRQPSRGGSQAGPPHTDSSCLLTPPSTPLGPEPGDPDWPESGGPCGKALPERQRNGLSGLRGAAPEGDSAALAEESPPAPSSRSSSTEDFCYVFTVELERGPSGLGMGLIDGMHTHLGAPGLYIQTLLPGSPAAADGRLSLGDRILEVNGSSLLGLGYLRAVDLIRHGGKKMRFLVAKSDVETAKKIHFRTPPL

SEQ ID NO: 12312 - protein, 2146 aa, Homo sapiens
MVNENTRMYIPEENHQGSNYGSPRPAHANMNANAAAGLAPEHIPTPGAALSWQAAIDAARQAKLMGSAGNATISTVSSTQRKRQQYGKPKKQGSTTATRPPRALLCLTLKNPIRRACISIVEWKPFEIIILLTIFANCVALAIYIPFPEDDSNATNSNLERVEYLFLIIFTVEAFLKVIAYGLLFHPNAYLRNGWNLLDFIIVVVGLFSAILEQATKADGANALGGKGAGFDVKALRAFRVLRPLRLVSGVPSLQVVLNSIIKAMVPLLHIALLVLFVIIIYAIIGLELFMGKMHKTCYNQEGIADVPAEDDPSPCALETGHGRQCQNGTVCKPGWDGPKHGITNFDNFAFAMLTVFQCITMEGWTDVLYWVNDAVGRDWPWIYFVTLIIIGSFFVLNLVLGVLSGEFSKEREKAKARGDFQKLREKQQLEEDLKGYLDWITQAEDIDPENEDEGMDEEKPRNMSMPTSETESVNTENVAGGDIEGENCGARLAHRISKSKFSRYWRRWNRFCRRKCRAAVKSNVFYWLVIFLVFLNTLTIASEHYNQPNWLTEVQDTANKALLALFTAEMLLKMYSLGLQAYFVSLFNRFDCFVVCGGILETILVETKIMSPLGISVLRCVRLLRIFKITRYWNSLSNLVASLLNSVRSIASLLLLLFLFIIIFSLLGMQLFGGKFNFDEMQTRRSTFDNFPQSLLTVFQILTGEDWNSVMYDGIMAYGGPSFPGMLVCIYFIILFICGNYILLNVFLAIAVDNLADAESLTSAQKEEEEEKERKKLARTASPEKKQELVEKPAVGESKEEKIELKSITADGESPPATKINMDDLQPNENEDKSPYPNPETTGEEDEEEPEMPVGPRPRPLSELHLKEKAVPMPEASAFFIFSSNNRFRLQCHRIVNDTIFTNLILFFILLSSISLAAEDPVQHTSFRNHILGNADYVFTSIFTLEIILKMTAYGAFLHKGSFCRNYFNILDLLVVSVSLISFGIQSSAINVVKILRVLRVLRPLRAINRAKGLKHVVQCVFVAIRTIGNIVIVTTLLQFMFACIGVQLFKGKLYTCSDSSKQTEAECKGNYITYKDGEVDHPIIQPRSWENSKFDFDNVLAAMMALFTVSTFEGWPELLYRSIDSHTEDKGPIYNYRVEISIFFIIYIIIIAFFMMNIFVGFVIVTFQEQGEQEYKNCELDKNQRQCVEYALKARPLRRYIPKNQHQYKVWYVVNSTYFEYLMFVLILLNTICLAMQHYGQSCLFKIAMNILNMLFTGLFTVEMILKLIAFKPKHYFCDAWNTFDALIVVGSIVDIAITEVNNAEENSRISITFFRLFRVMRLVKLLSRGEGIRTLLWTFIKSFQALPYVALLIVMLFFIYAVIGMQVFGKIALNDTTEINRNNNFQTFPQAVLLLFRCATGEAWQDIMLACMPGKKCAPESEPSNSTEGETPCGSSFAVFYFISFYMLCAFLIINLFVAVIMDNFDYLTRDWSILGPHHLDEFKRIWAEYDPEAKGRIKHLDVVTLLRRIQPPLGFGKLCPHRVACKRLVSMNMPLNSDGTVMFNATLFALVRTALRIKTEEGPSPSEAHQGAEDPFRPAGNLEQANEELRAIIKKIWKRTSMKLLDQVVPPAGDDEVTVGKFYATFLIQEYFRKFKKRKEQGLVGKPSQRNALSLQAGLRTLHDIGPEIRRAISGDLTAEEELDKAMKEAVSAASEDDIFRRAGGLFGNHVSYYQSDGRSAFPQTFTTQRPLHINKAGSSQGDTESPSHEKLVDSTFTPSSYSSTGSNANINNANNTALGRLPRPAGYPSTVSTVEGHGPPLSPAIRVQEVAWKLSSNRCHSRESQAAMAGQEETSQDETYEVKMNHDTEACSEPSLLSTEMLSYQDDENRQLTLPEEDKRDIRQSPKRGFLRSASLGRRASFHLECLKRQKDRGGDISQKTVLPLHLVHHQALAVAGLSPLLQRSHSPASFPRPFATPPATPGSRGWPPQPVPTLRLEGVESSEKLNSSFPSIHCGSWAETTPGGGGSSAARRVRPVSLMVPSQAGAPGRQFHGSASSLVEAVLISEGLGQFAQDPKFIEVTTQELADACDMTIEEMESAADNILSGGAPQSPNGALLPFVNCRDAGQDRAGGEEDAGCVRARGRPSEEELQDSRVYVSSL
